United States Patent Application Publication US 2024/0066114 A1 - sequence listing, part 23

SEQ ID NO: 26521 - RNA, 4091 nt, Artificial Sequence
  SARS-CoV-2/Wuhan/WIV05/2019__EPI_ISL_402128 spike protein mRNA gc (1-1273)(L18F_D80A_D215G_L242del_A243del_L244del_R246I_K417N_E484 K_N501Y_D614G_A701V)
gggaaauaagagagaaaagaagaguaagaagaaauauaagaccccggcgccgccaccauguucguguuccugguccuccugccccuggugagcucccagugcgugaacuucaccacccgcacgcagcucccgcccgccuacaccaacagcuucacccggggcgucuacuaccccgacaagguguuccgcuccagcgugcugcacuccacccaggaccuguuccuccccuucuucagcaacgucacgugguuccacgccauccacguguccgggaccaacggcaccaagcgguucgcgaacccggugcugcccuucaacgacggggucuacuucgccagcaccgagaaguccaacaucauccgcggcuggaucuucgggacgacccuggacagcaagacccagucccuccugaucgugaacaacgccaccaacguggucaucaaggugugcgaguuccaguucugcaacgaccccuuccugggcguguacuaccacaagaacaacaagagcuggauggaguccgaguuccgggucuacagcuccgccaacaacugcacguucgaguacgugagccagcccuuccucauggaccuggagggcaagcaggggaacuucaagaaccugcgcgaguucguguucaagaacaucgacggcuacuucaagaucuacuccaagcacaccccgaucaaccucguccgggggcugccccagggcuucagcgcccuggagccccucguggaccugcccaucgggaucaacaucacccgcuuccagacccugcacaucuccuaccucacgccgggcgacagcagcuccggcuggaccgcgggggccgccgccuacuacgugggcuaccugcagccccggaccuuccugcucaaguacaacgagaacgggaccaucacggacgcggucgacugcgcccuggacccccugagcgagaccaagugcacccucaaguccuucaccguggagaagggcaucuaccagacgagcaacuuccgcgugcagcccaccgaguccaucguccgguucccgaacaucaccaaccugugccccuucggcgagguguucaacgccacccgcuucgccagcgucuacgccuggaaccggaagcgcaucuccaacugcguggcggacuacagcgugcuguacaacuccgccagcuucuccacguucaagugcuacggggucagccccaccaagcucaacgaccugugcuucaccaacguguacgccgacuccuucgugauccggggcgacgagguccgccagaucgcccccgggcagaccggcaacaucgccgacuacaacuacaagcugccggacgacuucacggggugcgugaucgcguggaacagcaacaaccucgacuccaaggugggcggcaacuacaacuaccuguaccggcuguuccgcaagagcaaccucaagcccuucgagcgggacaucuccaccgagaucuaccaggccgggagcacccccugcaacggcgucaagggguucaacugcuacuucccccugcaguccuacggcuuccagccgaccuacggggugggcuaccagcccuaccgcguggucgugcugagcuucgagcuccugcacgcccccgccacggugugcggccccaagaaguccaccaaccuggucaagaacaagugcgugaacuucaacuucaacgggcucaccggcaccggggugcugaccgagagcaacaagaaguuccugccguuccagcaguucggccgggacaucgccgacacgaccgacgcgguccgcgacccccagacccucgagauccuggacaucacccccugcagcuucgggggcguguccgugaucacgccgggcaccaacaccagcaaccaggucgccgugcuguaccagggggugaacugcaccgagguccccguggccauccacgccgaccagcugacgcccaccuggcgcguguacuccaccggcagcaacgucuuccagacccgggccgggugccucaucggcgcggagcacgugaacaacuccuacgagugcgacauccccaucggcgccgggaucugcgccagcuaccagacgcagaccaacuccccgcgccgggcccgcagcguggcgucccagagcaucaucgccuacaccaugucccugggcgucgagaacagcguggccuacuccaacaacagcaucgccauccccaccaacuucacgaucuccgugaccaccgagauccugcccgucagcaugaccaagacgagcguggacugcaccauguacaucugcggggacuccaccgagugcagcaaccuccugcugcaguacggcuccuucugcacccagcucaaccgggcccugacggggaucgcgguggagcaggacaagaacacccaggaggucuucgcccaggugaagcagaucuacaagacgcccccgaucaaggacuucggcggcuucaacuucagccagauccugcccgaccccuccaagcccagcaagcgcuccuucaucgaggaccuccuguucaacaaggugacccuggccgacgccggguucaucaagcaguacggcgacugccucggggacaucgccgcgcgggaccugaucugcgcccagaaguucaacggccugaccguccucccgccccugcugaccgacgagaugaucgcccaguacaccagcgcccuccuggccgggaccaucacguccggcuggaccuucggcgcgggggccgcccugcagauccccuucgccaugcagauggcguaccgcuucaacggcaucggggugacccagaacgugcucuacgagaaccagaagcugaucgccaaccaguucaacagcgccaucggcaagauccaggacucccugagcuccaccgccagcgcccucgggaagcugcaggacgucgugaaccagaacgcgcaggcccugaacacgcucgugaagcagcuguccagcaacuucggcgccaucuccagcguccugaacgacauccucucccggcuggacaagguggaggccgaggugcagaucgaccgccugaucaccggccggcuccagagccugcagaccuacgucacccagcagcugauccgcgccgcggagauccgggccagcgccaaccucgccgccaccaagauguccgagugcgugcuggggcagagcaagcgcguggacuucugcggcaagggguaccaccugauguccuucccccagagcgcgccgcacggcgucguguuccuccacgucacguacgugcccgcccaggagaagaacuucaccaccgcccccgccaucugccacgacgggaaggcgcacuucccccgggagggcguguucgucuccaacggcacccacugguucgugacgcagcgcaacuucuacgagccgcagaucaucaccaccgacaacaccuucgugagcgggaacugcgacgucgugaucggcaucgugaacaacacggucuacgacccccugcagcccgagcuggacuccuucaaggaggagcucgacaaguacuucaagaaccacaccagccccgacguggaccugggggacaucuccggcaucaacgccagcguggucaacauccagaaggagaucgaccggcugaacgagguggccaagaaccucaacgagucccugaucgaccugcaggagcucggcaaguacgagcaguacaucaaguggccgugguacaucuggcugggguucaucgccggccugaucgccaucgugauggucaccaucaugcucugcugcaugaccagcugcugcuccugccugaaggggugcugcagcugcggcuccugcugcaaguucgacgaggacgacagcgagcccgugcugaagggggugaagcuccacuacacgugauaauaggcuggagccucgguggccuagcuucuugccccuugggccuccccccagccccuccuccccuuccugcacccguacccccguggucuuugaauaaagucugagugggcggcaaaaaaaaaaaaaaaaaaaaaaaaaaaaaaaaaaaaaaaaaaaaaaaaaaaaaaaaaaaaaaaaaaaaaaaaaaaaaaaaaaaaaaaaaaaaaaaaaaaaucuag

SEQ ID NO: 26522 - RNA, 4100 nt, Artificial Sequence
  SARS-CoV-2/Wuhan/WIV05/2019__EPI_ISL_402128 spike protein mRNA gc (1-1273)(E484K_D614G)
gggaaauaagagagaaaagaagaguaagaagaaauauaagaccccggcgccgccaccauguucguguuccugguccuccugccccuggugagcucccagugcgugaaccucaccacccgcacgcagcugccgcccgccuacaccaacagcuucacccggggcgucuacuaccccgacaagguguuccgcuccagcgugcugcacuccacccaggaccucuuccugcccuucuucagcaacgucacgugguuccacgccauccacguguccgggaccaacggcaccaagcgguucgacaacccggugcugcccuucaacgacggggucuacuucgcgagcaccgagaaguccaacaucauccgcggcuggaucuucgggacgacccucgacagcaagacccagucccugcugaucgugaacaacgccaccaacguggucaucaaggugugcgaguuccaguucugcaacgaccccuuccucggcguguacuaccacaagaacaacaagagcuggauggaguccgaguuccgggucuacagcuccgccaacaacugcacguucgaguacgugagccagcccuuccugauggaccuggagggcaagcaggggaacuucaagaaccuccgcgaguucguguucaagaacaucgacggcuacuucaagaucuacuccaagcacaccccgaucaaccugguccgggaccugccccagggguucagcgcccucgagccccugguggaccugcccaucggcaucaacaucacccgcuuccagacccuccuggcccugcaccgguccuaccucacgccgggggacagcagcuccggcuggaccgcgggcgccgccgccuacuacgugggguaccugcagccccgcaccuuccugcucaaguacaacgagaacggcaccaucacggacgcggucgacugcgcccuggacccccugagcgagaccaagugcacccucaaguccuucaccguggagaaggggaucuaccagacgagcaacuuccgggugcagcccaccgaguccaucguccgcuucccgaacaucaccaaccugugccccuucggcgagguguucaacgccacccgguucgccagcgucuacgccuggaaccgcaagcggaucuccaacugcguggcggacuacagcgugcuguacaacuccgccagcuucuccacguucaagugcuacggcgucagccccaccaagcucaacgaccugugcuucaccaacguguacgccgacuccuucgugauccgcggggacgagguccggcagaucgcccccggccagaccgggaagaucgccgacuacaacuacaagcugccggacgacuucacgggcugcgugaucgcguggaacagcaacaaccucgacuccaaggucgggggcaacuacaacuaccuguaccgccuguuccgcaagagcaaccucaagcccuucgagcgggacaucuccaccgagaucuaccaggccggcagcacccccugcaacggggugaagggcuucaacugcuacuucccccugcaguccuacggguuccagccgaccaacggcgugggguaccagcccuaccggguggucgugcugagcuucgagcuccugcacgcccccgccacggugugcggccccaagaaguccaccaaccuggucaagaacaagugcgugaacuucaacuucaacggccucaccgggaccggcgugcugaccgagagcaacaagaaguuccugccguuccagcaguucgggcgcgacaucgccgacacgaccgacgcgguccgcgacccccagacccuggagauccucgacaucacccccugcagcuucggcgggguguccgugaucacgccgggcaccaacaccagcaaccaggucgccgugcuguaccagggcgugaacugcaccgagguccccguggccauccacgccgaccagcugacgcccaccuggcggguguacuccaccgggagcaacgucuuccagacccgcgccggcugccucaucggggcggagcacgugaacaacuccuacgagugcgacauccccaucggcgccggcaucugcgccagcuaccagacgcagaccaacuccccgcggcgcgcccggagcguggcgucccagagcaucaucgccuacaccaugucccugggggccgagaacagcgucgccuacuccaacaacagcaucgccauccccaccaacuucacgaucuccgugaccaccgagauccugcccgugagcaugaccaagacgagcgucgacugcaccauguacaucugcggcgacuccaccgagugcagcaaccuccugcugcaguacggguccuucugcacccagcucaaccgcgcgcugacgggcaucgccguggagcaggacaagaacacccaggagguguucgcccaggucaagcagaucuacaagacgcccccgaucaaggacuucgggggcuucaacuucagccagauccugcccgaccccuccaagcccagcaagcgguccuucaucgaggaccuccuguucaacaaggugacccuggccgacgccggcuucaucaagcaguacggggacugccucggcgacaucgcggcccgcgaccugaucugcgcccagaaguucaacgggcugaccgugcucccgccccugcugaccgacgagaugaucgcccaguacaccagcgcccuccuggcgggcaccaucacguccggguggaccuucggcgccggcgccgcccugcagauccccuucgcgaugcagauggccuaccgguucaacgggaucggcgucacccagaacgugcucuacgagaaccagaagcugaucgccaaccaguucaacagcgccaucgggaagauccaggacucccugagcuccaccgccagcgcgcucggcaagcugcaggacguggucaaccagaacgcccaggcccugaacacgcucgugaagcagcuguccagcaacuucggggccaucuccagcgugcugaacgacauccucucccgccuggacaaggucgaggccgaggugcagaucgaccggcugaucaccggccgccuccagagccugcagaccuacgugacccagcagcugauccgggcggccgagauccgcgccagcgccaaccucgccgcgaccaagauguccgagugcguccugggccagagcaagcggguggacuucugcgggaagggcuaccaccugauguccuucccccagagcgccccgcacgggguggucuuccuccacgugacguacguccccgcccaggagaagaacuucaccaccgcccccgcgaucugccacgacggcaaggcccacuucccccgcgaggggguguucguguccaacggcacccacugguucgucacgcagcggaacuucuacgagccgcagaucaucaccaccgacaacaccuucgugagcggcaacugcgacguggucaucgggaucgugaacaacacgguguacgacccccugcagcccgagcuggacuccuucaaggaggagcucgacaaguacuucaagaaccacaccagccccgacgucgaccugggcgacaucuccgggaucaacgccagcguggugaacauccagaaggagaucgaccgccugaacgaggucgccaagaaccucaacgagucccugaucgaccugcaggagcucggcaaguacgagcaguacaucaaguggccgugguacaucuggcugggcuucaucgccgggcugaucgcgaucgugauggugaccaucaugcucugcugcaugaccagcugcugcuccugccugaagggcugcugcagcugcggguccugcugcaaguucgacgaggacgacagcgagcccguccugaagggcgugaagcuccacuacacgugauaauaggcuggagccucgguggccuagcuucuugccccuugggccuccccccagccccuccuccccuuccugcacccguacccccguggucuuugaauaaagucugagugggcggcaaaaaaaaaaaaaaaaaaaaaaaaaaaaaaaaaaaaaaaaaaaaaaaaaaaaaaaaaaaaaaaaaaaaaaaaaaaaaaaaaaaaaaaaaaaaaaaaaaaaucuag

SEQ ID NO: 26523 - RNA, 4100 nt, Artificial Sequence
  SARS-CoV-2/Wuhan/WIV05/2019__EPI_ISL_402128 spike protein mRNA gc (1-1273)(L18F_T20N_P26S_D138Y_R190S_K417T_E484K_N501Y_D614G_H655Y _T1027I)
gggaaauaagagagaaaagaagaguaagaagaaauauaagaccccggcgccgccaccauguucguguuccugguccuccugccccuggugagcucccagugcgugaacuucaccaaccgcacccagcucccgagcgccuacacgaacuccuucacccggggcgucuacuaccccgacaagguguuccgcagcuccgugcugcacagcacccaggaccuguuccuccccuucuucuccaacgucaccugguuccacgccauccacgugagcgggacgaacggcaccaagcgguucgacaaccccgugcugccguucaacgacggggucuacuucgcguccaccgagaaguccaacaucauccgcggcuggaucuucgggaccacgcuggacuccaagacccagagccuccugaucgugaacaacgccaccaacguggucaucaaggugugcgaguuccaguucugcaacuaccccuuccugggcguguacuaccacaagaacaacaaguccuggauggagagcgaguuccgggucuacuccagcgccaacaacugcaccuucgaguacgugucccagcccuuccucauggaccuggagggcaagcaggggaacuucaagaaccugagcgaguucguguucaagaacaucgacggcuacuucaagaucuacuccaagcacacgcccaucaaccucguccgcgaccugccgcagggguucagcgcccuggagccccucguggaccugcccaucggcaucaacaucacccgguuccagacccugcucgcccugcaccgcagcuaccugacccccggggacuccagcuccggcuggacggcgggcgccgccgccuacuacgugggguaccuccagccgcggaccuuccugcugaaguacaacgagaacggcaccaucaccgacgcggucgacugcgcccucgacccccugagcgagacgaagugcacccugaaguccuucaccguggagaaggggaucuaccagaccagcaacuuccgcgugcagcccacggaguccaucguccgguuccccaacaucaccaaccucugcccguucggcgagguguucaacgccacccgcuucgccagcgucuacgccuggaaccggaagcgcaucuccaacugcguggcggacuacagcgugcuguacaacuccgccagcuucuccaccuucaagugcuacggcgucagccccacgaagcugaacgaccucugcuucaccaacguguacgccgacuccuucgugauccgcggggacgagguccggcagaucgcccccggccagaccgggaccaucgccgacuacaacuacaagcugcccgacgacuucacgggcugcgugaucgcguggaacagcaacaaccuggacuccaaggucgggggcaacuacaacuaccucuaccggcuguuccgcaagagcaaccugaagccguucgagcgggacaucuccaccgagaucuaccaggccggcagcacccccugcaacggggugaagggcuucaacugcuacuucccccuccagagcuacggguuccagcccaccuacggcgugggguaccagccguaccgcguggucgugcuguccuucgagcugcuccacgcccccgccacggugugcggccccaagaaguccaccaaccuggucaagaacaagugcgugaacuucaacuucaacggccugaccgggaccggcgugcucaccgagagcaacaagaaguuccugcccuuccagcaguucgggcgggacaucgccgacacgaccgacgcgguccgcgacccgcagacccuggagauccuggacaucacccccugcagcuucggcgggguguccgugaucacgcccggcaccaacaccagcaaccaggucgccgugcucuaccagggcgugaacugcaccgaggucccgguggccauccacgccgaccagcugacgcccaccuggcgcguguacuccaccgggagcaacgucuuccagacccgggccggcugccugaucggggcggaguacgugaacaacuccuacgagugcgacauccccaucggcgccggcaucugcgccagcuaccagacgcagaccaacagcccccgccgggcccgcagcguggcgucccagagcaucaucgccuacaccaugucccucggggccgagaacagcgucgccuacuccaacaacagcaucgccaucccgaccaacuucacgaucagcgugaccaccgagauccugcccguguccaugaccaagacgagcgucgacugcaccauguacaucugcggcgacuccaccgagugcagcaaccugcuccugcaguacggguccuucugcacccagcugaaccgggcgcucacgggcaucgccguggagcaggacaagaacacccaggagguguucgcccaggucaagcagaucuacaagaccccgcccaucaaggacuucgggggcuucaacuucagccagauccugcccgaccccuccaagcccagcaagcgcuccuucaucgaggaccuccuguucaacaaggugacccuggccgacgccggcuucaucaagcaguacggggacugccugggcgacaucgcggcccgggaccucaucugcgcccagaaguucaacgggcugacggugcugcccccgcuccugaccgacgagaugaucgcccaguacaccagcgcccugcucgcgggcaccaucacguccggguggaccuucggcgccggcgccgcccugcagauccccuucgcgaugcagauggccuaccgcuucaacgggaucggcgucacccagaacgugcuguacgagaaccagaagcucaucgccaaccaguucaacagcgccaucgggaagauccaggacucccugagcuccaccgccagcgcgcugggcaagcuccaggacguggucaaccagaacgcccaggcccugaacacgcuggugaagcagcucuccagcaacuucggggccaucuccagcgugcugaacgacauccugagccggcucgacaaggucgaggccgaggugcagaucgaccgccugaucaccggccggcugcagucccuccagaccuacgugacccagcagcugauccgcgcggccgagauccgggccagcgccaaccuggccgcgaucaagauguccgagugcguccucggccagagcaagcgcguggacuucugcgggaagggcuaccaccugauguccuucccccagagcgcgccccacgggguggucuuccugcacgugaccuacgucccggcccaggagaagaacuucacgaccgcccccgccaucugccacgacggcaaggcccacuucccccgggaggggguguucguguccaacggcacccacugguucgucacccagcgcaacuucuacgagccccagaucaucacgaccgacaacaccuucgugagcggcaacugcgacguggucaucgggaucgugaacaacaccguguacgacccgcuccagcccgagcuggacuccuucaaggaggagcuggacaaguacuucaagaaccacacgagccccgacgucgaccucggcgacaucuccgggaucaacgccagcguggugaacauccagaaggagaucgaccggcugaacgaggucgccaagaaccugaacgagucccucaucgaccugcaggagcugggcaaguacgagcaguacaucaaguggcccugguacaucuggcucggcuucaucgccgggcugaucgcgaucgugauggugaccaucaugcugugcugcaugaccagcugcugcuccugccucaagggcugcugcagcugcggguccugcugcaaguucgacgaggacgacagcgagccgguccugaagggcgugaagcugcacuacaccugauaauaggcuggagccucgguggccuagcuucuugccccuugggccuccccccagccccuccuccccuuccugcacccguacccccguggucuuugaauaaagucugagugggcggcaaaaaaaaaaaaaaaaaaaaaaaaaaaaaaaaaaaaaaaaaaaaaaaaaaaaaaaaaaaaaaaaaaaaaaaaaaaaaaaaaaaaaaaaaaaaaaaaaaaaucuag

SEQ ID NO: 26524 - RNA, 4100 nt, Artificial Sequence
  SARS-CoV-2/Wuhan/WIV05/2019__EPI_ISL_402128 spike protein mRNA gc (1-1273)(S13I_W152C_L452R_D614G)
gggaaauaagagagaaaagaagaguaagaagaaauauaagaccccggcgccgccaccauguucguguuccugguccuccugccccuggugagcauccagugcgugaaccucaccacccgcacgcagcugccgcccgccuacaccaacuccuucacccggggcgucuacuaccccgacaagguguuccgcagcuccgugcugcacagcacccaggaccucuuccugcccuucuucuccaacgucacgugguuccacgccauccacgugagcgggaccaacggcaccaagcgguucgacaacccggugcugcccuucaacgacggggucuacuucgcguccaccgagaaguccaacaucauccgcggcuggaucuucgggacgacccucgacagcaagacccagagccugcugaucgugaacaacgccaccaacguggucaucaaggugugcgaguuccaguucugcaacgaccccuuccucggcguguacuaccacaagaacaacaaguccugcauggagagcgaguuccgggucuacuccagcgccaacaacugcacguucgaguacgugucccagcccuuccugauggaccuggagggcaagcaggggaacuucaagaaccuccgcgaguucguguucaagaacaucgacggcuacuucaagaucuacagcaagcacaccccgaucaaccugguccgggaccugccccagggguucuccgcccucgagccccugguggaccugcccaucggcaucaacaucacccgcuuccagacccuccuggcccugcaccggagcuaccucacgccgggggacuccagcagcggcuggaccgcgggcgccgccgccuacuacgugggguaccugcagccccgcaccuuccugcucaaguacaacgagaacggcaccaucacggacgcggucgacugcgcccuggacccccuguccgagaccaagugcacccucaagagcuucaccguggagaaggggaucuaccagacguccaacuuccgggugcagcccaccgagagcaucguccgcuucccgaacaucaccaaccugugccccuucggcgagguguucaacgccacccgguucgccuccgucuacgccuggaaccgcaagcggaucagcaacugcguggcggacuacuccgugcuguacaacagcgccuccuucagcacguucaagugcuacggcgucucccccaccaagcucaacgaccugugcuucaccaacguguacgccgacagcuucgugauccgcggggacgagguccggcagaucgcccccggccagaccgggaagaucgccgacuacaacuacaagcugccggacgacuucacgggcugcgugaucgcguggaacuccaacaaccucgacagcaaggucgggggcaacuacaacuaccgcuaccggcuguuccgcaaguccaaccugaagcccuucgagcgggacaucagcaccgagaucuaccaggccggcuccacccccugcaacgggguggagggcuucaacugcuacuucccccuccagagcuacggguuccagccgaccaacggcgugggguaccagcccuaccgcguggucgugcuguccuucgagcugcuccacgcccccgccacggugugcggccccaagaaguccaccaaccuggucaagaacaagugcgugaacuucaacuucaacggccugaccgggaccggcgugcucaccgagagcaacaagaaguuccugccguuccagcaguucgggcgcgacaucgccgacacgaccgacgcgguccgggacccccagacccuggagauccuggacaucacccccugcagcuucggcggggugagcgugaucacgccgggcaccaacaccuccaaccaggucgccgugcucuaccagggcgugaacugcaccgagguccccguggccauccacgccgaccagcugacgcccaccuggcgcguguacagcaccggguccaacgucuuccagacccgggccggcugccugaucggggcggagcacgugaacaacagcuacgagugcgacauccccaucggcgccggcaucugcgccuccuaccagacgcagaccaacagcccgcgccgggcccgcuccguggcgagccaguccaucaucgccuacaccaugagccucggggccgagaacuccgucgccuacagcaacaacuccaucgccauccccaccaacuucacgaucagcgugaccaccgagauccugcccguguccaugaccaagacgagcgucgacugcaccauguacaucugcggcgacagcaccgagugcuccaaccugcuccugcaguacgggagcuucugcacccagcugaaccgggcgcucacgggcaucgccguggagcaggacaagaacacccaggagguguucgcccaggucaagcagaucuacaagacgcccccgaucaaggacuucgggggcuucaacuucucccagauccugcccgaccccagcaagcccuccaagcgcagcuucaucgaggaccuccuguucaacaaggugacccuggccgacgccggcuucaucaagcaguacggggacugccugggcgacaucgcggcccgggaccucaucugcgcccagaaguucaacgggcugaccgugcugccgccccuccugaccgacgagaugaucgcccaguacaccuccgcccugcucgcgggcaccaucacgagcggguggaccuucggcgccggcgccgcccugcagauccccuucgcgaugcagauggccuaccgcuucaacgggaucggcgucacccagaacgugcuguacgagaaccagaagcucaucgccaaccaguucaacuccgccaucgggaagauccaggacagccuguccagcaccgccuccgcgcugggcaagcuccaggacguggucaaccagaacgcccaggcccugaacacgcuggugaagcagcucagcuccaacuucggggccaucagcuccgugcugaacgacauccugagccggcucgacaaggucgaggccgaggugcagaucgaccgccugaucaccggccggcugcagucccuccagaccuacgugacccagcagcugauccgcgcggccgagauccgggccagcgccaaccuggccgcgaccaagaugagcgagugcguccucggccaguccaagcgcguggacuucugcgggaagggcuaccaccugaugagcuucccccaguccgccccgcacgggguggucuuccugcacgugacguacguccccgcccaggagaagaacuucaccaccgcccccgcgaucugccacgacggcaaggcccacuucccccgggaggggguguucgugagcaacggcacccacugguucgucacgcagcgcaacuucuacgagccgcagaucaucaccaccgacaacaccuucguguccggcaacugcgacguggucaucgggaucgugaacaacacgguguacgacccccuccagcccgagcuggacagcuucaaggaggagcuggacaaguacuucaagaaccacaccucccccgacgucgaccucggcgacaucagcgggaucaacgccuccguggugaacauccagaaggagaucgaccggcugaacgaggucgccaagaaccugaacgagagccucaucgaccugcaggagcugggcaaguacgagcaguacaucaaguggccgugguacaucuggcucggcuucaucgccgggcugaucgcgaucgugauggugaccaucaugcugugcugcaugaccuccugcugcagcugccucaagggcugcugcuccugcgggagcugcugcaaguucgacgaggacgacuccgagcccguccugaagggcgugaagcugcacuacacgugauaauaggcuggagccucgguggccuagcuucuugccccuugggccuccccccagccccuccuccccuuccugcacccguacccccguggucuuugaauaaagucugagugggcggcaaaaaaaaaaaaaaaaaaaaaaaaaaaaaaaaaaaaaaaaaaaaaaaaaaaaaaaaaaaaaaaaaaaaaaaaaaaaaaaaaaaaaaaaaaaaaaaaaaaaucuag

SEQ ID NO: 26525 - RNA, 4100 nt, Artificial Sequence
  SARS-CoV-2/Wuhan/WIV05/2019__EPI_ISL_402128 spike protein mRNA gc (1-1273)
gggaaauaagagagaaaagaagaguaagaagaaauauaagaccccggcgccgccaccauguucguguuccuggugcugcugccccuggugagcagccagugcgugaaccugaccacccggacccagcugccaccagccuacaccaacagcuucacccggggcgucuacuaccccgacaagguguuccggagcagcguccugcacagcacccaggaccuguuccugcccuucuucagcaacgugaccugguuccacgccauccacgugagcggcaccaacggcaccaagcgguucgacaaccccgugcugcccuucaacgacggcguguacuucgccagcaccgagaagagcaacaucauccggggcuggaucuucggcaccacccuggacagcaagacccagagccugcugaucgugaauaacgccaccaacguggugaucaaggugugcgaguuccaguucugcaacgaccccuuccugggcguguacuaccacaagaacaacaagagcuggauggagagcgaguuccggguguacagcagcgccaacaacugcaccuucgaguacgugagccagcccuuccugauggaccuggagggcaagcagggcaacuucaagaaccugcgggaguucguguucaagaacaucgacggcuacuucaagaucuacagcaagcacaccccaaucaaccuggugcgggaucugccccagggcuucucagcccuggagccccugguggaccugcccaucggcaucaacaucacccgguuccagacccugcuggcccugcaccggagcuaccugaccccaggcgacagcagcagcggguggacagcaggcgcggcugcuuacuacgugggcuaccugcagccccggaccuuccugcugaaguacaacgagaacggcaccaucaccgacgccguggacugcgcccuggacccucugagcgagaccaagugcacccugaagagcuucaccguggagaagggcaucuaccagaccagcaacuuccgggugcagcccaccgagagcaucgugcgguuccccaacaucaccaaccugugccccuucggcgagguguucaacgccacccgguucgccagcguguacgccuggaaccggaagcggaucagcaacugcguggccgacuacagcgugcuguacaacagcgccagcuucagcaccuucaagugcuacggcgugagccccaccaagcugaacgaccugugcuucaccaacguguacgccgacagcuucgugauccguggcgacgaggugcggcagaucgcacccggccagacaggcaagaucgccgacuacaacuacaagcugcccgacgacuucaccggcugcgugaucgccuggaacagcaacaaccucgacagcaaggugggcggcaacuacaacuaccuguaccggcuguuccggaagagcaaccugaagcccuucgagcgggacaucagcaccgagaucuaccaagccggcuccaccccuugcaacggcguggagggcuucaacugcuacuucccucugcagagcuacggcuuccagcccaccaacggcgugggcuaccagcccuaccgggugguggugcugagcuucgagcugcugcacgccccagccaccguguguggccccaagaagagcaccaaccuggugaagaacaagugcgugaacuucaacuucaacggccuuaccggcaccggcgugcugaccgagagcaacaagaaauuccugcccuuucagcaguucggccgggacaucgccgacaccaccgacgcugugcgggauccccagacccuggagauccuggacaucaccccuugcagcuucggcggcgugagcgugaucaccccaggcaccaacaccagcaaccagguggccgugcuguaccaggacgugaacugcaccgaggugcccguggccauccacgccgaccagcugacacccaccuggcgggucuacagcaccggcagcaacguguuccagacccgggccgguugccugaucggcgccgagcacgugaacaacagcuacgagugcgacauccccaucggcgccggcaucugugccagcuaccagacccagaccaauucaccccggagggcaaggagcguggccagccagagcaucaucgccuacaccaugagccugggcgccgagaacagcguggccuacagcaacaacagcaucgccauccccaccaacuucaccaucagcgugaccaccgagauucugcccgugagcaugaccaagaccagcguggacugcaccauguacaucugcggcgacagcaccgagugcagcaaccugcugcugcaguacggcagcuucugcacccagcugaaccgggcccugaccggcaucgccguggagcaggacaagaacacccaggagguguucgcccaggugaagcagaucuacaagaccccucccaucaaggacuucggcggcuucaacuucagccagauccugcccgaccccagcaagcccagcaagcggagcuucaucgaggaccugcuguucaacaaggugacccuagccgacgccggcuucaucaagcaguacggcgacugccucggcgacauagccgcccgggaccugaucugcgcccagaaguucaacggccugaccgugcugccuccccugcugaccgacgagaugaucgcccaguacaccagcgcccuguuagccggaaccaucaccagcggcuggacuuucggcgcuggagccgcucugcagauccccuucgccaugcagauggccuaccgguucaacggcaucggcgugacccagaacgugcuguacgagaaccagaagcugaucgccaaccaguucaacagcgccaucggcaagauccaggacagccugagcagcaccgcuagcgcccugggcaagcugcaggacguggugaaccagaacgcccaggcccugaacacccuggugaagcagcugagcagcaacuucggcgccaucagcagcgugcugaacgacauccugagccggcuggacaaggucgaggccgaggugcagaucgaccggcugaucacuggccggcugcagagccugcagaccuacgugacccagcagcugauccgggccgccgagauucgggccagcgccaaccuggccgccaccaagaugagcgagugcgugcugggccagagcaagcggguggacuucugcggcaagggcuaccaccugaugagcuuuccccagagcgcaccccacggagugguguuccugcacgugaccuacgugcccgcccaggagaagaacuucaccaccgccccagccaucugccacgacggcaaggcccacuuuccccgggagggcguguucgugagcaacggcacccacugguucgugacccagcggaacuucuacgagccccagaucaucaccaccgacaacaccuucgugagcggcaacugcgacguggugaucggcaucgugaacaacaccguguacgauccccugcagcccgagcuggacagcuucaaggaggagcuggacaaguacuucaagaaucacaccagccccgacguggaccugggcgacaucagcggcaucaacgccagcguggugaacauccagaaggagaucgaucggcugaacgagguggccaagaaccugaacgagagccugaucgaccugcaggagcugggcaaguacgagcaguacaucaaguggcccugguacaucuggcugggcuucaucgccggccugaucgccaucgugauggugaccaucaugcugugcugcaugaccagcugcugcagcugccugaagggcuguugcagcugcggcagcugcugcaaguucgacgaggacgacagcgagcccgugcugaagggcgugaagcugcacuacaccugauaauaggcuggagccucgguggccuagcuucuugccccuugggccuccccccagccccuccuccccuuccugcacccguacccccguggucuuugaauaaagucugagugggcggcaaaaaaaaaaaaaaaaaaaaaaaaaaaaaaaaaaaaaaaaaaaaaaaaaaaaaaaaaaaaaaaaaaaaaaaaaaaaaaaaaaaaaaaaaaaaaaaaaaaaucuag

SEQ ID NO: 26526 - RNA, 4100 nt, Artificial Sequence
  SARS-CoV-2/Wuhan/WIV05/2019__EPI_ISL_402128 spike protein mRNA gc (1-1273)(D614G)
gggaaauaagagagaaaagaagaguaagaagaaauauaagaccccggcgccgccaccauguucguguuccuggugcugcugccccuggugagcagccagugcgugaaccugaccacccggacccagcugccaccagccuacaccaacagcuucacccggggcgucuacuaccccgacaagguguuccggagcagcguccugcacagcacccaggaccuguuccugcccuucuucagcaacgugaccugguuccacgccauccacgugagcggcaccaacggcaccaagcgguucgacaaccccgugcugcccuucaacgacggcguguacuucgccagcaccgagaagagcaacaucauccggggcuggaucuucggcaccacccuggacagcaagacccagagccugcugaucgugaauaacgccaccaacguggugaucaaggugugcgaguuccaguucugcaacgaccccuuccugggcguguacuaccacaagaacaacaagagcuggauggagagcgaguuccggguguacagcagcgccaacaacugcaccuucgaguacgugagccagcccuuccugauggaccuggagggcaagcagggcaacuucaagaaccugcgggaguucguguucaagaacaucgacggcuacuucaagaucuacagcaagcacaccccaaucaaccuggugcgggaucugccccagggcuucucagcccuggagccccugguggaccugcccaucggcaucaacaucacccgguuccagacccugcuggcccugcaccggagcuaccugaccccaggcgacagcagcagcggguggacagcaggcgcggcugcuuacuacgugggcuaccugcagccccggaccuuccugcugaaguacaacgagaacggcaccaucaccgacgccguggacugcgcccuggacccucugagcgagaccaagugcacccugaagagcuucaccguggagaagggcaucuaccagaccagcaacuuccgggugcagcccaccgagagcaucgugcgguuccccaacaucaccaaccugugccccuucggcgagguguucaacgccacccgguucgccagcguguacgccuggaaccggaagcggaucagcaacugcguggccgacuacagcgugcuguacaacagcgccagcuucagcaccuucaagugcuacggcgugagccccaccaagcugaacgaccugugcuucaccaacguguacgccgacagcuucgugauccguggcgacgaggugcggcagaucgcacccggccagacaggcaagaucgccgacuacaacuacaagcugcccgacgacuucaccggcugcgugaucgccuggaacagcaacaaccucgacagcaaggugggcggcaacuacaacuaccuguaccggcuguuccggaagagcaaccugaagcccuucgagcgggacaucagcaccgagaucuaccaagccggcuccaccccuugcaacggcguggagggcuucaacugcuacuucccucugcagagcuacggcuuccagcccaccaacggcgugggcuaccagcccuaccgggugguggugcugagcuucgagcugcugcacgccccagccaccguguguggccccaagaagagcaccaaccuggugaagaacaagugcgugaacuucaacuucaacggccuuaccggcaccggcgugcugaccgagagcaacaagaaauuccugcccuuucagcaguucggccgggacaucgccgacaccaccgacgcugugcgggauccccagacccuggagauccuggacaucaccccuugcagcuucggcggcgugagcgugaucaccccaggcaccaacaccagcaaccagguggccgugcuguaccagggcgugaacugcaccgaggugcccguggccauccacgccgaccagcugacacccaccuggcgggucuacagcaccggcagcaacguguuccagacccgggccgguugccugaucggcgccgagcacgugaacaacagcuacgagugcgacauccccaucggcgccggcaucugugccagcuaccagacccagaccaauucaccccggagggcaaggagcguggccagccagagcaucaucgccuacaccaugagccugggcgccgagaacagcguggccuacagcaacaacagcaucgccauccccaccaacuucaccaucagcgugaccaccgagauucugcccgugagcaugaccaagaccagcguggacugcaccauguacaucugcggcgacagcaccgagugcagcaaccugcugcugcaguacggcagcuucugcacccagcugaaccgggcccugaccggcaucgccguggagcaggacaagaacacccaggagguguucgcccaggugaagcagaucuacaagaccccucccaucaaggacuucggcggcuucaacuucagccagauccugcccgaccccagcaagcccagcaagcggagcuucaucgaggaccugcuguucaacaaggugacccuagccgacgccggcuucaucaagcaguacggcgacugccucggcgacauagccgcccgggaccugaucugcgcccagaaguucaacggccugaccgugcugccuccccugcugaccgacgagaugaucgcccaguacaccagcgcccuguuagccggaaccaucaccagcggcuggacuuucggcgcuggagccgcucugcagauccccuucgccaugcagauggccuaccgguucaacggcaucggcgugacccagaacgugcuguacgagaaccagaagcugaucgccaaccaguucaacagcgccaucggcaagauccaggacagccugagcagcaccgcuagcgcccugggcaagcugcaggacguggugaaccagaacgcccaggcccugaacacccuggugaagcagcugagcagcaacuucggcgccaucagcagcgugcugaacgacauccugagccggcuggacaaggucgaggccgaggugcagaucgaccggcugaucacuggccggcugcagagccugcagaccuacgugacccagcagcugauccgggccgccgagauucgggccagcgccaaccuggccgccaccaagaugagcgagugcgugcugggccagagcaagcggguggacuucugcggcaagggcuaccaccugaugagcuuuccccagagcgcaccccacggagugguguuccugcacgugaccuacgugcccgcccaggagaagaacuucaccaccgccccagccaucugccacgacggcaaggcccacuuuccccgggagggcguguucgugagcaacggcacccacugguucgugacccagcggaacuucuacgagccccagaucaucaccaccgacaacaccuucgugagcggcaacugcgacguggugaucggcaucgugaacaacaccguguacgauccccugcagcccgagcuggacagcuucaaggaggagcuggacaaguacuucaagaaucacaccagccccgacguggaccugggcgacaucagcggcaucaacgccagcguggugaacauccagaaggagaucgaucggcugaacgagguggccaagaaccugaacgagagccugaucgaccugcaggagcugggcaaguacgagcaguacaucaaguggcccugguacaucuggcugggcuucaucgccggccugaucgccaucgugauggugaccaucaugcugugcugcaugaccagcugcugcagcugccugaagggcuguugcagcugcggcagcugcugcaaguucgacgaggacgacagcgagcccgugcugaagggcgugaagcugcacuacaccugauaauaggcuggagccucgguggccuagcuucuugccccuugggccuccccccagccccuccuccccuuccugcacccguacccccguggucuuugaauaaagucugagugggcggcaaaaaaaaaaaaaaaaaaaaaaaaaaaaaaaaaaaaaaaaaaaaaaaaaaaaaaaaaaaaaaaaaaaaaaaaaaaaaaaaaaaaaaaaaaaaaaaaaaaaucuag

SEQ ID NO: 26527 - RNA, 4100 nt, Artificial Sequence
  SARS-CoV-2/Wuhan/WIV05/2019__EPI_ISL_402128 spike protein mRNA gc (1-1273)(A222V_D614G)
gggaaauaagagagaaaagaagaguaagaagaaauauaagaccccggcgccgccaccauguucguguuccuggugcugcugccccuggugagcagccagugcgugaaccugaccacccggacccagcugccaccagccuacaccaacagcuucacccggggcgucuacuaccccgacaagguguuccggagcagcguccugcacagcacccaggaccuguuccugcccuucuucagcaacgugaccugguuccacgccauccacgugagcggcaccaacggcaccaagcgguucgacaaccccgugcugcccuucaacgacggcguguacuucgccagcaccgagaagagcaacaucauccggggcuggaucuucggcaccacccuggacagcaagacccagagccugcugaucgugaauaacgccaccaacguggugaucaaggugugcgaguuccaguucugcaacgaccccuuccugggcguguacuaccacaagaacaacaagagcuggauggagagcgaguuccggguguacagcagcgccaacaacugcaccuucgaguacgugagccagcccuuccugauggaccuggagggcaagcagggcaacuucaagaaccugcgggaguucguguucaagaacaucgacggcuacuucaagaucuacagcaagcacaccccaaucaaccuggugcgggaucugccccagggcuucucagugcuggagccccugguggaccugcccaucggcaucaacaucacccgguuccagacccugcuggcccugcaccggagcuaccugaccccaggcgacagcagcagcggguggacagcaggcgcggcugcuuacuacgugggcuaccugcagccccggaccuuccugcugaaguacaacgagaacggcaccaucaccgacgccguggacugcgcccuggacccucugagcgagaccaagugcacccugaagagcuucaccguggagaagggcaucuaccagaccagcaacuuccgggugcagcccaccgagagcaucgugcgguuccccaacaucaccaaccugugccccuucggcgagguguucaacgccacccgguucgccagcguguacgccuggaaccggaagcggaucagcaacugcguggccgacuacagcgugcuguacaacagcgccagcuucagcaccuucaagugcuacggcgugagccccaccaagcugaacgaccugugcuucaccaacguguacgccgacagcuucgugauccguggcgacgaggugcggcagaucgcacccggccagacaggcaagaucgccgacuacaacuacaagcugcccgacgacuucaccggcugcgugaucgccuggaacagcaacaaccucgacagcaaggugggcggcaacuacaacuaccuguaccggcuguuccggaagagcaaccugaagcccuucgagcgggacaucagcaccgagaucuaccaagccggcuccaccccuugcaacggcguggagggcuucaacugcuacuucccucugcagagcuacggcuuccagcccaccaacggcgugggcuaccagcccuaccgggugguggugcugagcuucgagcugcugcacgccccagccaccguguguggccccaagaagagcaccaaccuggugaagaacaagugcgugaacuucaacuucaacggccuuaccggcaccggcgugcugaccgagagcaacaagaaauuccugcccuuucagcaguucggccgggacaucgccgacaccaccgacgcugugcgggauccccagacccuggagauccuggacaucaccccuugcagcuucggcggcgugagcgugaucaccccaggcaccaacaccagcaaccagguggccgugcuguaccagggcgugaacugcaccgaggugcccguggccauccacgccgaccagcugacacccaccuggcgggucuacagcaccggcagcaacguguuccagacccgggccgguugccugaucggcgccgagcacgugaacaacagcuacgagugcgacauccccaucggcgccggcaucugugccagcuaccagacccagaccaauucaccccggagggcaaggagcguggccagccagagcaucaucgccuacaccaugagccugggcgccgagaacagcguggccuacagcaacaacagcaucgccauccccaccaacuucaccaucagcgugaccaccgagauucugcccgugagcaugaccaagaccagcguggacugcaccauguacaucugcggcgacagcaccgagugcagcaaccugcugcugcaguacggcagcuucugcacccagcugaaccgggcccugaccggcaucgccguggagcaggacaagaacacccaggagguguucgcccaggugaagcagaucuacaagaccccucccaucaaggacuucggcggcuucaacuucagccagauccugcccgaccccagcaagcccagcaagcggagcuucaucgaggaccugcuguucaacaaggugacccuagccgacgccggcuucaucaagcaguacggcgacugccucggcgacauagccgcccgggaccugaucugcgcccagaaguucaacggccugaccgugcugccuccccugcugaccgacgagaugaucgcccaguacaccagcgcccuguuagccggaaccaucaccagcggcuggacuuucggcgcuggagccgcucugcagauccccuucgccaugcagauggccuaccgguucaacggcaucggcgugacccagaacgugcuguacgagaaccagaagcugaucgccaaccaguucaacagcgccaucggcaagauccaggacagccugagcagcaccgcuagcgcccugggcaagcugcaggacguggugaaccagaacgcccaggcccugaacacccuggugaagcagcugagcagcaacuucggcgccaucagcagcgugcugaacgacauccugagccggcuggacaaggucgaggccgaggugcagaucgaccggcugaucacuggccggcugcagagccugcagaccuacgugacccagcagcugauccgggccgccgagauucgggccagcgccaaccuggccgccaccaagaugagcgagugcgugcugggccagagcaagcggguggacuucugcggcaagggcuaccaccugaugagcuuuccccagagcgcaccccacggagugguguuccugcacgugaccuacgugcccgcccaggagaagaacuucaccaccgccccagccaucugccacgacggcaaggcccacuuuccccgggagggcguguucgugagcaacggcacccacugguucgugacccagcggaacuucuacgagccccagaucaucaccaccgacaacaccuucgugagcggcaacugcgacguggugaucggcaucgugaacaacaccguguacgauccccugcagcccgagcuggacagcuucaaggaggagcuggacaaguacuucaagaaucacaccagccccgacguggaccugggcgacaucagcggcaucaacgccagcguggugaacauccagaaggagaucgaucggcugaacgagguggccaagaaccugaacgagagccugaucgaccugcaggagcugggcaaguacgagcaguacaucaaguggcccugguacaucuggcugggcuucaucgccggccugaucgccaucgugauggugaccaucaugcugugcugcaugaccagcugcugcagcugccugaagggcuguugcagcugcggcagcugcugcaaguucgacgaggacgacagcgagcccgugcugaagggcgugaagcugcacuacaccugauaauaggcuggagccucgguggccuagcuucuugccccuugggccuccccccagccccuccuccccuuccugcacccguacccccguggucuuugaauaaagucugagugggcggcaaaaaaaaaaaaaaaaaaaaaaaaaaaaaaaaaaaaaaaaaaaaaaaaaaaaaaaaaaaaaaaaaaaaaaaaaaaaaaaaaaaaaaaaaaaaaaaaaaaaucuag

SEQ ID NO: 26528 - RNA, 4100 nt, Artificial Sequence
  SARS-CoV-2/Wuhan/WIV05/2019__EPI_ISL_402128 spike protein mRNA gc (1-1273)(N439K_D614G)
gggaaauaagagagaaaagaagaguaagaagaaauauaagaccccggcgccgccaccauguucguguuccuggugcugcugccccuggugagcagccagugcgugaaccugaccacccggacccagcugccaccagccuacaccaacagcuucacccggggcgucuacuaccccgacaagguguuccggagcagcguccugcacagcacccaggaccuguuccugcccuucuucagcaacgugaccugguuccacgccauccacgugagcggcaccaacggcaccaagcgguucgacaaccccgugcugcccuucaacgacggcguguacuucgccagcaccgagaagagcaacaucauccggggcuggaucuucggcaccacccuggacagcaagacccagagccugcugaucgugaauaacgccaccaacguggugaucaaggugugcgaguuccaguucugcaacgaccccuuccugggcguguacuaccacaagaacaacaagagcuggauggagagcgaguuccggguguacagcagcgccaacaacugcaccuucgaguacgugagccagcccuuccugauggaccuggagggcaagcagggcaacuucaagaaccugcgggaguucguguucaagaacaucgacggcuacuucaagaucuacagcaagcacaccccaaucaaccuggugcgggaucugccccagggcuucucagcccuggagccccugguggaccugcccaucggcaucaacaucacccgguuccagacccugcuggcccugcaccggagcuaccugaccccaggcgacagcagcagcggguggacagcaggcgcggcugcuuacuacgugggcuaccugcagccccggaccuuccugcugaaguacaacgagaacggcaccaucaccgacgccguggacugcgcccuggacccucugagcgagaccaagugcacccugaagagcuucaccguggagaagggcaucuaccagaccagcaacuuccgggugcagcccaccgagagcaucgugcgguuccccaacaucaccaaccugugccccuucggcgagguguucaacgccacccgguucgccagcguguacgccuggaaccggaagcggaucagcaacugcguggccgacuacagcgugcuguacaacagcgccagcuucagcaccuucaagugcuacggcgugagccccaccaagcugaacgaccugugcuucaccaacguguacgccgacagcuucgugauccguggcgacgaggugcggcagaucgcacccggccagacaggcaagaucgccgacuacaacuacaagcugcccgacgacuucaccggcugcgugaucgccuggaacagcaagaaccucgacagcaaggugggcggcaacuacaacuaccuguaccggcuguuccggaagagcaaccugaagcccuucgagcgggacaucagcaccgagaucuaccaagccggcuccaccccuugcaacggcguggagggcuucaacugcuacuucccucugcagagcuacggcuuccagcccaccaacggcgugggcuaccagcccuaccgggugguggugcugagcuucgagcugcugcacgccccagccaccguguguggccccaagaagagcaccaaccuggugaagaacaagugcgugaacuucaacuucaacggccuuaccggcaccggcgugcugaccgagagcaacaagaaauuccugcccuuucagcaguucggccgggacaucgccgacaccaccgacgcugugcgggauccccagacccuggagauccuggacaucaccccuugcagcuucggcggcgugagcgugaucaccccaggcaccaacaccagcaaccagguggccgugcuguaccagggcgugaacugcaccgaggugcccguggccauccacgccgaccagcugacacccaccuggcgggucuacagcaccggcagcaacguguuccagacccgggccgguugccugaucggcgccgagcacgugaacaacagcuacgagugcgacauccccaucggcgccggcaucugugccagcuaccagacccagaccaauucaccccggagggcaaggagcguggccagccagagcaucaucgccuacaccaugagccugggcgccgagaacagcguggccuacagcaacaacagcaucgccauccccaccaacuucaccaucagcgugaccaccgagauucugcccgugagcaugaccaagaccagcguggacugcaccauguacaucugcggcgacagcaccgagugcagcaaccugcugcugcaguacggcagcuucugcacccagcugaaccgggcccugaccggcaucgccguggagcaggacaagaacacccaggagguguucgcccaggugaagcagaucuacaagaccccucccaucaaggacuucggcggcuucaacuucagccagauccugcccgaccccagcaagcccagcaagcggagcuucaucgaggaccugcuguucaacaaggugacccuagccgacgccggcuucaucaagcaguacggcgacugccucggcgacauagccgcccgggaccugaucugcgcccagaaguucaacggccugaccgugcugccuccccugcugaccgacgagaugaucgcccaguacaccagcgcccuguuagccggaaccaucaccagcggcuggacuuucggcgcuggagccgcucugcagauccccuucgccaugcagauggccuaccgguucaacggcaucggcgugacccagaacgugcuguacgagaaccagaagcugaucgccaaccaguucaacagcgccaucggcaagauccaggacagccugagcagcaccgcuagcgcccugggcaagcugcaggacguggugaaccagaacgcccaggcccugaacacccuggugaagcagcugagcagcaacuucggcgccaucagcagcgugcugaacgacauccugagccggcuggacaaggucgaggccgaggugcagaucgaccggcugaucacuggccggcugcagagccugcagaccuacgugacccagcagcugauccgggccgccgagauucgggccagcgccaaccuggccgccaccaagaugagcgagugcgugcugggccagagcaagcggguggacuucugcggcaagggcuaccaccugaugagcuuuccccagagcgcaccccacggagugguguuccugcacgugaccuacgugcccgcccaggagaagaacuucaccaccgccccagccaucugccacgacggcaaggcccacuuuccccgggagggcguguucgugagcaacggcacccacugguucgugacccagcggaacuucuacgagccccagaucaucaccaccgacaacaccuucgugagcggcaacugcgacguggugaucggcaucgugaacaacaccguguacgauccccugcagcccgagcuggacagcuucaaggaggagcuggacaaguacuucaagaaucacaccagccccgacguggaccugggcgacaucagcggcaucaacgccagcguggugaacauccagaaggagaucgaucggcugaacgagguggccaagaaccugaacgagagccugaucgaccugcaggagcugggcaaguacgagcaguacaucaaguggcccugguacaucuggcugggcuucaucgccggccugaucgccaucgugauggugaccaucaugcugugcugcaugaccagcugcugcagcugccugaagggcuguugcagcugcggcagcugcugcaaguucgacgaggacgacagcgagcccgugcugaagggcgugaagcugcacuacaccugauaauaggcuggagccucgguggccuagcuucuugccccuugggccuccccccagccccuccuccccuuccugcacccguacccccguggucuuugaauaaagucugagugggcggcaaaaaaaaaaaaaaaaaaaaaaaaaaaaaaaaaaaaaaaaaaaaaaaaaaaaaaaaaaaaaaaaaaaaaaaaaaaaaaaaaaaaaaaaaaaaaaaaaaaaucuag

SEQ ID NO: 26529 - RNA, 4100 nt, Artificial Sequence
  SARS-CoV-2/Wuhan/WIV05/2019__EPI_ISL_402128 spike protein mRNA gc (1-1273)(S477N_D614G)
gggaaauaagagagaaaagaagaguaagaagaaauauaagaccccggcgccgccaccauguucguguuccuggugcugcugccccuggugagcagccagugcgugaaccugaccacccggacccagcugccaccagccuacaccaacagcuucacccggggcgucuacuaccccgacaagguguuccggagcagcguccugcacagcacccaggaccuguuccugcccuucuucagcaacgugaccugguuccacgccauccacgugagcggcaccaacggcaccaagcgguucgacaaccccgugcugcccuucaacgacggcguguacuucgccagcaccgagaagagcaacaucauccggggcuggaucuucggcaccacccuggacagcaagacccagagccugcugaucgugaauaacgccaccaacguggugaucaaggugugcgaguuccaguucugcaacgaccccuuccugggcguguacuaccacaagaacaacaagagcuggauggagagcgaguuccggguguacagcagcgccaacaacugcaccuucgaguacgugagccagcccuuccugauggaccuggagggcaagcagggcaacuucaagaaccugcgggaguucguguucaagaacaucgacggcuacuucaagaucuacagcaagcacaccccaaucaaccuggugcgggaucugccccagggcuucucagcccuggagccccugguggaccugcccaucggcaucaacaucacccgguuccagacccugcuggcccugcaccggagcuaccugaccccaggcgacagcagcagcggguggacagcaggcgcggcugcuuacuacgugggcuaccugcagccccggaccuuccugcugaaguacaacgagaacggcaccaucaccgacgccguggacugcgcccuggacccucugagcgagaccaagugcacccugaagagcuucaccguggagaagggcaucuaccagaccagcaacuuccgggugcagcccaccgagagcaucgugcgguuccccaacaucaccaaccugugccccuucggcgagguguucaacgccacccgguucgccagcguguacgccuggaaccggaagcggaucagcaacugcguggccgacuacagcgugcuguacaacagcgccagcuucagcaccuucaagugcuacggcgugagccccaccaagcugaacgaccugugcuucaccaacguguacgccgacagcuucgugauccguggcgacgaggugcggcagaucgcacccggccagacaggcaagaucgccgacuacaacuacaagcugcccgacgacuucaccggcugcgugaucgccuggaacagcaacaaccucgacagcaaggugggcggcaacuacaacuaccuguaccggcuguuccggaagagcaaccugaagcccuucgagcgggacaucagcaccgagaucuaccaagccggcaacaccccuugcaacggcguggagggcuucaacugcuacuucccucugcagagcuacggcuuccagcccaccaacggcgugggcuaccagcccuaccgggugguggugcugagcuucgagcugcugcacgccccagccaccguguguggccccaagaagagcaccaaccuggugaagaacaagugcgugaacuucaacuucaacggccuuaccggcaccggcgugcugaccgagagcaacaagaaauuccugcccuuucagcaguucggccgggacaucgccgacaccaccgacgcugugcgggauccccagacccuggagauccuggacaucaccccuugcagcuucggcggcgugagcgugaucaccccaggcaccaacaccagcaaccagguggccgugcuguaccagggcgugaacugcaccgaggugcccguggccauccacgccgaccagcugacacccaccuggcgggucuacagcaccggcagcaacguguuccagacccgggccgguugccugaucggcgccgagcacgugaacaacagcuacgagugcgacauccccaucggcgccggcaucugugccagcuaccagacccagaccaauucaccccggagggcaaggagcguggccagccagagcaucaucgccuacaccaugagccugggcgccgagaacagcguggccuacagcaacaacagcaucgccauccccaccaacuucaccaucagcgugaccaccgagauucugcccgugagcaugaccaagaccagcguggacugcaccauguacaucugcggcgacagcaccgagugcagcaaccugcugcugcaguacggcagcuucugcacccagcugaaccgggcccugaccggcaucgccguggagcaggacaagaacacccaggagguguucgcccaggugaagcagaucuacaagaccccucccaucaaggacuucggcggcuucaacuucagccagauccugcccgaccccagcaagcccagcaagcggagcuucaucgaggaccugcuguucaacaaggugacccuagccgacgccggcuucaucaagcaguacggcgacugccucggcgacauagccgcccgggaccugaucugcgcccagaaguucaacggccugaccgugcugccuccccugcugaccgacgagaugaucgcccaguacaccagcgcccuguuagccggaaccaucaccagcggcuggacuuucggcgcuggagccgcucugcagauccccuucgccaugcagauggccuaccgguucaacggcaucggcgugacccagaacgugcuguacgagaaccagaagcugaucgccaaccaguucaacagcgccaucggcaagauccaggacagccugagcagcaccgcuagcgcccugggcaagcugcaggacguggugaaccagaacgcccaggcccugaacacccuggugaagcagcugagcagcaacuucggcgccaucagcagcgugcugaacgacauccugagccggcuggacaaggucgaggccgaggugcagaucgaccggcugaucacuggccggcugcagagccugcagaccuacgugacccagcagcugauccgggccgccgagauucgggccagcgccaaccuggccgccaccaagaugagcgagugcgugcugggccagagcaagcggguggacuucugcggcaagggcuaccaccugaugagcuuuccccagagcgcaccccacggagugguguuccugcacgugaccuacgugcccgcccaggagaagaacuucaccaccgccccagccaucugccacgacggcaaggcccacuuuccccgggagggcguguucgugagcaacggcacccacugguucgugacccagcggaacuucuacgagccccagaucaucaccaccgacaacaccuucgugagcggcaacugcgacguggugaucggcaucgugaacaacaccguguacgauccccugcagcccgagcuggacagcuucaaggaggagcuggacaaguacuucaagaaucacaccagccccgacguggaccugggcgacaucagcggcaucaacgccagcguggugaacauccagaaggagaucgaucggcugaacgagguggccaagaaccugaacgagagccugaucgaccugcaggagcugggcaaguacgagcaguacaucaaguggcccugguacaucuggcugggcuucaucgccggccugaucgccaucgugauggugaccaucaugcugugcugcaugaccagcugcugcagcugccugaagggcuguugcagcugcggcagcugcugcaaguucgacgaggacgacagcgagcccgugcugaagggcgugaagcugcacuacaccugauaauaggcuggagccucgguggccuagcuucuugccccuugggccuccccccagccccuccuccccuuccugcacccguacccccguggucuuugaauaaagucugagugggcggcaaaaaaaaaaaaaaaaaaaaaaaaaaaaaaaaaaaaaaaaaaaaaaaaaaaaaaaaaaaaaaaaaaaaaaaaaaaaaaaaaaaaaaaaaaaaaaaaaaaaucuag

SEQ ID NO: 26530 - RNA, 4100 nt, Artificial Sequence
  SARS-CoV-2/Wuhan/WIV05/2019__EPI_ISL_402128 spike protein mRNA gc (1-1273)(N501Y_D614G)
gggaaauaagagagaaaagaagaguaagaagaaauauaagaccccggcgccgccaccauguucguguuccuggugcugcugccccuggugagcagccagugcgugaaccugaccacccggacccagcugccaccagccuacaccaacagcuucacccggggcgucuacuaccccgacaagguguuccggagcagcguccugcacagcacccaggaccuguuccugcccuucuucagcaacgugaccugguuccacgccauccacgugagcggcaccaacggcaccaagcgguucgacaaccccgugcugcccuucaacgacggcguguacuucgccagcaccgagaagagcaacaucauccggggcuggaucuucggcaccacccuggacagcaagacccagagccugcugaucgugaauaacgccaccaacguggugaucaaggugugcgaguuccaguucugcaacgaccccuuccugggcguguacuaccacaagaacaacaagagcuggauggagagcgaguuccggguguacagcagcgccaacaacugcaccuucgaguacgugagccagcccuuccugauggaccuggagggcaagcagggcaacuucaagaaccugcgggaguucguguucaagaacaucgacggcuacuucaagaucuacagcaagcacaccccaaucaaccuggugcgggaucugccccagggcuucucagcccuggagccccugguggaccugcccaucggcaucaacaucacccgguuccagacccugcuggcccugcaccggagcuaccugaccccaggcgacagcagcagcggguggacagcaggcgcggcugcuuacuacgugggcuaccugcagccccggaccuuccugcugaaguacaacgagaacggcaccaucaccgacgccguggacugcgcccuggacccucugagcgagaccaagugcacccugaagagcuucaccguggagaagggcaucuaccagaccagcaacuuccgggugcagcccaccgagagcaucgugcgguuccccaacaucaccaaccugugccccuucggcgagguguucaacgccacccgguucgccagcguguacgccuggaaccggaagcggaucagcaacugcguggccgacuacagcgugcuguacaacagcgccagcuucagcaccuucaagugcuacggcgugagccccaccaagcugaacgaccugugcuucaccaacguguacgccgacagcuucgugauccguggcgacgaggugcggcagaucgcacccggccagacaggcaagaucgccgacuacaacuacaagcugcccgacgacuucaccggcugcgugaucgccuggaacagcaacaaccucgacagcaaggugggcggcaacuacaacuaccuguaccggcuguuccggaagagcaaccugaagcccuucgagcgggacaucagcaccgagaucuaccaagccggcuccaccccuugcaacggcguggagggcuucaacugcuacuucccucugcagagcuacggcuuccagcccaccuacggcgugggcuaccagcccuaccgggugguggugcugagcuucgagcugcugcacgccccagccaccguguguggccccaagaagagcaccaaccuggugaagaacaagugcgugaacuucaacuucaacggccuuaccggcaccggcgugcugaccgagagcaacaagaaauuccugcccuuucagcaguucggccgggacaucgccgacaccaccgacgcugugcgggauccccagacccuggagauccuggacaucaccccuugcagcuucggcggcgugagcgugaucaccccaggcaccaacaccagcaaccagguggccgugcuguaccagggcgugaacugcaccgaggugcccguggccauccacgccgaccagcugacacccaccuggcgggucuacagcaccggcagcaacguguuccagacccgggccgguugccugaucggcgccgagcacgugaacaacagcuacgagugcgacauccccaucggcgccggcaucugugccagcuaccagacccagaccaauucaccccggagggcaaggagcguggccagccagagcaucaucgccuacaccaugagccugggcgccgagaacagcguggccuacagcaacaacagcaucgccauccccaccaacuucaccaucagcgugaccaccgagauucugcccgugagcaugaccaagaccagcguggacugcaccauguacaucugcggcgacagcaccgagugcagcaaccugcugcugcaguacggcagcuucugcacccagcugaaccgggcccugaccggcaucgccguggagcaggacaagaacacccaggagguguucgcccaggugaagcagaucuacaagaccccucccaucaaggacuucggcggcuucaacuucagccagauccugcccgaccccagcaagcccagcaagcggagcuucaucgaggaccugcuguucaacaaggugacccuagccgacgccggcuucaucaagcaguacggcgacugccucggcgacauagccgcccgggaccugaucugcgcccagaaguucaacggccugaccgugcugccuccccugcugaccgacgagaugaucgcccaguacaccagcgcccuguuagccggaaccaucaccagcggcuggacuuucggcgcuggagccgcucugcagauccccuucgccaugcagauggccuaccgguucaacggcaucggcgugacccagaacgugcuguacgagaaccagaagcugaucgccaaccaguucaacagcgccaucggcaagauccaggacagccugagcagcaccgcuagcgcccugggcaagcugcaggacguggugaaccagaacgcccaggcccugaacacccuggugaagcagcugagcagcaacuucggcgccaucagcagcgugcugaacgacauccugagccggcuggacaaggucgaggccgaggugcagaucgaccggcugaucacuggccggcugcagagccugcagaccuacgugacccagcagcugauccgggccgccgagauucgggccagcgccaaccuggccgccaccaagaugagcgagugcgugcugggccagagcaagcggguggacuucugcggcaagggcuaccaccugaugagcuuuccccagagcgcaccccacggagugguguuccugcacgugaccuacgugcccgcccaggagaagaacuucaccaccgccccagccaucugccacgacggcaaggcccacuuuccccgggagggcguguucgugagcaacggcacccacugguucgugacccagcggaacuucuacgagccccagaucaucaccaccgacaacaccuucgugagcggcaacugcgacguggugaucggcaucgugaacaacaccguguacgauccccugcagcccgagcuggacagcuucaaggaggagcuggacaaguacuucaagaaucacaccagccccgacguggaccugggcgacaucagcggcaucaacgccagcguggugaacauccagaaggagaucgaucggcugaacgagguggccaagaaccugaacgagagccugaucgaccugcaggagcugggcaaguacgagcaguacaucaaguggcccugguacaucuggcugggcuucaucgccggccugaucgccaucgugauggugaccaucaugcugugcugcaugaccagcugcugcagcugccugaagggcuguugcagcugcggcagcugcugcaaguucgacgaggacgacagcgagcccgugcugaagggcgugaagcugcacuacaccugauaauaggcuggagccucgguggccuagcuucuugccccuugggccuccccccagccccuccuccccuuccugcacccguacccccguggucuuugaauaaagucugagugggcggcaaaaaaaaaaaaaaaaaaaaaaaaaaaaaaaaaaaaaaaaaaaaaaaaaaaaaaaaaaaaaaaaaaaaaaaaaaaaaaaaaaaaaaaaaaaaaaaaaaaaucuag

SEQ ID NO: 26531 - RNA, 4094 nt, Artificial Sequence
  SARS-CoV-2/Wuhan/WIV05/2019__EPI_ISL_402128 spike protein mRNA gc (1-1273)(H69del_V70del_D614G)
gggaaauaagagagaaaagaagaguaagaagaaauauaagaccccggcgccgccaccauguucguguuccuggugcugcugccccuggugagcagccagugcgugaaccugaccacccggacccagcugccaccagccuacaccaacagcuucacccggggcgucuacuaccccgacaagguguuccggagcagcguccugcacagcacccaggaccuguuccugcccuucuucagcaacgugaccugguuccacgccaucagcggcaccaacggcaccaagcgguucgacaaccccgugcugcccuucaacgacggcguguacuucgccagcaccgagaagagcaacaucauccggggcuggaucuucggcaccacccuggacagcaagacccagagccugcugaucgugaauaacgccaccaacguggugaucaaggugugcgaguuccaguucugcaacgaccccuuccugggcguguacuaccacaagaacaacaagagcuggauggagagcgaguuccggguguacagcagcgccaacaacugcaccuucgaguacgugagccagcccuuccugauggaccuggagggcaagcagggcaacuucaagaaccugcgggaguucguguucaagaacaucgacggcuacuucaagaucuacagcaagcacaccccaaucaaccuggugcgggaucugccccagggcuucucagcccuggagccccugguggaccugcccaucggcaucaacaucacccgguuccagacccugcuggcccugcaccggagcuaccugaccccaggcgacagcagcagcggguggacagcaggcgcggcugcuuacuacgugggcuaccugcagccccggaccuuccugcugaaguacaacgagaacggcaccaucaccgacgccguggacugcgcccuggacccucugagcgagaccaagugcacccugaagagcuucaccguggagaagggcaucuaccagaccagcaacuuccgggugcagcccaccgagagcaucgugcgguuccccaacaucaccaaccugugccccuucggcgagguguucaacgccacccgguucgccagcguguacgccuggaaccggaagcggaucagcaacugcguggccgacuacagcgugcuguacaacagcgccagcuucagcaccuucaagugcuacggcgugagccccaccaagcugaacgaccugugcuucaccaacguguacgccgacagcuucgugauccguggcgacgaggugcggcagaucgcacccggccagacaggcaagaucgccgacuacaacuacaagcugcccgacgacuucaccggcugcgugaucgccuggaacagcaacaaccucgacagcaaggugggcggcaacuacaacuaccuguaccggcuguuccggaagagcaaccugaagcccuucgagcgggacaucagcaccgagaucuaccaagccggcuccaccccuugcaacggcguggagggcuucaacugcuacuucccucugcagagcuacggcuuccagcccaccaacggcgugggcuaccagcccuaccgggugguggugcugagcuucgagcugcugcacgccccagccaccguguguggccccaagaagagcaccaaccuggugaagaacaagugcgugaacuucaacuucaacggccuuaccggcaccggcgugcugaccgagagcaacaagaaauuccugcccuuucagcaguucggccgggacaucgccgacaccaccgacgcugugcgggauccccagacccuggagauccuggacaucaccccuugcagcuucggcggcgugagcgugaucaccccaggcaccaacaccagcaaccagguggccgugcuguaccagggcgugaacugcaccgaggugcccguggccauccacgccgaccagcugacacccaccuggcgggucuacagcaccggcagcaacguguuccagacccgggccgguugccugaucggcgccgagcacgugaacaacagcuacgagugcgacauccccaucggcgccggcaucugugccagcuaccagacccagaccaauucaccccggagggcaaggagcguggccagccagagcaucaucgccuacaccaugagccugggcgccgagaacagcguggccuacagcaacaacagcaucgccauccccaccaacuucaccaucagcgugaccaccgagauucugcccgugagcaugaccaagaccagcguggacugcaccauguacaucugcggcgacagcaccgagugcagcaaccugcugcugcaguacggcagcuucugcacccagcugaaccgggcccugaccggcaucgccguggagcaggacaagaacacccaggagguguucgcccaggugaagcagaucuacaagaccccucccaucaaggacuucggcggcuucaacuucagccagauccugcccgaccccagcaagcccagcaagcggagcuucaucgaggaccugcuguucaacaaggugacccuagccgacgccggcuucaucaagcaguacggcgacugccucggcgacauagccgcccgggaccugaucugcgcccagaaguucaacggccugaccgugcugccuccccugcugaccgacgagaugaucgcccaguacaccagcgcccuguuagccggaaccaucaccagcggcuggacuuucggcgcuggagccgcucugcagauccccuucgccaugcagauggccuaccgguucaacggcaucggcgugacccagaacgugcuguacgagaaccagaagcugaucgccaaccaguucaacagcgccaucggcaagauccaggacagccugagcagcaccgcuagcgcccugggcaagcugcaggacguggugaaccagaacgcccaggcccugaacacccuggugaagcagcugagcagcaacuucggcgccaucagcagcgugcugaacgacauccugagccggcuggacaaggucgaggccgaggugcagaucgaccggcugaucacuggccggcugcagagccugcagaccuacgugacccagcagcugauccgggccgccgagauucgggccagcgccaaccuggccgccaccaagaugagcgagugcgugcugggccagagcaagcggguggacuucugcggcaagggcuaccaccugaugagcuuuccccagagcgcaccccacggagugguguuccugcacgugaccuacgugcccgcccaggagaagaacuucaccaccgccccagccaucugccacgacggcaaggcccacuuuccccgggagggcguguucgugagcaacggcacccacugguucgugacccagcggaacuucuacgagccccagaucaucaccaccgacaacaccuucgugagcggcaacugcgacguggugaucggcaucgugaacaacaccguguacgauccccugcagcccgagcuggacagcuucaaggaggagcuggacaaguacuucaagaaucacaccagccccgacguggaccugggcgacaucagcggcaucaacgccagcguggugaacauccagaaggagaucgaucggcugaacgagguggccaagaaccugaacgagagccugaucgaccugcaggagcugggcaaguacgagcaguacaucaaguggcccugguacaucuggcugggcuucaucgccggccugaucgccaucgugauggugaccaucaugcugugcugcaugaccagcugcugcagcugccugaagggcuguugcagcugcggcagcugcugcaaguucgacgaggacgacagcgagcccgugcugaagggcgugaagcugcacuacaccugauaauaggcuggagccucgguggccuagcuucuugccccuugggccuccccccagccccuccuccccuuccugcacccguacccccguggucuuugaauaaagucugagugggcggcaaaaaaaaaaaaaaaaaaaaaaaaaaaaaaaaaaaaaaaaaaaaaaaaaaaaaaaaaaaaaaaaaaaaaaaaaaaaaaaaaaaaaaaaaaaaaaaaaaaaucuag

SEQ ID NO: 26532 - RNA, 4100 nt, Artificial Sequence
  SARS-CoV-2/Wuhan/WIV05/2019__EPI_ISL_402128 spike protein mRNA gc (1-1273)(Y453F_D614G)
gggaaauaagagagaaaagaagaguaagaagaaauauaagaccccggcgccgccaccauguucguguuccuggugcugcugccccuggugagcagccagugcgugaaccugaccacccggacccagcugccaccagccuacaccaacagcuucacccggggcgucuacuaccccgacaagguguuccggagcagcguccugcacagcacccaggaccuguuccugcccuucuucagcaacgugaccugguuccacgccauccacgugagcggcaccaacggcaccaagcgguucgacaaccccgugcugcccuucaacgacggcguguacuucgccagcaccgagaagagcaacaucauccggggcuggaucuucggcaccacccuggacagcaagacccagagccugcugaucgugaauaacgccaccaacguggugaucaaggugugcgaguuccaguucugcaacgaccccuuccugggcguguacuaccacaagaacaacaagagcuggauggagagcgaguuccggguguacagcagcgccaacaacugcaccuucgaguacgugagccagcccuuccugauggaccuggagggcaagcagggcaacuucaagaaccugcgggaguucguguucaagaacaucgacggcuacuucaagaucuacagcaagcacaccccaaucaaccuggugcgggaucugccccagggcuucucagcccuggagccccugguggaccugcccaucggcaucaacaucacccgguuccagacccugcuggcccugcaccggagcuaccugaccccaggcgacagcagcagcggguggacagcaggcgcggcugcuuacuacgugggcuaccugcagccccggaccuuccugcugaaguacaacgagaacggcaccaucaccgacgccguggacugcgcccuggacccucugagcgagaccaagugcacccugaagagcuucaccguggagaagggcaucuaccagaccagcaacuuccgggugcagcccaccgagagcaucgugcgguuccccaacaucaccaaccugugccccuucggcgagguguucaacgccacccgguucgccagcguguacgccuggaaccggaagcggaucagcaacugcguggccgacuacagcgugcuguacaacagcgccagcuucagcaccuucaagugcuacggcgugagccccaccaagcugaacgaccugugcuucaccaacguguacgccgacagcuucgugauccguggcgacgaggugcggcagaucgcacccggccagacaggcaagaucgccgacuacaacuacaagcugcccgacgacuucaccggcugcgugaucgccuggaacagcaacaaccucgacagcaaggugggcggcaacuacaacuaccuguuccggcuguuccggaagagcaaccugaagcccuucgagcgggacaucagcaccgagaucuaccaagccggcuccaccccuugcaacggcguggagggcuucaacugcuacuucccucugcagagcuacggcuuccagcccaccaacggcgugggcuaccagcccuaccgggugguggugcugagcuucgagcugcugcacgccccagccaccguguguggccccaagaagagcaccaaccuggugaagaacaagugcgugaacuucaacuucaacggccuuaccggcaccggcgugcugaccgagagcaacaagaaauuccugcccuuucagcaguucggccgggacaucgccgacaccaccgacgcugugcgggauccccagacccuggagauccuggacaucaccccuugcagcuucggcggcgugagcgugaucaccccaggcaccaacaccagcaaccagguggccgugcuguaccagggcgugaacugcaccgaggugcccguggccauccacgccgaccagcugacacccaccuggcgggucuacagcaccggcagcaacguguuccagacccgggccgguugccugaucggcgccgagcacgugaacaacagcuacgagugcgacauccccaucggcgccggcaucugugccagcuaccagacccagaccaauucaccccggagggcaaggagcguggccagccagagcaucaucgccuacaccaugagccugggcgccgagaacagcguggccuacagcaacaacagcaucgccauccccaccaacuucaccaucagcgugaccaccgagauucugcccgugagcaugaccaagaccagcguggacugcaccauguacaucugcggcgacagcaccgagugcagcaaccugcugcugcaguacggcagcuucugcacccagcugaaccgggcccugaccggcaucgccguggagcaggacaagaacacccaggagguguucgcccaggugaagcagaucuacaagaccccucccaucaaggacuucggcggcuucaacuucagccagauccugcccgaccccagcaagcccagcaagcggagcuucaucgaggaccugcuguucaacaaggugacccuagccgacgccggcuucaucaagcaguacggcgacugccucggcgacauagccgcccgggaccugaucugcgcccagaaguucaacggccugaccgugcugccuccccugcugaccgacgagaugaucgcccaguacaccagcgcccuguuagccggaaccaucaccagcggcuggacuuucggcgcuggagccgcucugcagauccccuucgccaugcagauggccuaccgguucaacggcaucggcgugacccagaacgugcuguacgagaaccagaagcugaucgccaaccaguucaacagcgccaucggcaagauccaggacagccugagcagcaccgcuagcgcccugggcaagcugcaggacguggugaaccagaacgcccaggcccugaacacccuggugaagcagcugagcagcaacuucggcgccaucagcagcgugcugaacgacauccugagccggcuggacaaggucgaggccgaggugcagaucgaccggcugaucacuggccggcugcagagccugcagaccuacgugacccagcagcugauccgggccgccgagauucgggccagcgccaaccuggccgccaccaagaugagcgagugcgugcugggccagagcaagcggguggacuucugcggcaagggcuaccaccugaugagcuuuccccagagcgcaccccacggagugguguuccugcacgugaccuacgugcccgcccaggagaagaacuucaccaccgccccagccaucugccacgacggcaaggcccacuuuccccgggagggcguguucgugagcaacggcacccacugguucgugacccagcggaacuucuacgagccccagaucaucaccaccgacaacaccuucgugagcggcaacugcgacguggugaucggcaucgugaacaacaccguguacgauccccugcagcccgagcuggacagcuucaaggaggagcuggacaaguacuucaagaaucacaccagccccgacguggaccugggcgacaucagcggcaucaacgccagcguggugaacauccagaaggagaucgaucggcugaacgagguggccaagaaccugaacgagagccugaucgaccugcaggagcugggcaaguacgagcaguacaucaaguggcccugguacaucuggcugggcuucaucgccggccugaucgccaucgugauggugaccaucaugcugugcugcaugaccagcugcugcagcugccugaagggcuguugcagcugcggcagcugcugcaaguucgacgaggacgacagcgagcccgugcugaagggcgugaagcugcacuacaccugauaauaggcuggagccucgguggccuagcuucuugccccuugggccuccccccagccccuccuccccuuccugcacccguacccccguggucuuugaauaaagucugagugggcggcaaaaaaaaaaaaaaaaaaaaaaaaaaaaaaaaaaaaaaaaaaaaaaaaaaaaaaaaaaaaaaaaaaaaaaaaaaaaaaaaaaaaaaaaaaaaaaaaaaaaucuag

SEQ ID NO: 26533 - RNA, 4100 nt, Artificial Sequence
  SARS-CoV-2/Wuhan/WIV05/2019__EPI_ISL_402128 spike protein mRNA gc (1-1273)(D614G_I692V)
gggaaauaagagagaaaagaagaguaagaagaaauauaagaccccggcgccgccaccauguucguguuccuggugcugcugccccuggugagcagccagugcgugaaccugaccacccggacccagcugccaccagccuacaccaacagcuucacccggggcgucuacuaccccgacaagguguuccggagcagcguccugcacagcacccaggaccuguuccugcccuucuucagcaacgugaccugguuccacgccauccacgugagcggcaccaacggcaccaagcgguucgacaaccccgugcugcccuucaacgacggcguguacuucgccagcaccgagaagagcaacaucauccggggcuggaucuucggcaccacccuggacagcaagacccagagccugcugaucgugaauaacgccaccaacguggugaucaaggugugcgaguuccaguucugcaacgaccccuuccugggcguguacuaccacaagaacaacaagagcuggauggagagcgaguuccggguguacagcagcgccaacaacugcaccuucgaguacgugagccagcccuuccugauggaccuggagggcaagcagggcaacuucaagaaccugcgggaguucguguucaagaacaucgacggcuacuucaagaucuacagcaagcacaccccaaucaaccuggugcgggaucugccccagggcuucucagcccuggagccccugguggaccugcccaucggcaucaacaucacccgguuccagacccugcuggcccugcaccggagcuaccugaccccaggcgacagcagcagcggguggacagcaggcgcggcugcuuacuacgugggcuaccugcagccccggaccuuccugcugaaguacaacgagaacggcaccaucaccgacgccguggacugcgcccuggacccucugagcgagaccaagugcacccugaagagcuucaccguggagaagggcaucuaccagaccagcaacuuccgggugcagcccaccgagagcaucgugcgguuccccaacaucaccaaccugugccccuucggcgagguguucaacgccacccgguucgccagcguguacgccuggaaccggaagcggaucagcaacugcguggccgacuacagcgugcuguacaacagcgccagcuucagcaccuucaagugcuacggcgugagccccaccaagcugaacgaccugugcuucaccaacguguacgccgacagcuucgugauccguggcgacgaggugcggcagaucgcacccggccagacaggcaagaucgccgacuacaacuacaagcugcccgacgacuucaccggcugcgugaucgccuggaacagcaacaaccucgacagcaaggugggcggcaacuacaacuaccuguaccggcuguuccggaagagcaaccugaagcccuucgagcgggacaucagcaccgagaucuaccaagccggcuccaccccuugcaacggcguggagggcuucaacugcuacuucccucugcagagcuacggcuuccagcccaccaacggcgugggcuaccagcccuaccgggugguggugcugagcuucgagcugcugcacgccccagccaccguguguggccccaagaagagcaccaaccuggugaagaacaagugcgugaacuucaacuucaacggccuuaccggcaccggcgugcugaccgagagcaacaagaaauuccugcccuuucagcaguucggccgggacaucgccgacaccaccgacgcugugcgggauccccagacccuggagauccuggacaucaccccuugcagcuucggcggcgugagcgugaucaccccaggcaccaacaccagcaaccagguggccgugcuguaccagggcgugaacugcaccgaggugcccguggccauccacgccgaccagcugacacccaccuggcgggucuacagcaccggcagcaacguguuccagacccgggccgguugccugaucggcgccgagcacgugaacaacagcuacgagugcgacauccccaucggcgccggcaucugugccagcuaccagacccagaccaauucaccccggagggcaaggagcguggccagccagagcgugaucgccuacaccaugagccugggcgccgagaacagcguggccuacagcaacaacagcaucgccauccccaccaacuucaccaucagcgugaccaccgagauucugcccgugagcaugaccaagaccagcguggacugcaccauguacaucugcggcgacagcaccgagugcagcaaccugcugcugcaguacggcagcuucugcacccagcugaaccgggcccugaccggcaucgccguggagcaggacaagaacacccaggagguguucgcccaggugaagcagaucuacaagaccccucccaucaaggacuucggcggcuucaacuucagccagauccugcccgaccccagcaagcccagcaagcggagcuucaucgaggaccugcuguucaacaaggugacccuagccgacgccggcuucaucaagcaguacggcgacugccucggcgacauagccgcccgggaccugaucugcgcccagaaguucaacggccugaccgugcugccuccccugcugaccgacgagaugaucgcccaguacaccagcgcccuguuagccggaaccaucaccagcggcuggacuuucggcgcuggagccgcucugcagauccccuucgccaugcagauggccuaccgguucaacggcaucggcgugacccagaacgugcuguacgagaaccagaagcugaucgccaaccaguucaacagcgccaucggcaagauccaggacagccugagcagcaccgcuagcgcccugggcaagcugcaggacguggugaaccagaacgcccaggcccugaacacccuggugaagcagcugagcagcaacuucggcgccaucagcagcgugcugaacgacauccugagccggcuggacaaggucgaggccgaggugcagaucgaccggcugaucacuggccggcugcagagccugcagaccuacgugacccagcagcugauccgggccgccgagauucgggccagcgccaaccuggccgccaccaagaugagcgagugcgugcugggccagagcaagcggguggacuucugcggcaagggcuaccaccugaugagcuuuccccagagcgcaccccacggagugguguuccugcacgugaccuacgugcccgcccaggagaagaacuucaccaccgccccagccaucugccacgacggcaaggcccacuuuccccgggagggcguguucgugagcaacggcacccacugguucgugacccagcggaacuucuacgagccccagaucaucaccaccgacaacaccuucgugagcggcaacugcgacguggugaucggcaucgugaacaacaccguguacgauccccugcagcccgagcuggacagcuucaaggaggagcuggacaaguacuucaagaaucacaccagccccgacguggaccugggcgacaucagcggcaucaacgccagcguggugaacauccagaaggagaucgaucggcugaacgagguggccaagaaccugaacgagagccugaucgaccugcaggagcugggcaaguacgagcaguacaucaaguggcccugguacaucuggcugggcuucaucgccggccugaucgccaucgugauggugaccaucaugcugugcugcaugaccagcugcugcagcugccugaagggcuguugcagcugcggcagcugcugcaaguucgacgaggacgacagcgagcccgugcugaagggcgugaagcugcacuacaccugauaauaggcuggagccucgguggccuagcuucuugccccuugggccuccccccagccccuccuccccuuccugcacccguacccccguggucuuugaauaaagucugagugggcggcaaaaaaaaaaaaaaaaaaaaaaaaaaaaaaaaaaaaaaaaaaaaaaaaaaaaaaaaaaaaaaaaaaaaaaaaaaaaaaaaaaaaaaaaaaaaaaaaaaaaucuag

SEQ ID NO: 26534 - RNA, 4100 nt, Artificial Sequence
  SARS-CoV-2/Wuhan/WIV05/2019__EPI_ISL_402128 spike protein mRNA gc (1-1273)(D614G_M1229I)
gggaaauaagagagaaaagaagaguaagaagaaauauaagaccccggcgccgccaccauguucguguuccuggugcugcugccccuggugagcagccagugcgugaaccugaccacccggacccagcugccaccagccuacaccaacagcuucacccggggcgucuacuaccccgacaagguguuccggagcagcguccugcacagcacccaggaccuguuccugcccuucuucagcaacgugaccugguuccacgccauccacgugagcggcaccaacggcaccaagcgguucgacaaccccgugcugcccuucaacgacggcguguacuucgccagcaccgagaagagcaacaucauccggggcuggaucuucggcaccacccuggacagcaagacccagagccugcugaucgugaauaacgccaccaacguggugaucaaggugugcgaguuccaguucugcaacgaccccuuccugggcguguacuaccacaagaacaacaagagcuggauggagagcgaguuccggguguacagcagcgccaacaacugcaccuucgaguacgugagccagcccuuccugauggaccuggagggcaagcagggcaacuucaagaaccugcgggaguucguguucaagaacaucgacggcuacuucaagaucuacagcaagcacaccccaaucaaccuggugcgggaucugccccagggcuucucagcccuggagccccugguggaccugcccaucggcaucaacaucacccgguuccagacccugcuggcccugcaccggagcuaccugaccccaggcgacagcagcagcggguggacagcaggcgcggcugcuuacuacgugggcuaccugcagccccggaccuuccugcugaaguacaacgagaacggcaccaucaccgacgccguggacugcgcccuggacccucugagcgagaccaagugcacccugaagagcuucaccguggagaagggcaucuaccagaccagcaacuuccgggugcagcccaccgagagcaucgugcgguuccccaacaucaccaaccugugccccuucggcgagguguucaacgccacccgguucgccagcguguacgccuggaaccggaagcggaucagcaacugcguggccgacuacagcgugcuguacaacagcgccagcuucagcaccuucaagugcuacggcgugagccccaccaagcugaacgaccugugcuucaccaacguguacgccgacagcuucgugauccguggcgacgaggugcggcagaucgcacccggccagacaggcaagaucgccgacuacaacuacaagcugcccgacgacuucaccggcugcgugaucgccuggaacagcaacaaccucgacagcaaggugggcggcaacuacaacuaccuguaccggcuguuccggaagagcaaccugaagcccuucgagcgggacaucagcaccgagaucuaccaagccggcuccaccccuugcaacggcguggagggcuucaacugcuacuucccucugcagagcuacggcuuccagcccaccaacggcgugggcuaccagcccuaccgggugguggugcugagcuucgagcugcugcacgccccagccaccguguguggccccaagaagagcaccaaccuggugaagaacaagugcgugaacuucaacuucaacggccuuaccggcaccggcgugcugaccgagagcaacaagaaauuccugcccuuucagcaguucggccgggacaucgccgacaccaccgacgcugugcgggauccccagacccuggagauccuggacaucaccccuugcagcuucggcggcgugagcgugaucaccccaggcaccaacaccagcaaccagguggccgugcuguaccagggcgugaacugcaccgaggugcccguggccauccacgccgaccagcugacacccaccuggcgggucuacagcaccggcagcaacguguuccagacccgggccgguugccugaucggcgccgagcacgugaacaacagcuacgagugcgacauccccaucggcgccggcaucugugccagcuaccagacccagaccaauucaccccggagggcaaggagcguggccagccagagcaucaucgccuacaccaugagccugggcgccgagaacagcguggccuacagcaacaacagcaucgccauccccaccaacuucaccaucagcgugaccaccgagauucugcccgugagcaugaccaagaccagcguggacugcaccauguacaucugcggcgacagcaccgagugcagcaaccugcugcugcaguacggcagcuucugcacccagcugaaccgggcccugaccggcaucgccguggagcaggacaagaacacccaggagguguucgcccaggugaagcagaucuacaagaccccucccaucaaggacuucggcggcuucaacuucagccagauccugcccgaccccagcaagcccagcaagcggagcuucaucgaggaccugcuguucaacaaggugacccuagccgacgccggcuucaucaagcaguacggcgacugccucggcgacauagccgcccgggaccugaucugcgcccagaaguucaacggccugaccgugcugccuccccugcugaccgacgagaugaucgcccaguacaccagcgcccuguuagccggaaccaucaccagcggcuggacuuucggcgcuggagccgcucugcagauccccuucgccaugcagauggccuaccgguucaacggcaucggcgugacccagaacgugcuguacgagaaccagaagcugaucgccaaccaguucaacagcgccaucggcaagauccaggacagccugagcagcaccgcuagcgcccugggcaagcugcaggacguggugaaccagaacgcccaggcccugaacacccuggugaagcagcugagcagcaacuucggcgccaucagcagcgugcugaacgacauccugagccggcuggacaaggucgaggccgaggugcagaucgaccggcugaucacuggccggcugcagagccugcagaccuacgugacccagcagcugauccgggccgccgagauucgggccagcgccaaccuggccgccaccaagaugagcgagugcgugcugggccagagcaagcggguggacuucugcggcaagggcuaccaccugaugagcuuuccccagagcgcaccccacggagugguguuccugcacgugaccuacgugcccgcccaggagaagaacuucaccaccgccccagccaucugccacgacggcaaggcccacuuuccccgggagggcguguucgugagcaacggcacccacugguucgugacccagcggaacuucuacgagccccagaucaucaccaccgacaacaccuucgugagcggcaacugcgacguggugaucggcaucgugaacaacaccguguacgauccccugcagcccgagcuggacagcuucaaggaggagcuggacaaguacuucaagaaucacaccagccccgacguggaccugggcgacaucagcggcaucaacgccagcguggugaacauccagaaggagaucgaucggcugaacgagguggccaagaaccugaacgagagccugaucgaccugcaggagcugggcaaguacgagcaguacaucaaguggcccugguacaucuggcugggcuucaucgccggccugaucgccaucgugaucgugaccaucaugcugugcugcaugaccagcugcugcagcugccugaagggcuguugcagcugcggcagcugcugcaaguucgacgaggacgacagcgagcccgugcugaagggcgugaagcugcacuacaccugauaauaggcuggagccucgguggccuagcuucuugccccuugggccuccccccagccccuccuccccuuccugcacccguacccccguggucuuugaauaaagucugagugggcggcaaaaaaaaaaaaaaaaaaaaaaaaaaaaaaaaaaaaaaaaaaaaaaaaaaaaaaaaaaaaaaaaaaaaaaaaaaaaaaaaaaaaaaaaaaaaaaaaaaaaucuag

SEQ ID NO: 26535 - RNA, 4094 nt, Artificial Sequence
  SARS-CoV-2/Wuhan/WIV05/2019__EPI_ISL_402128 spike protein mRNA gc (1-1273)(H69del_V70del_A222V_Y453F_S477N_D614G_I692V)
gggaaauaagagagaaaagaagaguaagaagaaauauaagaccccggcgccgccaccauguucguguuccuggugcugcugccccuggugagcagccagugcgugaaccugaccacccggacccagcugccaccagccuacaccaacagcuucacccggggcgucuacuaccccgacaagguguuccggagcagcguccugcacagcacccaggaccuguuccugcccuucuucagcaacgugaccugguuccacgccaucagcggcaccaacggcaccaagcgguucgacaaccccgugcugcccuucaacgacggcguguacuucgccagcaccgagaagagcaacaucauccggggcuggaucuucggcaccacccuggacagcaagacccagagccugcugaucgugaauaacgccaccaacguggugaucaaggugugcgaguuccaguucugcaacgaccccuuccugggcguguacuaccacaagaacaacaagagcuggauggagagcgaguuccggguguacagcagcgccaacaacugcaccuucgaguacgugagccagcccuuccugauggaccuggagggcaagcagggcaacuucaagaaccugcgggaguucguguucaagaacaucgacggcuacuucaagaucuacagcaagcacaccccaaucaaccuggugcgggaucugccccagggcuucucagugcuggagccccugguggaccugcccaucggcaucaacaucacccgguuccagacccugcuggcccugcaccggagcuaccugaccccaggcgacagcagcagcggguggacagcaggcgcggcugcuuacuacgugggcuaccugcagccccggaccuuccugcugaaguacaacgagaacggcaccaucaccgacgccguggacugcgcccuggacccucugagcgagaccaagugcacccugaagagcuucaccguggagaagggcaucuaccagaccagcaacuuccgggugcagcccaccgagagcaucgugcgguuccccaacaucaccaaccugugccccuucggcgagguguucaacgccacccgguucgccagcguguacgccuggaaccggaagcggaucagcaacugcguggccgacuacagcgugcuguacaacagcgccagcuucagcaccuucaagugcuacggcgugagccccaccaagcugaacgaccugugcuucaccaacguguacgccgacagcuucgugauccguggcgacgaggugcggcagaucgcacccggccagacaggcaagaucgccgacuacaacuacaagcugcccgacgacuucaccggcugcgugaucgccuggaacagcaacaaccucgacagcaaggugggcggcaacuacaacuaccuguuccggcuguuccggaagagcaaccugaagcccuucgagcgggacaucagcaccgagaucuaccaagccggcaacaccccuugcaacggcguggagggcuucaacugcuacuucccucugcagagcuacggcuuccagcccaccaacggcgugggcuaccagcccuaccgggugguggugcugagcuucgagcugcugcacgccccagccaccguguguggccccaagaagagcaccaaccuggugaagaacaagugcgugaacuucaacuucaacggccuuaccggcaccggcgugcugaccgagagcaacaagaaauuccugcccuuucagcaguucggccgggacaucgccgacaccaccgacgcugugcgggauccccagacccuggagauccuggacaucaccccuugcagcuucggcggcgugagcgugaucaccccaggcaccaacaccagcaaccagguggccgugcuguaccagggcgugaacugcaccgaggugcccguggccauccacgccgaccagcugacacccaccuggcgggucuacagcaccggcagcaacguguuccagacccgggccgguugccugaucggcgccgagcacgugaacaacagcuacgagugcgacauccccaucggcgccggcaucugugccagcuaccagacccagaccaauucaccccggagggcaaggagcguggccagccagagcgugaucgccuacaccaugagccugggcgccgagaacagcguggccuacagcaacaacagcaucgccauccccaccaacuucaccaucagcgugaccaccgagauucugcccgugagcaugaccaagaccagcguggacugcaccauguacaucugcggcgacagcaccgagugcagcaaccugcugcugcaguacggcagcuucugcacccagcugaaccgggcccugaccggcaucgccguggagcaggacaagaacacccaggagguguucgcccaggugaagcagaucuacaagaccccucccaucaaggacuucggcggcuucaacuucagccagauccugcccgaccccagcaagcccagcaagcggagcuucaucgaggaccugcuguucaacaaggugacccuagccgacgccggcuucaucaagcaguacggcgacugccucggcgacauagccgcccgggaccugaucugcgcccagaaguucaacggccugaccgugcugccuccccugcugaccgacgagaugaucgcccaguacaccagcgcccuguuagccggaaccaucaccagcggcuggacuuucggcgcuggagccgcucugcagauccccuucgccaugcagauggccuaccgguucaacggcaucggcgugacccagaacgugcuguacgagaaccagaagcugaucgccaaccaguucaacagcgccaucggcaagauccaggacagccugagcagcaccgcuagcgcccugggcaagcugcaggacguggugaaccagaacgcccaggcccugaacacccuggugaagcagcugagcagcaacuucggcgccaucagcagcgugcugaacgacauccugagccggcuggacaaggucgaggccgaggugcagaucgaccggcugaucacuggccggcugcagagccugcagaccuacgugacccagcagcugauccgggccgccgagauucgggccagcgccaaccuggccgccaccaagaugagcgagugcgugcugggccagagcaagcggguggacuucugcggcaagggcuaccaccugaugagcuuuccccagagcgcaccccacggagugguguuccugcacgugaccuacgugcccgcccaggagaagaacuucaccaccgccccagccaucugccacgacggcaaggcccacuuuccccgggagggcguguucgugagcaacggcacccacugguucgugacccagcggaacuucuacgagccccagaucaucaccaccgacaacaccuucgugagcggcaacugcgacguggugaucggcaucgugaacaacaccguguacgauccccugcagcccgagcuggacagcuucaaggaggagcuggacaaguacuucaagaaucacaccagccccgacguggaccugggcgacaucagcggcaucaacgccagcguggugaacauccagaaggagaucgaucggcugaacgagguggccaagaaccugaacgagagccugaucgaccugcaggagcugggcaaguacgagcaguacaucaaguggcccugguacaucuggcugggcuucaucgccggccugaucgccaucgugauggugaccaucaugcugugcugcaugaccagcugcugcagcugccugaagggcuguugcagcugcggcagcugcugcaaguucgacgaggacgacagcgagcccgugcugaagggcgugaagcugcacuacaccugauaauaggcuggagccucgguggccuagcuucuugccccuugggccuccccccagccccuccuccccuuccugcacccguacccccguggucuuugaauaaagucugagugggcggcaaaaaaaaaaaaaaaaaaaaaaaaaaaaaaaaaaaaaaaaaaaaaaaaaaaaaaaaaaaaaaaaaaaaaaaaaaaaaaaaaaaaaaaaaaaaaaaaaaaaucuag

SEQ ID NO: 26536 - RNA, 4094 nt, Artificial Sequence
  SARS-CoV-2/Wuhan/WIV05/2019__EPI_ISL_402128 spike protein mRNA gc (1-1273)(H69del_V70del_Y453F_D614G_I692V_M1229I)
gggaaauaagagagaaaagaagaguaagaagaaauauaagaccccggcgccgccaccauguucguguuccuggugcugcugccccuggugagcagccagugcgugaaccugaccacccggacccagcugccaccagccuacaccaacagcuucacccggggcgucuacuaccccgacaagguguuccggagcagcguccugcacagcacccaggaccuguuccugcccuucuucagcaacgugaccugguuccacgccaucagcggcaccaacggcaccaagcgguucgacaaccccgugcugcccuucaacgacggcguguacuucgccagcaccgagaagagcaacaucauccggggcuggaucuucggcaccacccuggacagcaagacccagagccugcugaucgugaauaacgccaccaacguggugaucaaggugugcgaguuccaguucugcaacgaccccuuccugggcguguacuaccacaagaacaacaagagcuggauggagagcgaguuccggguguacagcagcgccaacaacugcaccuucgaguacgugagccagcccuuccugauggaccuggagggcaagcagggcaacuucaagaaccugcgggaguucguguucaagaacaucgacggcuacuucaagaucuacagcaagcacaccccaaucaaccuggugcgggaucugccccagggcuucucagcccuggagccccugguggaccugcccaucggcaucaacaucacccgguuccagacccugcuggcccugcaccggagcuaccugaccccaggcgacagcagcagcggguggacagcaggcgcggcugcuuacuacgugggcuaccugcagccccggaccuuccugcugaaguacaacgagaacggcaccaucaccgacgccguggacugcgcccuggacccucugagcgagaccaagugcacccugaagagcuucaccguggagaagggcaucuaccagaccagcaacuuccgggugcagcccaccgagagcaucgugcgguuccccaacaucaccaaccugugccccuucggcgagguguucaacgccacccgguucgccagcguguacgccuggaaccggaagcggaucagcaacugcguggccgacuacagcgugcuguacaacagcgccagcuucagcaccuucaagugcuacggcgugagccccaccaagcugaacgaccugugcuucaccaacguguacgccgacagcuucgugauccguggcgacgaggugcggcagaucgcacccggccagacaggcaagaucgccgacuacaacuacaagcugcccgacgacuucaccggcugcgugaucgccuggaacagcaacaaccucgacagcaaggugggcggcaacuacaacuaccuguuccggcuguuccggaagagcaaccugaagcccuucgagcgggacaucagcaccgagaucuaccaagccggcuccaccccuugcaacggcguggagggcuucaacugcuacuucccucugcagagcuacggcuuccagcccaccaacggcgugggcuaccagcccuaccgggugguggugcugagcuucgagcugcugcacgccccagccaccguguguggccccaagaagagcaccaaccuggugaagaacaagugcgugaacuucaacuucaacggccuuaccggcaccggcgugcugaccgagagcaacaagaaauuccugcccuuucagcaguucggccgggacaucgccgacaccaccgacgcugugcgggauccccagacccuggagauccuggacaucaccccuugcagcuucggcggcgugagcgugaucaccccaggcaccaacaccagcaaccagguggccgugcuguaccagggcgugaacugcaccgaggugcccguggccauccacgccgaccagcugacacccaccuggcgggucuacagcaccggcagcaacguguuccagacccgggccgguugccugaucggcgccgagcacgugaacaacagcuacgagugcgacauccccaucggcgccggcaucugugccagcuaccagacccagaccaauucaccccggagggcaaggagcguggccagccagagcgugaucgccuacaccaugagccugggcgccgagaacagcguggccuacagcaacaacagcaucgccauccccaccaacuucaccaucagcgugaccaccgagauucugcccgugagcaugaccaagaccagcguggacugcaccauguacaucugcggcgacagcaccgagugcagcaaccugcugcugcaguacggcagcuucugcacccagcugaaccgggcccugaccggcaucgccguggagcaggacaagaacacccaggagguguucgcccaggugaagcagaucuacaagaccccucccaucaaggacuucggcggcuucaacuucagccagauccugcccgaccccagcaagcccagcaagcggagcuucaucgaggaccugcuguucaacaaggugacccuagccgacgccggcuucaucaagcaguacggcgacugccucggcgacauagccgcccgggaccugaucugcgcccagaaguucaacggccugaccgugcugccuccccugcugaccgacgagaugaucgcccaguacaccagcgcccuguuagccggaaccaucaccagcggcuggacuuucggcgcuggagccgcucugcagauccccuucgccaugcagauggccuaccgguucaacggcaucggcgugacccagaacgugcuguacgagaaccagaagcugaucgccaaccaguucaacagcgccaucggcaagauccaggacagccugagcagcaccgcuagcgcccugggcaagcugcaggacguggugaaccagaacgcccaggcccugaacacccuggugaagcagcugagcagcaacuucggcgccaucagcagcgugcugaacgacauccugagccggcuggacaaggucgaggccgaggugcagaucgaccggcugaucacuggccggcugcagagccugcagaccuacgugacccagcagcugauccgggccgccgagauucgggccagcgccaaccuggccgccaccaagaugagcgagugcgugcugggccagagcaagcggguggacuucugcggcaagggcuaccaccugaugagcuuuccccagagcgcaccccacggagugguguuccugcacgugaccuacgugcccgcccaggagaagaacuucaccaccgccccagccaucugccacgacggcaaggcccacuuuccccgggagggcguguucgugagcaacggcacccacugguucgugacccagcggaacuucuacgagccccagaucaucaccaccgacaacaccuucgugagcggcaacugcgacguggugaucggcaucgugaacaacaccguguacgauccccugcagcccgagcuggacagcuucaaggaggagcuggacaaguacuucaagaaucacaccagccccgacguggaccugggcgacaucagcggcaucaacgccagcguggugaacauccagaaggagaucgaucggcugaacgagguggccaagaaccugaacgagagccugaucgaccugcaggagcugggcaaguacgagcaguacaucaaguggcccugguacaucuggcugggcuucaucgccggccugaucgccaucgugaucgugaccaucaugcugugcugcaugaccagcugcugcagcugccugaagggcuguugcagcugcggcagcugcugcaaguucgacgaggacgacagcgagcccgugcugaagggcgugaagcugcacuacaccugauaauaggcuggagccucgguggccuagcuucuugccccuugggccuccccccagccccuccuccccuuccugcacccguacccccguggucuuugaauaaagucugagugggcggcaaaaaaaaaaaaaaaaaaaaaaaaaaaaaaaaaaaaaaaaaaaaaaaaaaaaaaaaaaaaaaaaaaaaaaaaaaaaaaaaaaaaaaaaaaaaaaaaaaaaucuag

SEQ ID NO: 26537 - RNA, 4091 nt, Artificial Sequence
  SARS-CoV-2/Wuhan/WIV05/2019__EPI_ISL_402128 spike protein mRNA gc (1-1273)(H69del_V70del_Y144del_N501Y_A570D_D614G_P681H_T716I_S982 A_D1118H)
gggaaauaagagagaaaagaagaguaagaagaaauauaagaccccggcgccgccaccauguucguguuccuggugcugcugccccuggugagcagccagugcgugaaccugaccacccggacccagcugccaccagccuacaccaacagcuucacccggggcgucuacuaccccgacaagguguuccggagcagcguccugcacagcacccaggaccuguuccugcccuucuucagcaacgugaccugguuccacgccaucagcggcaccaacggcaccaagcgguucgacaaccccgugcugcccuucaacgacggcguguacuucgccagcaccgagaagagcaacaucauccggggcuggaucuucggcaccacccuggacagcaagacccagagccugcugaucgugaauaacgccaccaacguggugaucaaggugugcgaguuccaguucugcaacgaccccuuccugggcguguaccacaagaacaacaagagcuggauggagagcgaguuccggguguacagcagcgccaacaacugcaccuucgaguacgugagccagcccuuccugauggaccuggagggcaagcagggcaacuucaagaaccugcgggaguucguguucaagaacaucgacggcuacuucaagaucuacagcaagcacaccccaaucaaccuggugcgggaucugccccagggcuucucagcccuggagccccugguggaccugcccaucggcaucaacaucacccgguuccagacccugcuggcccugcaccggagcuaccugaccccaggcgacagcagcagcggguggacagcaggcgcggcugcuuacuacgugggcuaccugcagccccggaccuuccugcugaaguacaacgagaacggcaccaucaccgacgccguggacugcgcccuggacccucugagcgagaccaagugcacccugaagagcuucaccguggagaagggcaucuaccagaccagcaacuuccgggugcagcccaccgagagcaucgugcgguuccccaacaucaccaaccugugccccuucggcgagguguucaacgccacccgguucgccagcguguacgccuggaaccggaagcggaucagcaacugcguggccgacuacagcgugcuguacaacagcgccagcuucagcaccuucaagugcuacggcgugagccccaccaagcugaacgaccugugcuucaccaacguguacgccgacagcuucgugauccguggcgacgaggugcggcagaucgcacccggccagacaggcaagaucgccgacuacaacuacaagcugcccgacgacuucaccggcugcgugaucgccuggaacagcaacaaccucgacagcaaggugggcggcaacuacaacuaccuguaccggcuguuccggaagagcaaccugaagcccuucgagcgggacaucagcaccgagaucuaccaagccggcuccaccccuugcaacggcguggagggcuucaacugcuacuucccucugcagagcuacggcuuccagcccaccuacggcgugggcuaccagcccuaccgggugguggugcugagcuucgagcugcugcacgccccagccaccguguguggccccaagaagagcaccaaccuggugaagaacaagugcgugaacuucaacuucaacggccuuaccggcaccggcgugcugaccgagagcaacaagaaauuccugcccuuucagcaguucggccgggacaucgacgacaccaccgacgcugugcgggauccccagacccuggagauccuggacaucaccccuugcagcuucggcggcgugagcgugaucaccccaggcaccaacaccagcaaccagguggccgugcuguaccagggcgugaacugcaccgaggugcccguggccauccacgccgaccagcugacacccaccuggcgggucuacagcaccggcagcaacguguuccagacccgggccgguugccugaucggcgccgagcacgugaacaacagcuacgagugcgacauccccaucggcgccggcaucugugccagcuaccagacccagaccaauucacaccggagggcaaggagcguggccagccagagcaucaucgccuacaccaugagccugggcgccgagaacagcguggccuacagcaacaacagcaucgccauccccaucaacuucaccaucagcgugaccaccgagauucugcccgugagcaugaccaagaccagcguggacugcaccauguacaucugcggcgacagcaccgagugcagcaaccugcugcugcaguacggcagcuucugcacccagcugaaccgggcccugaccggcaucgccguggagcaggacaagaacacccaggagguguucgcccaggugaagcagaucuacaagaccccucccaucaaggacuucggcggcuucaacuucagccagauccugcccgaccccagcaagcccagcaagcggagcuucaucgaggaccugcuguucaacaaggugacccuagccgacgccggcuucaucaagcaguacggcgacugccucggcgacauagccgcccgggaccugaucugcgcccagaaguucaacggccugaccgugcugccuccccugcugaccgacgagaugaucgcccaguacaccagcgcccuguuagccggaaccaucaccagcggcuggacuuucggcgcuggagccgcucugcagauccccuucgccaugcagauggccuaccgguucaacggcaucggcgugacccagaacgugcuguacgagaaccagaagcugaucgccaaccaguucaacagcgccaucggcaagauccaggacagccugagcagcaccgcuagcgcccugggcaagcugcaggacguggugaaccagaacgcccaggcccugaacacccuggugaagcagcugagcagcaacuucggcgccaucagcagcgugcugaacgacauccuggcccggcuggacaaggucgaggccgaggugcagaucgaccggcugaucacuggccggcugcagagccugcagaccuacgugacccagcagcugauccgggccgccgagauucgggccagcgccaaccuggccgccaccaagaugagcgagugcgugcugggccagagcaagcggguggacuucugcggcaagggcuaccaccugaugagcuuuccccagagcgcaccccacggagugguguuccugcacgugaccuacgugcccgcccaggagaagaacuucaccaccgccccagccaucugccacgacggcaaggcccacuuuccccgggagggcguguucgugagcaacggcacccacugguucgugacccagcggaacuucuacgagccccagaucaucaccacccacaacaccuucgugagcggcaacugcgacguggugaucggcaucgugaacaacaccguguacgauccccugcagcccgagcuggacagcuucaaggaggagcuggacaaguacuucaagaaucacaccagccccgacguggaccugggcgacaucagcggcaucaacgccagcguggugaacauccagaaggagaucgaucggcugaacgagguggccaagaaccugaacgagagccugaucgaccugcaggagcugggcaaguacgagcaguacaucaaguggcccugguacaucuggcugggcuucaucgccggccugaucgccaucgugauggugaccaucaugcugugcugcaugaccagcugcugcagcugccugaagggcuguugcagcugcggcagcugcugcaaguucgacgaggacgacagcgagcccgugcugaagggcgugaagcugcacuacaccugauaauaggcuggagccucgguggccuagcuucuugccccuugggccuccccccagccccuccuccccuuccugcacccguacccccguggucuuugaauaaagucugagugggcggcaaaaaaaaaaaaaaaaaaaaaaaaaaaaaaaaaaaaaaaaaaaaaaaaaaaaaaaaaaaaaaaaaaaaaaaaaaaaaaaaaaaaaaaaaaaaaaaaaaaaucuag

SEQ ID NO: 26538 - RNA, 4100 nt, Artificial Sequence
  SARS-CoV-2/Wuhan/WIV05/2019__EPI_ISL_402128 spike protein mRNA gc (1-1273)(K417N_E484K_N501Y_D614G)
gggaaauaagagagaaaagaagaguaagaagaaauauaagaccccggcgccgccaccauguucguguuccuggugcugcugccccuggugagcagccagugcgugaaccugaccacccggacccagcugccaccagccuacaccaacagcuucacccggggcgucuacuaccccgacaagguguuccggagcagcguccugcacagcacccaggaccuguuccugcccuucuucagcaacgugaccugguuccacgccauccacgugagcggcaccaacggcaccaagcgguucgacaaccccgugcugcccuucaacgacggcguguacuucgccagcaccgagaagagcaacaucauccggggcuggaucuucggcaccacccuggacagcaagacccagagccugcugaucgugaauaacgccaccaacguggugaucaaggugugcgaguuccaguucugcaacgaccccuuccugggcguguacuaccacaagaacaacaagagcuggauggagagcgaguuccggguguacagcagcgccaacaacugcaccuucgaguacgugagccagcccuuccugauggaccuggagggcaagcagggcaacuucaagaaccugcgggaguucguguucaagaacaucgacggcuacuucaagaucuacagcaagcacaccccaaucaaccuggugcgggaucugccccagggcuucucagcccuggagccccugguggaccugcccaucggcaucaacaucacccgguuccagacccugcuggcccugcaccggagcuaccugaccccaggcgacagcagcagcggguggacagcaggcgcggcugcuuacuacgugggcuaccugcagccccggaccuuccugcugaaguacaacgagaacggcaccaucaccgacgccguggacugcgcccuggacccucugagcgagaccaagugcacccugaagagcuucaccguggagaagggcaucuaccagaccagcaacuuccgggugcagcccaccgagagcaucgugcgguuccccaacaucaccaaccugugccccuucggcgagguguucaacgccacccgguucgccagcguguacgccuggaaccggaagcggaucagcaacugcguggccgacuacagcgugcuguacaacagcgccagcuucagcaccuucaagugcuacggcgugagccccaccaagcugaacgaccugugcuucaccaacguguacgccgacagcuucgugauccguggcgacgaggugcggcagaucgcacccggccagacaggcaacaucgccgacuacaacuacaagcugcccgacgacuucaccggcugcgugaucgccuggaacagcaacaaccucgacagcaaggugggcggcaacuacaacuaccuguaccggcuguuccggaagagcaaccugaagcccuucgagcgggacaucagcaccgagaucuaccaagccggcuccaccccuugcaacggcgugaagggcuucaacugcuacuucccucugcagagcuacggcuuccagcccaccuacggcgugggcuaccagcccuaccgggugguggugcugagcuucgagcugcugcacgccccagccaccguguguggccccaagaagagcaccaaccuggugaagaacaagugcgugaacuucaacuucaacggccuuaccggcaccggcgugcugaccgagagcaacaagaaauuccugcccuuucagcaguucggccgggacaucgccgacaccaccgacgcugugcgggauccccagacccuggagauccuggacaucaccccuugcagcuucggcggcgugagcgugaucaccccaggcaccaacaccagcaaccagguggccgugcuguaccagggcgugaacugcaccgaggugcccguggccauccacgccgaccagcugacacccaccuggcgggucuacagcaccggcagcaacguguuccagacccgggccgguugccugaucggcgccgagcacgugaacaacagcuacgagugcgacauccccaucggcgccggcaucugugccagcuaccagacccagaccaauucaccccggagggcaaggagcguggccagccagagcaucaucgccuacaccaugagccugggcgccgagaacagcguggccuacagcaacaacagcaucgccauccccaccaacuucaccaucagcgugaccaccgagauucugcccgugagcaugaccaagaccagcguggacugcaccauguacaucugcggcgacagcaccgagugcagcaaccugcugcugcaguacggcagcuucugcacccagcugaaccgggcccugaccggcaucgccguggagcaggacaagaacacccaggagguguucgcccaggugaagcagaucuacaagaccccucccaucaaggacuucggcggcuucaacuucagccagauccugcccgaccccagcaagcccagcaagcggagcuucaucgaggaccugcuguucaacaaggugacccuagccgacgccggcuucaucaagcaguacggcgacugccucggcgacauagccgcccgggaccugaucugcgcccagaaguucaacggccugaccgugcugccuccccugcugaccgacgagaugaucgcccaguacaccagcgcccuguuagccggaaccaucaccagcggcuggacuuucggcgcuggagccgcucugcagauccccuucgccaugcagauggccuaccgguucaacggcaucggcgugacccagaacgugcuguacgagaaccagaagcugaucgccaaccaguucaacagcgccaucggcaagauccaggacagccugagcagcaccgcuagcgcccugggcaagcugcaggacguggugaaccagaacgcccaggcccugaacacccuggugaagcagcugagcagcaacuucggcgccaucagcagcgugcugaacgacauccugagccggcuggacaaggucgaggccgaggugcagaucgaccggcugaucacuggccggcugcagagccugcagaccuacgugacccagcagcugauccgggccgccgagauucgggccagcgccaaccuggccgccaccaagaugagcgagugcgugcugggccagagcaagcggguggacuucugcggcaagggcuaccaccugaugagcuuuccccagagcgcaccccacggagugguguuccugcacgugaccuacgugcccgcccaggagaagaacuucaccaccgccccagccaucugccacgacggcaaggcccacuuuccccgggagggcguguucgugagcaacggcacccacugguucgugacccagcggaacuucuacgagccccagaucaucaccaccgacaacaccuucgugagcggcaacugcgacguggugaucggcaucgugaacaacaccguguacgauccccugcagcccgagcuggacagcuucaaggaggagcuggacaaguacuucaagaaucacaccagccccgacguggaccugggcgacaucagcggcaucaacgccagcguggugaacauccagaaggagaucgaucggcugaacgagguggccaagaaccugaacgagagccugaucgaccugcaggagcugggcaaguacgagcaguacaucaaguggcccugguacaucuggcugggcuucaucgccggccugaucgccaucgugauggugaccaucaugcugugcugcaugaccagcugcugcagcugccugaagggcuguugcagcugcggcagcugcugcaaguucgacgaggacgacagcgagcccgugcugaagggcgugaagcugcacuacaccugauaauaggcuggagccucgguggccuagcuucuugccccuugggccuccccccagccccuccuccccuuccugcacccguacccccguggucuuugaauaaagucugagugggcggcaaaaaaaaaaaaaaaaaaaaaaaaaaaaaaaaaaaaaaaaaaaaaaaaaaaaaaaaaaaaaaaaaaaaaaaaaaaaaaaaaaaaaaaaaaaaaaaaaaaaucuag

SEQ ID NO: 26539 - RNA, 4091 nt, Artificial Sequence
  SARS-CoV-2/Wuhan/WIV05/2019__EPI_ISL_402128 spike protein mRNA gc (1-1273)(L18F_D80A_D215G_L242del_A243del_L244del_R246I_K417N_E484 K_N501Y_D614G_A701V)
gggaaauaagagagaaaagaagaguaagaagaaauauaagaccccggcgccgccaccauguucguguuccuggugcugcugccccuggugagcagccagugcgugaacuucaccacccggacccagcugccaccagccuacaccaacagcuucacccggggcgucuacuaccccgacaagguguuccggagcagcguccugcacagcacccaggaccuguuccugcccuucuucagcaacgugaccugguuccacgccauccacgugagcggcaccaacggcaccaagcgguucgccaaccccgugcugcccuucaacgacggcguguacuucgccagcaccgagaagagcaacaucauccggggcuggaucuucggcaccacccuggacagcaagacccagagccugcugaucgugaauaacgccaccaacguggugaucaaggugugcgaguuccaguucugcaacgaccccuuccugggcguguacuaccacaagaacaacaagagcuggauggagagcgaguuccggguguacagcagcgccaacaacugcaccuucgaguacgugagccagcccuuccugauggaccuggagggcaagcagggcaacuucaagaaccugcgggaguucguguucaagaacaucgacggcuacuucaagaucuacagcaagcacaccccaaucaaccuggugcggggccugccccagggcuucucagcccuggagccccugguggaccugcccaucggcaucaacaucacccgguuccagacccugcacaucagcuaccugaccccaggcgacagcagcagcggguggacagcaggcgcggcugcuuacuacgugggcuaccugcagccccggaccuuccugcugaaguacaacgagaacggcaccaucaccgacgccguggacugcgcccuggacccucugagcgagaccaagugcacccugaagagcuucaccguggagaagggcaucuaccagaccagcaacuuccgggugcagcccaccgagagcaucgugcgguuccccaacaucaccaaccugugccccuucggcgagguguucaacgccacccgguucgccagcguguacgccuggaaccggaagcggaucagcaacugcguggccgacuacagcgugcuguacaacagcgccagcuucagcaccuucaagugcuacggcgugagccccaccaagcugaacgaccugugcuucaccaacguguacgccgacagcuucgugauccguggcgacgaggugcggcagaucgcacccggccagacaggcaacaucgccgacuacaacuacaagcugcccgacgacuucaccggcugcgugaucgccuggaacagcaacaaccucgacagcaaggugggcggcaacuacaacuaccuguaccggcuguuccggaagagcaaccugaagcccuucgagcgggacaucagcaccgagaucuaccaagccggcuccaccccuugcaacggcgugaagggcuucaacugcuacuucccucugcagagcuacggcuuccagcccaccuacggcgugggcuaccagcccuaccgggugguggugcugagcuucgagcugcugcacgccccagccaccguguguggccccaagaagagcaccaaccuggugaagaacaagugcgugaacuucaacuucaacggccuuaccggcaccggcgugcugaccgagagcaacaagaaauuccugcccuuucagcaguucggccgggacaucgccgacaccaccgacgcugugcgggauccccagacccuggagauccuggacaucaccccuugcagcuucggcggcgugagcgugaucaccccaggcaccaacaccagcaaccagguggccgugcuguaccagggcgugaacugcaccgaggugcccguggccauccacgccgaccagcugacacccaccuggcgggucuacagcaccggcagcaacguguuccagacccgggccgguugccugaucggcgccgagcacgugaacaacagcuacgagugcgacauccccaucggcgccggcaucugugccagcuaccagacccagaccaauucaccccggagggcaaggagcguggccagccagagcaucaucgccuacaccaugagccugggcguggagaacagcguggccuacagcaacaacagcaucgccauccccaccaacuucaccaucagcgugaccaccgagauucugcccgugagcaugaccaagaccagcguggacugcaccauguacaucugcggcgacagcaccgagugcagcaaccugcugcugcaguacggcagcuucugcacccagcugaaccgggcccugaccggcaucgccguggagcaggacaagaacacccaggagguguucgcccaggugaagcagaucuacaagaccccucccaucaaggacuucggcggcuucaacuucagccagauccugcccgaccccagcaagcccagcaagcggagcuucaucgaggaccugcuguucaacaaggugacccuagccgacgccggcuucaucaagcaguacggcgacugccucggcgacauagccgcccgggaccugaucugcgcccagaaguucaacggccugaccgugcugccuccccugcugaccgacgagaugaucgcccaguacaccagcgcccuguuagccggaaccaucaccagcggcuggacuuucggcgcuggagccgcucugcagauccccuucgccaugcagauggccuaccgguucaacggcaucggcgugacccagaacgugcuguacgagaaccagaagcugaucgccaaccaguucaacagcgccaucggcaagauccaggacagccugagcagcaccgcuagcgcccugggcaagcugcaggacguggugaaccagaacgcccaggcccugaacacccuggugaagcagcugagcagcaacuucggcgccaucagcagcgugcugaacgacauccugagccggcuggacaaggucgaggccgaggugcagaucgaccggcugaucacuggccggcugcagagccugcagaccuacgugacccagcagcugauccgggccgccgagauucgggccagcgccaaccuggccgccaccaagaugagcgagugcgugcugggccagagcaagcggguggacuucugcggcaagggcuaccaccugaugagcuuuccccagagcgcaccccacggagugguguuccugcacgugaccuacgugcccgcccaggagaagaacuucaccaccgccccagccaucugccacgacggcaaggcccacuuuccccgggagggcguguucgugagcaacggcacccacugguucgugacccagcggaacuucuacgagccccagaucaucaccaccgacaacaccuucgugagcggcaacugcgacguggugaucggcaucgugaacaacaccguguacgauccccugcagcccgagcuggacagcuucaaggaggagcuggacaaguacuucaagaaucacaccagccccgacguggaccugggcgacaucagcggcaucaacgccagcguggugaacauccagaaggagaucgaucggcugaacgagguggccaagaaccugaacgagagccugaucgaccugcaggagcugggcaaguacgagcaguacaucaaguggcccugguacaucuggcugggcuucaucgccggccugaucgccaucgugauggugaccaucaugcugugcugcaugaccagcugcugcagcugccugaagggcuguugcagcugcggcagcugcugcaaguucgacgaggacgacagcgagcccgugcugaagggcgugaagcugcacuacaccugauaauaggcuggagccucgguggccuagcuucuugccccuugggccuccccccagccccuccuccccuuccugcacccguacccccguggucuuugaauaaagucugagugggcggcaaaaaaaaaaaaaaaaaaaaaaaaaaaaaaaaaaaaaaaaaaaaaaaaaaaaaaaaaaaaaaaaaaaaaaaaaaaaaaaaaaaaaaaaaaaaaaaaaaaaucuag

SEQ ID NO: 26540 - RNA, 4100 nt, Artificial Sequence
  SARS-CoV-2/Wuhan/WIV05/2019__EPI_ISL_402128 spike protein mRNA gc (1-1273)(E484K_D614G)
gggaaauaagagagaaaagaagaguaagaagaaauauaagaccccggcgccgccaccauguucguguuccuggugcugcugccccuggugagcagccagugcgugaaccugaccacccggacccagcugccaccagccuacaccaacagcuucacccggggcgucuacuaccccgacaagguguuccggagcagcguccugcacagcacccaggaccuguuccugcccuucuucagcaacgugaccugguuccacgccauccacgugagcggcaccaacggcaccaagcgguucgacaaccccgugcugcccuucaacgacggcguguacuucgccagcaccgagaagagcaacaucauccggggcuggaucuucggcaccacccuggacagcaagacccagagccugcugaucgugaauaacgccaccaacguggugaucaaggugugcgaguuccaguucugcaacgaccccuuccugggcguguacuaccacaagaacaacaagagcuggauggagagcgaguuccggguguacagcagcgccaacaacugcaccuucgaguacgugagccagcccuuccugauggaccuggagggcaagcagggcaacuucaagaaccugcgggaguucguguucaagaacaucgacggcuacuucaagaucuacagcaagcacaccccaaucaaccuggugcgggaucugccccagggcuucucagcccuggagccccugguggaccugcccaucggcaucaacaucacccgguuccagacccugcuggcccugcaccggagcuaccugaccccaggcgacagcagcagcggguggacagcaggcgcggcugcuuacuacgugggcuaccugcagccccggaccuuccugcugaaguacaacgagaacggcaccaucaccgacgccguggacugcgcccuggacccucugagcgagaccaagugcacccugaagagcuucaccguggagaagggcaucuaccagaccagcaacuuccgggugcagcccaccgagagcaucgugcgguuccccaacaucaccaaccugugccccuucggcgagguguucaacgccacccgguucgccagcguguacgccuggaaccggaagcggaucagcaacugcguggccgacuacagcgugcuguacaacagcgccagcuucagcaccuucaagugcuacggcgugagccccaccaagcugaacgaccugugcuucaccaacguguacgccgacagcuucgugauccguggcgacgaggugcggcagaucgcacccggccagacaggcaagaucgccgacuacaacuacaagcugcccgacgacuucaccggcugcgugaucgccuggaacagcaacaaccucgacagcaaggugggcggcaacuacaacuaccuguaccggcuguuccggaagagcaaccugaagcccuucgagcgggacaucagcaccgagaucuaccaagccggcuccaccccuugcaacggcgugaagggcuucaacugcuacuucccucugcagagcuacggcuuccagcccaccaacggcgugggcuaccagcccuaccgggugguggugcugagcuucgagcugcugcacgccccagccaccguguguggccccaagaagagcaccaaccuggugaagaacaagugcgugaacuucaacuucaacggccuuaccggcaccggcgugcugaccgagagcaacaagaaauuccugcccuuucagcaguucggccgggacaucgccgacaccaccgacgcugugcgggauccccagacccuggagauccuggacaucaccccuugcagcuucggcggcgugagcgugaucaccccaggcaccaacaccagcaaccagguggccgugcuguaccagggcgugaacugcaccgaggugcccguggccauccacgccgaccagcugacacccaccuggcgggucuacagcaccggcagcaacguguuccagacccgggccgguugccugaucggcgccgagcacgugaacaacagcuacgagugcgacauccccaucggcgccggcaucugugccagcuaccagacccagaccaauucaccccggagggcaaggagcguggccagccagagcaucaucgccuacaccaugagccugggcgccgagaacagcguggccuacagcaacaacagcaucgccauccccaccaacuucaccaucagcgugaccaccgagauucugcccgugagcaugaccaagaccagcguggacugcaccauguacaucugcggcgacagcaccgagugcagcaaccugcugcugcaguacggcagcuucugcacccagcugaaccgggcccugaccggcaucgccguggagcaggacaagaacacccaggagguguucgcccaggugaagcagaucuacaagaccccucccaucaaggacuucggcggcuucaacuucagccagauccugcccgaccccagcaagcccagcaagcggagcuucaucgaggaccugcuguucaacaaggugacccuagccgacgccggcuucaucaagcaguacggcgacugccucggcgacauagccgcccgggaccugaucugcgcccagaaguucaacggccugaccgugcugccuccccugcugaccgacgagaugaucgcccaguacaccagcgcccuguuagccggaaccaucaccagcggcuggacuuucggcgcuggagccgcucugcagauccccuucgccaugcagauggccuaccgguucaacggcaucggcgugacccagaacgugcuguacgagaaccagaagcugaucgccaaccaguucaacagcgccaucggcaagauccaggacagccugagcagcaccgcuagcgcccugggcaagcugcaggacguggugaaccagaacgcccaggcccugaacacccuggugaagcagcugagcagcaacuucggcgccaucagcagcgugcugaacgacauccugagccggcuggacaaggucgaggccgaggugcagaucgaccggcugaucacuggccggcugcagagccugcagaccuacgugacccagcagcugauccgggccgccgagauucgggccagcgccaaccuggccgccaccaagaugagcgagugcgugcugggccagagcaagcggguggacuucugcggcaagggcuaccaccugaugagcuuuccccagagcgcaccccacggagugguguuccugcacgugaccuacgugcccgcccaggagaagaacuucaccaccgccccagccaucugccacgacggcaaggcccacuuuccccgggagggcguguucgugagcaacggcacccacugguucgugacccagcggaacuucuacgagccccagaucaucaccaccgacaacaccuucgugagcggcaacugcgacguggugaucggcaucgugaacaacaccguguacgauccccugcagcccgagcuggacagcuucaaggaggagcuggacaaguacuucaagaaucacaccagccccgacguggaccugggcgacaucagcggcaucaacgccagcguggugaacauccagaaggagaucgaucggcugaacgagguggccaagaaccugaacgagagccugaucgaccugcaggagcugggcaaguacgagcaguacaucaaguggcccugguacaucuggcugggcuucaucgccggccugaucgccaucgugauggugaccaucaugcugugcugcaugaccagcugcugcagcugccugaagggcuguugcagcugcggcagcugcugcaaguucgacgaggacgacagcgagcccgugcugaagggcgugaagcugcacuacaccugauaauaggcuggagccucgguggccuagcuucuugccccuugggccuccccccagccccuccuccccuuccugcacccguacccccguggucuuugaauaaagucugagugggcggcaaaaaaaaaaaaaaaaaaaaaaaaaaaaaaaaaaaaaaaaaaaaaaaaaaaaaaaaaaaaaaaaaaaaaaaaaaaaaaaaaaaaaaaaaaaaaaaaaaaaucuag

SEQ ID NO: 26541 - RNA, 4100 nt, Artificial Sequence
  SARS-CoV-2/Wuhan/WIV05/2019__EPI_ISL_402128 spike protein mRNA gc (1-1273)(L18F_T20N_P26S_D138Y_R190S_K417T_E484K_N501Y_D614G_H655Y _T1027I)
gggaaauaagagagaaaagaagaguaagaagaaauauaagaccccggcgccgccaccauguucguguuccuggugcugcugccccuggugagcagccagugcgugaacuucaccaaccggacccagcugccaagcgccuacaccaacagcuucacccggggcgucuacuaccccgacaagguguuccggagcagcguccugcacagcacccaggaccuguuccugcccuucuucagcaacgugaccugguuccacgccauccacgugagcggcaccaacggcaccaagcgguucgacaaccccgugcugcccuucaacgacggcguguacuucgccagcaccgagaagagcaacaucauccggggcuggaucuucggcaccacccuggacagcaagacccagagccugcugaucgugaauaacgccaccaacguggugaucaaggugugcgaguuccaguucugcaacuaccccuuccugggcguguacuaccacaagaacaacaagagcuggauggagagcgaguuccggguguacagcagcgccaacaacugcaccuucgaguacgugagccagcccuuccugauggaccuggagggcaagcagggcaacuucaagaaccugagcgaguucguguucaagaacaucgacggcuacuucaagaucuacagcaagcacaccccaaucaaccuggugcgggaucugccccagggcuucucagcccuggagccccugguggaccugcccaucggcaucaacaucacccgguuccagacccugcuggcccugcaccggagcuaccugaccccaggcgacagcagcagcggguggacagcaggcgcggcugcuuacuacgugggcuaccugcagccccggaccuuccugcugaaguacaacgagaacggcaccaucaccgacgccguggacugcgcccuggacccucugagcgagaccaagugcacccugaagagcuucaccguggagaagggcaucuaccagaccagcaacuuccgggugcagcccaccgagagcaucgugcgguuccccaacaucaccaaccugugccccuucggcgagguguucaacgccacccgguucgccagcguguacgccuggaaccggaagcggaucagcaacugcguggccgacuacagcgugcuguacaacagcgccagcuucagcaccuucaagugcuacggcgugagccccaccaagcugaacgaccugugcuucaccaacguguacgccgacagcuucgugauccguggcgacgaggugcggcagaucgcacccggccagacaggcaccaucgccgacuacaacuacaagcugcccgacgacuucaccggcugcgugaucgccuggaacagcaacaaccucgacagcaaggugggcggcaacuacaacuaccuguaccggcuguuccggaagagcaaccugaagcccuucgagcgggacaucagcaccgagaucuaccaagccggcuccaccccuugcaacggcgugaagggcuucaacugcuacuucccucugcagagcuacggcuuccagcccaccuacggcgugggcuaccagcccuaccgggugguggugcugagcuucgagcugcugcacgccccagccaccguguguggccccaagaagagcaccaaccuggugaagaacaagugcgugaacuucaacuucaacggccuuaccggcaccggcgugcugaccgagagcaacaagaaauuccugcccuuucagcaguucggccgggacaucgccgacaccaccgacgcugugcgggauccccagacccuggagauccuggacaucaccccuugcagcuucggcggcgugagcgugaucaccccaggcaccaacaccagcaaccagguggccgugcuguaccagggcgugaacugcaccgaggugcccguggccauccacgccgaccagcugacacccaccuggcgggucuacagcaccggcagcaacguguuccagacccgggccgguugccugaucggcgccgaguacgugaacaacagcuacgagugcgacauccccaucggcgccggcaucugugccagcuaccagacccagaccaauucaccccggagggcaaggagcguggccagccagagcaucaucgccuacaccaugagccugggcgccgagaacagcguggccuacagcaacaacagcaucgccauccccaccaacuucaccaucagcgugaccaccgagauucugcccgugagcaugaccaagaccagcguggacugcaccauguacaucugcggcgacagcaccgagugcagcaaccugcugcugcaguacggcagcuucugcacccagcugaaccgggcccugaccggcaucgccguggagcaggacaagaacacccaggagguguucgcccaggugaagcagaucuacaagaccccucccaucaaggacuucggcggcuucaacuucagccagauccugcccgaccccagcaagcccagcaagcggagcuucaucgaggaccugcuguucaacaaggugacccuagccgacgccggcuucaucaagcaguacggcgacugccucggcgacauagccgcccgggaccugaucugcgcccagaaguucaacggccugaccgugcugccuccccugcugaccgacgagaugaucgcccaguacaccagcgcccuguuagccggaaccaucaccagcggcuggacuuucggcgcuggagccgcucugcagauccccuucgccaugcagauggccuaccgguucaacggcaucggcgugacccagaacgugcuguacgagaaccagaagcugaucgccaaccaguucaacagcgccaucggcaagauccaggacagccugagcagcaccgcuagcgcccugggcaagcugcaggacguggugaaccagaacgcccaggcccugaacacccuggugaagcagcugagcagcaacuucggcgccaucagcagcgugcugaacgacauccugagccggcuggacaaggucgaggccgaggugcagaucgaccggcugaucacuggccggcugcagagccugcagaccuacgugacccagcagcugauccgggccgccgagauucgggccagcgccaaccuggccgccaucaagaugagcgagugcgugcugggccagagcaagcggguggacuucugcggcaagggcuaccaccugaugagcuuuccccagagcgcaccccacggagugguguuccugcacgugaccuacgugcccgcccaggagaagaacuucaccaccgccccagccaucugccacgacggcaaggcccacuuuccccgggagggcguguucgugagcaacggcacccacugguucgugacccagcggaacuucuacgagccccagaucaucaccaccgacaacaccuucgugagcggcaacugcgacguggugaucggcaucgugaacaacaccguguacgauccccugcagcccgagcuggacagcuucaaggaggagcuggacaaguacuucaagaaucacaccagccccgacguggaccugggcgacaucagcggcaucaacgccagcguggugaacauccagaaggagaucgaucggcugaacgagguggccaagaaccugaacgagagccugaucgaccugcaggagcugggcaaguacgagcaguacaucaaguggcccugguacaucuggcugggcuucaucgccggccugaucgccaucgugauggugaccaucaugcugugcugcaugaccagcugcugcagcugccugaagggcuguugcagcugcggcagcugcugcaaguucgacgaggacgacagcgagcccgugcugaagggcgugaagcugcacuacaccugauaauaggcuggagccucgguggccuagcuucuugccccuugggccuccccccagccccuccuccccuuccugcacccguacccccguggucuuugaauaaagucugagugggcggcaaaaaaaaaaaaaaaaaaaaaaaaaaaaaaaaaaaaaaaaaaaaaaaaaaaaaaaaaaaaaaaaaaaaaaaaaaaaaaaaaaaaaaaaaaaaaaaaaaaaucuag

SEQ ID NO: 26542 - RNA, 4100 nt, Artificial Sequence
  SARS-CoV-2/Wuhan/WIV05/2019__EPI_ISL_402128 spike protein mRNA gc (1-1273)(S13I_W152C_L452R_D614G)
gggaaauaagagagaaaagaagaguaagaagaaauauaagaccccggcgccgccaccauguucguguuccuggugcugcugccccuggugagcauccagugcgugaaccugaccacccggacccagcugccaccagccuacaccaacagcuucacccggggcgucuacuaccccgacaagguguuccggagcagcguccugcacagcacccaggaccuguuccugcccuucuucagcaacgugaccugguuccacgccauccacgugagcggcaccaacggcaccaagcgguucgacaaccccgugcugcccuucaacgacggcguguacuucgccagcaccgagaagagcaacaucauccggggcuggaucuucggcaccacccuggacagcaagacccagagccugcugaucgugaauaacgccaccaacguggugaucaaggugugcgaguuccaguucugcaacgaccccuuccugggcguguacuaccacaagaacaacaagagcugcauggagagcgaguuccggguguacagcagcgccaacaacugcaccuucgaguacgugagccagcccuuccugauggaccuggagggcaagcagggcaacuucaagaaccugcgggaguucguguucaagaacaucgacggcuacuucaagaucuacagcaagcacaccccaaucaaccuggugcgggaucugccccagggcuucucagcccuggagccccugguggaccugcccaucggcaucaacaucacccgguuccagacccugcuggcccugcaccggagcuaccugaccccaggcgacagcagcagcggguggacagcaggcgcggcugcuuacuacgugggcuaccugcagccccggaccuuccugcugaaguacaacgagaacggcaccaucaccgacgccguggacugcgcccuggacccucugagcgagaccaagugcacccugaagagcuucaccguggagaagggcaucuaccagaccagcaacuuccgggugcagcccaccgagagcaucgugcgguuccccaacaucaccaaccugugccccuucggcgagguguucaacgccacccgguucgccagcguguacgccuggaaccggaagcggaucagcaacugcguggccgacuacagcgugcuguacaacagcgccagcuucagcaccuucaagugcuacggcgugagccccaccaagcugaacgaccugugcuucaccaacguguacgccgacagcuucgugauccguggcgacgaggugcggcagaucgcacccggccagacaggcaagaucgccgacuacaacuacaagcugcccgacgacuucaccggcugcgugaucgccuggaacagcaacaaccucgacagcaaggugggcggcaacuacaacuaccgcuaccggcuguuccggaagagcaaccugaagcccuucgagcgggacaucagcaccgagaucuaccaagccggcuccaccccuugcaacggcguggagggcuucaacugcuacuucccucugcagagcuacggcuuccagcccaccaacggcgugggcuaccagcccuaccgggugguggugcugagcuucgagcugcugcacgccccagccaccguguguggccccaagaagagcaccaaccuggugaagaacaagugcgugaacuucaacuucaacggccuuaccggcaccggcgugcugaccgagagcaacaagaaauuccugcccuuucagcaguucggccgggacaucgccgacaccaccgacgcugugcgggauccccagacccuggagauccuggacaucaccccuugcagcuucggcggcgugagcgugaucaccccaggcaccaacaccagcaaccagguggccgugcuguaccagggcgugaacugcaccgaggugcccguggccauccacgccgaccagcugacacccaccuggcgggucuacagcaccggcagcaacguguuccagacccgggccgguugccugaucggcgccgagcacgugaacaacagcuacgagugcgacauccccaucggcgccggcaucugugccagcuaccagacccagaccaauucaccccggagggcaaggagcguggccagccagagcaucaucgccuacaccaugagccugggcgccgagaacagcguggccuacagcaacaacagcaucgccauccccaccaacuucaccaucagcgugaccaccgagauucugcccgugagcaugaccaagaccagcguggacugcaccauguacaucugcggcgacagcaccgagugcagcaaccugcugcugcaguacggcagcuucugcacccagcugaaccgggcccugaccggcaucgccguggagcaggacaagaacacccaggagguguucgcccaggugaagcagaucuacaagaccccucccaucaaggacuucggcggcuucaacuucagccagauccugcccgaccccagcaagcccagcaagcggagcuucaucgaggaccugcuguucaacaaggugacccuagccgacgccggcuucaucaagcaguacggcgacugccucggcgacauagccgcccgggaccugaucugcgcccagaaguucaacggccugaccgugcugccuccccugcugaccgacgagaugaucgcccaguacaccagcgcccuguuagccggaaccaucaccagcggcuggacuuucggcgcuggagccgcucugcagauccccuucgccaugcagauggccuaccgguucaacggcaucggcgugacccagaacgugcuguacgagaaccagaagcugaucgccaaccaguucaacagcgccaucggcaagauccaggacagccugagcagcaccgcuagcgcccugggcaagcugcaggacguggugaaccagaacgcccaggcccugaacacccuggugaagcagcugagcagcaacuucggcgccaucagcagcgugcugaacgacauccugagccggcuggacaaggucgaggccgaggugcagaucgaccggcugaucacuggccggcugcagagccugcagaccuacgugacccagcagcugauccgggccgccgagauucgggccagcgccaaccuggccgccaccaagaugagcgagugcgugcugggccagagcaagcggguggacuucugcggcaagggcuaccaccugaugagcuuuccccagagcgcaccccacggagugguguuccugcacgugaccuacgugcccgcccaggagaagaacuucaccaccgccccagccaucugccacgacggcaaggcccacuuuccccgggagggcguguucgugagcaacggcacccacugguucgugacccagcggaacuucuacgagccccagaucaucaccaccgacaacaccuucgugagcggcaacugcgacguggugaucggcaucgugaacaacaccguguacgauccccugcagcccgagcuggacagcuucaaggaggagcuggacaaguacuucaagaaucacaccagccccgacguggaccugggcgacaucagcggcaucaacgccagcguggugaacauccagaaggagaucgaucggcugaacgagguggccaagaaccugaacgagagccugaucgaccugcaggagcugggcaaguacgagcaguacaucaaguggcccugguacaucuggcugggcuucaucgccggccugaucgccaucgugauggugaccaucaugcugugcugcaugaccagcugcugcagcugccugaagggcuguugcagcugcggcagcugcugcaaguucgacgaggacgacagcgagcccgugcugaagggcgugaagcugcacuacaccugauaauaggcuggagccucgguggccuagcuucuugccccuugggccuccccccagccccuccuccccuuccugcacccguacccccguggucuuugaauaaagucugagugggcggcaaaaaaaaaaaaaaaaaaaaaaaaaaaaaaaaaaaaaaaaaaaaaaaaaaaaaaaaaaaaaaaaaaaaaaaaaaaaaaaaaaaaaaaaaaaaaaaaaaaaucuag

SEQ ID NO: 26543 - RNA, 4100 nt, Artificial Sequence
  SARS-CoV-2/Wuhan/WIV05/2019__EPI_ISL_402128 spike protein mRNA gc (1-1273)
gggaaauaagagagaaaagaagaguaagaagaaauauaagaccccggcgccgccaccauguucguguuccuggugcugcugccccuggugagcagccagugcgugaaccugaccacccggacccagcugcccccugccuacaccaacagcuucacccggggcguguacuaccccgacaagguguuccggagcagcgugcugcacagcacccaggaccuguuccugcccuucuucagcaacgugaccugguuccacgccauccacgugagcggcaccaacggcaccaagcgguucgacaacccagugcugcccuucaacgacggcguguacuucgccagcaccgagaagucaaacaucauccggggcuggaucuucggcaccacccuggacagcaagacacagagccugcugaucgugaacaacgccaccaacguggugaucaaggugugcgaguuucaguucugcaacgaccccuuccugggcguguacuaccacaagaacaacaagagcuggauggagagcgaguuccgggucuacagcagcgcuaacaauugcaccuucgaguacgugagccagcccuuccugauggaccucgagggcaagcagggcaacuucaagaaccugcgggaguucguguucaagaacaucgauggcuacuucaagaucuacagcaagcacacccccaucaaccuggugcgggaccugccccagggauucagcgcccuggagccucugguggaccugcccaucggcaucaacaucaccagguuccagacccugcuggcccugcaccggagcuaccugacccccggcgacagcagcagcggcuggaccgccggcgccgccgcauacuacgugggcuaccugcagccacggaccuuccugcugaaguacaacgagaacggcaccaucaccgacgccguggacugcgcccuggacccccugagcgagaccaagugcacccuaaagagcuucaccguggagaagggcaucuaccagaccagcaacuuccgggugcagcccacugagagcaucgugcgguuccccaacauuaccaaccugugucccuucggcgagguguucaacgccacccgguucgccagcguguacgccuggaaccggaagcggaucagcaacugcguggccgacuacagcgugcuguacaacagcgccagcuucagcaccuucaagugcuacggcgugagcccuaccaagcugaacgaccugugcuucaccaacguguacgcugacagcuucgugauccggggcgacgaggugcggcagaucgcccccggccagaccggcaagaucgccgacuacaacuacaagcugcccgacgacuucaccggcugcgugaucgccuggaacagcaacaaccuggacagcaaggugggcggcaacuacaacuaccuguaccggcuguuccguaagagcaaccugaagccauucgagcgggacaucagcaccgagaucuaccaggccggcagcacccccugcaacgguguggagggcuuuaacugcuacuucccccugcagagcuacggcuuccagcccaccaacggcgugggcuaccagcccuaccgggugguggugcugagcuucgagcugcugcacgcccccgccaccgugugcggcccuaaaaagagcaccaaccuggugaagaacaagugcgugaacuucaauuucaacggccugaccggcaccggcgugcugaccgagagcaacaagaaguuccugcccuuccagcaguucggccgggauaucgccgacaccaccgacgcagugcgggacccccagacccuggagauccuggacaucaccccaugcagcuucggcggcgugagcgucaucacccccggcacaaacaccagcaaccagguggccgugcuguaccaggacgugaacugcaccgaggugcccguggccauccacgccgaccagcugacccccaccuggcggguguacagcaccggaagcaacguguuccagacccgggccggcugccugaucggcgccgagcacgugaacaacuccuacgagugcgacauccccaucggcgcuggcaucugcgccagcuaccagacccagaccaacagcccccggcgggcccggagcguggccagccagagcaucaucgccuacaccaugagcuuaggcgccgagaacagcguggccuacagcaacaacagcaucgcgaucccuaccaacuucaccaucagcgugaccaccgagauacugcccgugagcaugaccaagaccagcguggacuguaccauguacaucugcggcgacagcaccgagugcagcaaccugcugcugcaguacggcagcuucugcacccagcugaaccgggcccugaccggcaucgccguggagcaggacaagaacacccaagagguguucgcccaggugaagcagaucuacaagacucccccaaucaaggacuucggcggcuucaacuucagccagauccugcccgaccccagcaagcccagcaagcggagcuucaucgaggaccugcuguucaacaaggugacccuggccgacgccggcuucaucaagcaguacggcgauugccugggcgacaucgccgcucgggaccugaucugcgcccagaaguucaacgggcugaccgugcugcccccucugcugaccgacgagaugaucgcccaguacaccagcgcccugcuugccggcaccaucaccagcggcuggaccuucggcgccggcgcagcccugcagauccccuucgccaugcagauggccuaccgguucaacggcaucggcgugacccagaacgugcuguacgagaaccagaagcugaucgccaaccaguucaacagcgccaucggcaagauccaggacagccugagcagcaccgccagcgcccugggcaagcugcaggacguggugaaccagaacgcucaggcccugaacacccuggugaagcagcugagcagcaacuucggcgccaucagcucagugcugaaugacauccugagcaggcuggacaagguggaggccgaggugcagaucgaccggcugaucaccggccggcugcagagccugcagaccuacgugacccagcagcugauccgggccgccgagauccgggccagcgccaaccuggcagccaccaagaugagcgagugcgugcugggccagagcaagcggguggacuuuugcggcaagggcuaccaccugaugagcuucccccagagcgccccacacggcgugguguuccuccacgucacauacgugcccgcccaggagaagaacuucaccaccgcccccgccauuugccacgacggcaaggcucacuucccccgggagggcguguucgugagcaacggaacccacugguucgugacccagcggaacuucuacgagccccagaucaucaccaccgacaacaccuucgugagcggcaacugcgacguggugaucggcaucgugaacaacaccguguacgacccccugcagccugagcuggacagcuucaaggaggagcuggacaaguacuucaagaaccacaccagccccgauguggaccugggcgacaucagcggcaucaacgccagcguggugaacauccagaaggagaucgaccggcugaacgagguggccaagaaccugaacgagagccugaucgaccugcaggagcugggcaaguacgagcaguacaucaaguggcccugguacaucuggcugggcuucaucgccggccugaucgccaucgugauggugaccaucaugcugugcugcaugaccagcugcuguagcugccugaagggcugcugcagcugcggcagcugcugcaaguucgacgaggacgacagcgagccagugcugaagggcgugaagcugcacuacaccugauaauaggcuggagccucgguggccuagcuucuugccccuugggccuccccccagccccuccuccccuuccugcacccguacccccguggucuuugaauaaagucugagugggcggcaaaaaaaaaaaaaaaaaaaaaaaaaaaaaaaaaaaaaaaaaaaaaaaaaaaaaaaaaaaaaaaaaaaaaaaaaaaaaaaaaaaaaaaaaaaaaaaaaaaaucuag

SEQ ID NO: 26544 - RNA, 4100 nt, Artificial Sequence
  SARS-CoV-2/Wuhan/WIV05/2019__EPI_ISL_402128 spike protein mRNA gc (1-1273)(D614G)
gggaaauaagagagaaaagaagaguaagaagaaauauaagaccccggcgccgccaccauguucguguuccuggugcugcugccccuggugagcagccagugcgugaaccugaccacccggacccagcugcccccugccuacaccaacagcuucacccggggcguguacuaccccgacaagguguuccggagcagcgugcugcacagcacccaggaccuguuccugcccuucuucagcaacgugaccugguuccacgccauccacgugagcggcaccaacggcaccaagcgguucgacaacccagugcugcccuucaacgacggcguguacuucgccagcaccgagaagucaaacaucauccggggcuggaucuucggcaccacccuggacagcaagacacagagccugcugaucgugaacaacgccaccaacguggugaucaaggugugcgaguuucaguucugcaacgaccccuuccugggcguguacuaccacaagaacaacaagagcuggauggagagcgaguuccgggucuacagcagcgcuaacaauugcaccuucgaguacgugagccagcccuuccugauggaccucgagggcaagcagggcaacuucaagaaccugcgggaguucguguucaagaacaucgauggcuacuucaagaucuacagcaagcacacccccaucaaccuggugcgggaccugccccagggauucagcgcccuggagccucugguggaccugcccaucggcaucaacaucaccagguuccagacccugcuggcccugcaccggagcuaccugacccccggcgacagcagcagcggcuggaccgccggcgccgccgcauacuacgugggcuaccugcagccacggaccuuccugcugaaguacaacgagaacggcaccaucaccgacgccguggacugcgcccuggacccccugagcgagaccaagugcacccuaaagagcuucaccguggagaagggcaucuaccagaccagcaacuuccgggugcagcccacugagagcaucgugcgguuccccaacauuaccaaccugugucccuucggcgagguguucaacgccacccgguucgccagcguguacgccuggaaccggaagcggaucagcaacugcguggccgacuacagcgugcuguacaacagcgccagcuucagcaccuucaagugcuacggcgugagcccuaccaagcugaacgaccugugcuucaccaacguguacgcugacagcuucgugauccggggcgacgaggugcggcagaucgcccccggccagaccggcaagaucgccgacuacaacuacaagcugcccgacgacuucaccggcugcgugaucgccuggaacagcaacaaccuggacagcaaggugggcggcaacuacaacuaccuguaccggcuguuccguaagagcaaccugaagccauucgagcgggacaucagcaccgagaucuaccaggccggcagcacccccugcaacgguguggagggcuuuaacugcuacuucccccugcagagcuacggcuuccagcccaccaacggcgugggcuaccagcccuaccgggugguggugcugagcuucgagcugcugcacgcccccgccaccgugugcggcccuaaaaagagcaccaaccuggugaagaacaagugcgugaacuucaauuucaacggccugaccggcaccggcgugcugaccgagagcaacaagaaguuccugcccuuccagcaguucggccgggauaucgccgacaccaccgacgcagugcgggacccccagacccuggagauccuggacaucaccccaugcagcuucggcggcgugagcgucaucacccccggcacaaacaccagcaaccagguggccgugcuguaccagggagugaacugcaccgaggugcccguggccauccacgccgaccagcugacccccaccuggcggguguacagcaccggcagcaacguguuccagacccgggccggcugccugaucggcgccgagcacgugaacaacuccuacgagugcgacauccccaucggcgcuggcaucugcgccagcuaccagacccagaccaacagcccccggcgggcccggagcguggccagccagagcaucaucgccuacaccaugagcuuaggcgccgagaacagcguggccuacagcaacaacagcaucgcgaucccuaccaacuucaccaucagcgugaccaccgagauacugcccgugagcaugaccaagaccagcguggacuguaccauguacaucugcggcgacagcaccgagugcagcaaccugcugcugcaguacggcagcuucugcacccagcugaaccgggcccugaccggcaucgccguggagcaggacaagaacacccaagagguguucgcccaggugaagcagaucuacaagacucccccaaucaaggacuucggcggcuucaacuucagccagauccugcccgaccccagcaagcccagcaagcggagcuucaucgaggaccugcuguucaacaaggugacccuggccgacgccggcuucaucaagcaguacggcgacugccugggggauaucgccgcucgggaccugaucugcgcccagaaguucaacggccugaccgugcugcccccucugcugaccgacgagaugaucgcccaguacaccagcgcccugcuugccggcaccaucaccagcggcuggaccuucggcgccggcgcagcccugcagauccccuucgccaugcagauggccuaccgguucaacggcaucggcgugacccagaacgugcuguacgagaaccagaagcugaucgccaaccaguucaacagcgccaucggcaagauccaggacagccugagcagcaccgccagcgcccugggcaagcugcaggacguggugaaccagaacgcucaggcccugaacacccuggugaagcagcugagcagcaacuucggcgccaucagcucagugcugaaugacauccugagcaggcuggacaagguggaggccgaggugcagaucgaccggcugaucaccggccggcugcagagccugcagaccuacgugacccagcagcugauccgggccgccgagauccgggccagcgccaaccuggcagccaccaagaugagcgagugcgugcugggccagagcaagcggguggacuuuugcggcaagggcuaccaccugaugagcuucccccagagcgccccacacggcgugguguuccuccacgucacauacgugcccgcccaggagaagaacuucaccaccgcccccgccauuugccacgacggcaaggcucacuucccccgggagggaguguucgugagcaacggcacccacugguucgugacccagcggaacuucuacgagccccagaucaucaccaccgacaacaccuucgugagcggcaacugcgacguggugaucggcaucgugaacaacaccguguacgacccccugcagccugagcuggacagcuucaaggaggagcuggacaaguacuucaagaaccacaccagccccgacguggaucugggcgacaucagcggcaucaacgccagcguggugaacauccagaaggagaucgaccggcugaacgagguggccaagaaccugaacgagagccugaucgaccugcaggagcugggcaaguacgagcaguacaucaaguggcccugguacaucuggcugggcuucaucgccggccugaucgccaucgugauggugaccaucaugcugugcugcaugaccagcugcuguagcugccugaagggcugcugcagcugcggcagcugcugcaaguucgacgaggacgacagcgagccagugcugaagggcgugaagcugcacuacaccugauaauaggcuggagccucgguggccuagcuucuugccccuugggccuccccccagccccuccuccccuuccugcacccguacccccguggucuuugaauaaagucugagugggcggcaaaaaaaaaaaaaaaaaaaaaaaaaaaaaaaaaaaaaaaaaaaaaaaaaaaaaaaaaaaaaaaaaaaaaaaaaaaaaaaaaaaaaaaaaaaaaaaaaaaaucuag

SEQ ID NO: 26545 - RNA, 4100 nt, Artificial Sequence
  SARS-CoV-2/Wuhan/WIV05/2019__EPI_ISL_402128 spike protein mRNA gc (1-1273)(A222V_D614G)
gggaaauaagagagaaaagaagaguaagaagaaauauaagaccccggcgccgccaccauguucguguuccuggugcugcugccccuggugagcagccagugcgugaaccugaccacccggacccagcugcccccugccuacaccaacagcuucacccggggcguguacuaccccgacaagguguuccggagcagcgugcugcacagcacccaggaccuguuccugcccuucuucagcaacgugaccugguuccacgccauccacgugagcggcaccaacggcaccaagcgguucgacaacccagugcugcccuucaacgacggcguguacuucgccagcaccgagaagucaaacaucauccggggcuggaucuucggcaccacccuggacagcaagacacagagccugcugaucgugaacaacgccaccaacguggugaucaaggugugcgaguuucaguucugcaacgaccccuuccugggcguguacuaccacaagaacaacaagagcuggauggagagcgaguuccgggucuacagcagcgcuaacaauugcaccuucgaguacgugagccagcccuuccugauggaccucgagggcaagcagggcaacuucaagaaccugcgggaguucguguucaagaacaucgauggcuacuucaagaucuacagcaagcacacccccaucaaccuggugcgggaccugccccagggauucagcgugcuggagccucugguggaccugcccaucggcaucaacaucaccagguuccagacccugcuggcccugcaccggagcuaccugacccccggcgacagcagcagcggcuggaccgccggcgccgccgccuacuacgugggcuaccugcagccacggaccuuccugcugaaguacaacgagaacggcaccaucaccgacgcaguggacugcgcccuggacccccugagcgagaccaagugcacccuaaagagcuucaccguggagaagggcaucuaccagaccagcaacuuccgggugcagcccacugagagcaucgugcgguuccccaacauuaccaaccugugucccuucggcgagguguucaacgccacccgguucgccagcguguacgccuggaaccggaagcggaucagcaacugcguggccgacuacagcgugcuguacaacagcgccagcuucagcaccuucaagugcuacggcgugagcccuaccaagcugaacgaccugugcuucaccaacguguacgccgacagcuucgugauccggggcgacgaggugcggcagaucgcucccggccagaccggcaagaucgccgacuacaacuacaagcugcccgacgacuucaccggcugcgugaucgccuggaacagcaacaaccuggacagcaaggugggcggcaacuacaacuaccuguaccggcuguuccguaagagcaaccugaagccauucgagcgggacaucagcaccgagaucuaccaggccggcagcacccccugcaacgguguggagggcuuuaacugcuacuucccccugcagagcuacggcuuccagcccaccaacggcgugggcuaccagcccuaccgggugguggugcugagcuucgagcugcugcacgcccccgccaccgugugcggcccuaaaaagagcaccaaccuggugaagaacaagugcgugaacuucaauuucaacggccugaccggcaccggcgugcugaccgagagcaacaagaaguuccugcccuuccagcaguucggccgggauaucgccgacaccaccgacgccgugcgggacccccagacccuggagauccuggacaucaccccaugcagcuucggcggcgucagcgugaucacccccggcacaaacaccagcaaccagguggcagugcuguaccagggagugaacugcaccgaggugcccguggccauccacgccgaccagcugacccccaccuggcggguguacagcaccggcagcaacguguuccagacccgggccggcugccugaucggcgccgagcacgugaacaacuccuacgagugcgacauccccaucggcgccggcaucugcgcuagcuaccagacccagaccaacagcccccggcgggcccggagcguggccagccagagcaucaucgccuacaccaugagcuuaggcgccgagaacagcguggccuacagcaacaacagcaucgccaucccuaccaacuucaccaucagcgugaccaccgagauacugcccgugagcaugaccaagaccagcguggacuguaccauguacaucugcggcgacagcaccgagugcagcaaccugcugcugcaguacggcagcuucugcacccagcugaaccgggcgcugaccggcaucgccguggagcaggacaagaacacccaagagguguucgcccaggugaagcagaucuacaagacucccccaaucaaggacuucggcggcuucaacuucagccagauccugcccgaccccagcaagcccagcaagcggagcuucaucgaggaccugcuguucaacaaggugacccuggccgacgccggcuucaucaagcaguacggcgacugccugggggauaucgccgcccgggaccugaucugcgcucagaaguucaacggccugaccgugcugcccccucugcugaccgacgagaugaucgcccaguacaccagcgcccugcuugccggcaccaucaccagcggcuggaccuucggcgccggcgccgcacugcagauccccuucgccaugcagauggccuaccgguucaacggcaucggcgugacccagaacgugcuguacgagaaccagaagcugaucgccaaccaguucaacagcgccaucggcaagauccaggacagccugagcagcaccgccagcgcccugggcaagcugcaggacguggugaaccagaacgcccaggcucugaacacccuggugaagcagcugagcagcaacuucggcgccaucagcucagugcugaaugacauccugagcaggcuggacaagguggaggccgaggugcagaucgaccggcugaucaccggccggcugcagagccugcagaccuacgugacccagcagcugauccgggccgccgagauccgggccagcgccaaccuggccgcaaccaagaugagcgagugcgugcugggccagagcaagcggguggacuuuugcggcaagggcuaccaccugaugagcuucccccagagcgccccacacggcguggucuuccuccacgugacauacgugcccgcccaggagaagaacuucaccaccgcccccgccauuugccacgacggcaaggcccacuucccccgggagggaguguucgugagcaacggcacccacugguucgugacccagcggaacuucuacgagccccagaucaucaccaccgacaacaccuucgugagcggcaacugcgacguggugaucggcaucgugaacaacaccguguacgacccccugcagccugagcuggacagcuucaaggaggagcuggacaaguacuucaagaaccacaccagccccgacguggaucugggcgacaucagcggcaucaacgcuagcguggugaacauccagaaggagaucgaccggcugaacgagguggccaagaaccugaacgagagccugaucgaccugcaggagcugggcaaguacgagcaguacaucaaguggcccugguacaucuggcugggcuucaucgccggccugaucgccaucgugauggugaccaucaugcugugcugcaugaccagcugcuguagcugccugaagggcugcugcagcugcggcagcugcugcaaguucgacgaggacgacagcgagccagugcugaagggcgugaagcugcacuacaccugauaauaggcuggagccucgguggccuagcuucuugccccuugggccuccccccagccccuccuccccuuccugcacccguacccccguggucuuugaauaaagucugagugggcggcaaaaaaaaaaaaaaaaaaaaaaaaaaaaaaaaaaaaaaaaaaaaaaaaaaaaaaaaaaaaaaaaaaaaaaaaaaaaaaaaaaaaaaaaaaaaaaaaaaaaucuag

SEQ ID NO: 26546 - RNA, 4100 nt, Artificial Sequence
  SARS-CoV-2/Wuhan/WIV05/2019__EPI_ISL_402128 spike protein mRNA gc (1-1273)(N439K_D614G)
gggaaauaagagagaaaagaagaguaagaagaaauauaagaccccggcgccgccaccauguucguguuccuggugcugcugccccuggugagcagccagugcgugaaccugaccacccggacccagcugcccccugccuacaccaacagcuucacccggggcguguacuaccccgacaagguguuccggagcagcgugcugcacagcacccaggaccuguuccugcccuucuucagcaacgugaccugguuccacgccauccacgugagcggcaccaacggcaccaagcgguucgacaacccagugcugcccuucaacgacggcguguacuucgccagcaccgagaagucaaacaucauccggggcuggaucuucggcaccacccuggacagcaagacacagagccugcugaucgugaacaacgccaccaacguggugaucaaggugugcgaguuucaguucugcaacgaccccuuccugggcguguacuaccacaagaacaacaagagcuggauggagagcgaguuccgggucuacagcagcgcuaacaauugcaccuucgaguacgugagccagcccuuccugauggaccucgagggcaagcagggcaacuucaagaaccugcgggaguucguguucaagaacaucgauggcuacuucaagaucuacagcaagcacacccccaucaaccuggugcgggaccugccccagggauucagcgcccuggagccucugguggaccugcccaucggcaucaacaucaccagguuccagacccugcuggcccugcaccggagcuaccugacccccggcgacagcagcagcggcuggaccgccggcgccgccgcauacuacgugggcuaccugcagccacggaccuuccugcugaaguacaacgagaacggcaccaucaccgacgccguggacugcgcccuggacccccugagcgagaccaagugcacccuaaagagcuucaccguggagaagggcaucuaccagaccagcaacuuccgggugcagcccacugagagcaucgugcgguuccccaacauuaccaaccugugucccuucggcgagguguucaacgccacccgguucgccagcguguacgccuggaaccggaagcggaucagcaacugcguggccgacuacagcgugcuguacaacagcgccagcuucagcaccuucaagugcuacggcgugagcccuaccaagcugaacgaccugugcuucaccaacguguacgcugacagcuucgugauccggggcgacgaggugcggcagaucgcccccggccagaccggcaagaucgccgacuacaacuacaagcugcccgacgacuucaccggcugcgugaucgccuggaacagcaagaaccuggacagcaaggugggcggcaacuacaacuaccuguaccggcuguuccguaagagcaaccugaagccauucgagcgggacaucagcaccgagaucuaccaggccggcagcacccccugcaacgguguggagggcuuuaacugcuacuucccccugcagagcuacggcuuccagcccaccaacggcgugggcuaccagcccuaccgggugguggugcugagcuucgagcugcugcacgcccccgccaccgugugcggcccuaaaaagagcaccaaccuggugaagaacaagugcgugaacuucaacuucaauggccugaccggcaccggcgugcugaccgagagcaacaagaaguuccugcccuuccagcaguucggccgggauaucgccgacaccaccgacgcagugcgggacccccagacccuggagauccuggacaucaccccaugcagcuucggcggcgugagcgucaucacccccggcacaaacaccagcaaccagguggccgugcuguaccagggagugaacugcaccgaggugcccguggccauccacgccgaccagcugacccccaccuggcggguguacagcaccggcagcaacguguuccagacccgggccggcugccugaucggcgccgagcacgugaacaacuccuacgagugcgacauccccaucggcgcuggcaucugcgccagcuaccagacccagaccaacagcccccggcgggcccggagcguggccagccagagcaucaucgccuacaccaugagcuuaggcgccgagaacagcguggccuacagcaacaacagcaucgcgaucccuaccaacuucaccaucagcgugaccaccgagauacugcccgugagcaugaccaagaccagcguggacuguaccauguacaucugcggcgacagcaccgagugcagcaaccugcugcugcaguacggcagcuucugcacccagcugaaccgggcccugaccggcaucgccguggagcaggacaagaacacccaagagguguucgcccaggugaagcagaucuacaagacucccccaaucaaggacuucggcggcuucaacuucagccagauccugcccgaccccagcaagcccagcaagcggagcuucaucgaggaccugcuguucaacaaggugacccuggccgacgccggcuucaucaagcaguacggcgacugccugggggauaucgccgcucgggaccugaucugcgcccagaaguucaacggccugaccgugcugcccccucugcugaccgacgagaugaucgcccaguacaccagcgcccugcuugccggcaccaucaccagcggcuggaccuucggcgccggcgcagcccugcagauccccuucgccaugcagauggccuaccgguucaacggcaucggcgugacccagaacgugcuguacgagaaccagaagcugaucgccaaccaguucaacagcgccaucggcaagauccaggacagccugagcagcaccgccagcgcccugggcaagcugcaggacguggugaaccagaacgcucaggcccugaacacccuggugaagcagcugagcagcaacuucggcgccaucagcucagugcugaacgacauccugagcaggcuggacaagguggaggccgaggugcagaucgaccggcugaucaccggccggcugcagagccugcagaccuacgugacccagcagcugauccgggccgccgagauccgggccagcgccaaucuggcagccaccaagaugagcgagugcgugcugggccagagcaagcggguggacuuuugcggcaagggcuaccaccugaugagcuucccccagagcgccccacacggcgugguguuccuccacgucacauacgugcccgcccaggagaagaacuucaccaccgcccccgccauuugccacgacggcaaggcucacuucccccgggagggaguguucgugagcaacggcacccacugguucgugacccagcggaacuucuacgagccccagaucaucaccaccgacaacaccuucgugagcggcaacugcgacguggugaucggcaucgugaacaacaccguguacgacccccugcagccugagcuggacagcuucaaggaggagcuggacaaguacuucaagaaccacaccagccccgacguggaucugggcgacaucagcggcaucaacgccagcguggugaacauccagaaggagaucgaccggcugaacgagguggccaagaaccugaacgagagccugaucgaccugcaggagcugggcaaguacgagcaguacaucaaguggcccugguacaucuggcugggcuucaucgccggccugaucgccaucgugauggugaccaucaugcugugcugcaugaccagcugcuguagcugccugaagggcugcugcagcugcggcagcugcugcaaguucgacgaggacgacagcgagccagugcugaagggcgugaagcugcacuacaccugauaauaggcuggagccucgguggccuagcuucuugccccuugggccuccccccagccccuccuccccuuccugcacccguacccccguggucuuugaauaaagucugagugggcggcaaaaaaaaaaaaaaaaaaaaaaaaaaaaaaaaaaaaaaaaaaaaaaaaaaaaaaaaaaaaaaaaaaaaaaaaaaaaaaaaaaaaaaaaaaaaaaaaaaaaucuag

SEQ ID NO: 26547 - RNA, 4100 nt, Artificial Sequence
  SARS-CoV-2/Wuhan/WIV05/2019__EPI_ISL_402128 spike protein mRNA gc (1-1273)(S477N_D614G)
gggaaauaagagagaaaagaagaguaagaagaaauauaagaccccggcgccgccaccauguucguguuccuggugcugcugccccuggugagcagccagugcgugaaccugaccacccggacccagcugcccccugccuacaccaacagcuucacccggggcguguacuaccccgacaagguguuccggagcagcgugcugcacagcacccaggaccuguuccugcccuucuucagcaacgugaccugguuccacgccauccacgugagcggcaccaacggcaccaagcgguucgacaacccagugcugcccuucaacgacggcguguacuucgccagcaccgagaagucaaacaucauccggggcuggaucuucggcaccacccuggacagcaagacacagagccugcugaucgugaacaacgccaccaacguggugaucaaggugugcgaguuucaguucugcaacgaccccuuccugggcguguacuaccacaagaacaacaagagcuggauggagagcgaguuccgggucuacagcagcgcuaacaauugcaccuucgaguacgugagccagcccuuccugauggaccucgagggcaagcagggcaacuucaagaaccugcgggaguucguguucaagaacaucgauggcuacuucaagaucuacagcaagcacacccccaucaaccuggugcgggaccugccccagggauucagcgcccuggagccucugguggaccugcccaucggcaucaacaucaccagguuccagacccugcuggcccugcaccggagcuaccugacccccggcgacagcagcagcggcuggaccgccggcgccgccgcauacuacgugggcuaccugcagccacggaccuuccugcugaaguacaacgagaacggcaccaucaccgacgccguggacugcgcccuggacccccugagcgagaccaagugcacccuaaagagcuucaccguggagaagggcaucuaccagaccagcaacuuccgggugcagcccacugagagcaucgugcgguuccccaacauuaccaaccugugucccuucggcgagguguucaacgccacccgguucgccagcguguacgccuggaaccggaagcggaucagcaacugcguggccgacuacagcgugcuguacaacagcgccagcuucagcaccuucaagugcuacggcgugagcccuaccaagcugaacgaccugugcuucaccaacguguacgcugacagcuucgugauccggggcgacgaggugcggcagaucgcccccggccagaccggcaagaucgccgacuacaacuacaagcugcccgacgacuucaccggcugcgugaucgccuggaacagcaacaaccuggacagcaaggugggcggcaacuacaacuaccuguaccggcuguuccguaagagcaaccugaagccauucgagcgggacaucagcaccgagaucuaccaggccggcaacacccccugcaacgguguggagggcuuuaacugcuacuucccccugcagagcuacggcuuccagcccaccaacggcgugggcuaccagcccuaccgggugguggugcugagcuucgagcugcugcacgcccccgccaccgugugcggcccuaaaaagagcaccaaccuggugaagaacaagugcgugaauuucaacuucaacggccugaccggcaccggcgugcugaccgagagcaacaagaaguuccugcccuuccagcaguucggccgggauaucgccgacaccaccgacgcagugcgggacccccagacccuggagauccuggacaucaccccaugcagcuucggcggcgugagcgucaucacccccggcacaaacaccagcaaccagguggccgugcuguaccagggagugaacugcaccgaggugcccguggccauccacgccgaccagcugacccccaccuggcggguguacagcaccggcagcaacguguuccagacccgggccggcugccugaucggcgccgagcacgugaacaacagcuacgagugcgacauccccaucggcgcuggcaucugcgccuccuaccagacccagaccaacagcccccggcgggcccggagcguggccagccagagcaucaucgccuacaccaugagcuuaggcgccgagaacagcguggccuacagcaacaacagcaucgcgaucccuaccaacuucaccaucagcgugaccaccgagauacugcccgugagcaugaccaagaccagcguggacuguaccauguacaucugcggcgacagcaccgagugcagcaaccugcugcugcaguacggcagcuucugcacccagcugaaccgggcccugaccggcaucgccguggagcaggacaagaacacccaagagguguucgcccaggugaagcagaucuacaagacucccccaaucaaggacuucggcggcuucaacuucagccagauccugcccgaccccagcaagcccagcaagcggagcuucaucgaggaccugcuguucaacaaggugacccuggccgacgccggcuucaucaagcaguacggcgacugccugggggauaucgccgcucgggaccugaucugcgcccagaaguucaacggccugaccgugcugcccccucugcugaccgacgagaugaucgcccaguacaccagcgcccugcuugccggcaccaucaccagcggcuggaccuucggcgccggcgcagcccugcagauccccuucgccaugcagauggccuaccgguucaacggcaucggcgugacccagaacgugcuguacgagaaccagaagcugaucgccaaccaguucaacagcgccaucggcaagauccaggacagccugagcagcaccgccagcgcccugggcaagcugcaggacguggugaaccagaacgcucaggcccugaacacccuggugaagcagcugagcagcaauuucggcgccaucagcagcgugcugaacgacauccugucaaggcuggacaagguggaggccgaggugcagaucgaccggcugaucaccggccggcugcagagccugcagaccuacgugacccagcagcugauccgggccgccgagauccgggccagcgccaaccuggcagccaccaagaugagcgagugcgugcugggccagagcaagcggguggacuuuugcggcaagggcuaccaccugaugagcuucccccagagcgccccacacggcgugguguuccuccacgucacauacgugcccgcccaggagaagaacuucaccaccgcccccgccauuugccacgacggcaaggcucacuucccccgggagggaguguucgugagcaacggcacccacugguucgugacccagcggaacuucuacgagccccagaucaucaccaccgacaacaccuucgugagcggcaacugcgacguggugaucggcaucgugaacaacaccguguacgacccccugcagccugagcuggacagcuucaaggaggagcuggacaaguacuucaagaaccacaccagccccgacguggaucugggcgacaucagcggcaucaacgccagcguggugaacauccagaaggagaucgaccggcugaacgagguggccaagaaccugaacgagagccugaucgaccugcaggagcugggcaaguacgagcaguacaucaaguggcccugguacaucuggcugggcuucaucgccggccugaucgccaucgugauggugaccaucaugcugugcugcaugaccagcugcuguagcugccugaagggcugcugcagcugcggcagcugcugcaaguucgacgaggacgacagcgagccagugcugaagggcgugaagcugcacuacaccugauaauaggcuggagccucgguggccuagcuucuugccccuugggccuccccccagccccuccuccccuuccugcacccguacccccguggucuuugaauaaagucugagugggcggcaaaaaaaaaaaaaaaaaaaaaaaaaaaaaaaaaaaaaaaaaaaaaaaaaaaaaaaaaaaaaaaaaaaaaaaaaaaaaaaaaaaaaaaaaaaaaaaaaaaaucuag

SEQ ID NO: 26548 - RNA, 4100 nt, Artificial Sequence
  SARS-CoV-2/Wuhan/WIV05/2019__EPI_ISL_402128 spike protein mRNA gc (1-1273)(N501Y_D614G)
gggaaauaagagagaaaagaagaguaagaagaaauauaagaccccggcgccgccaccauguucguguuccuggugcugcugccccuggugagcagccagugcgugaaccugaccacccggacccagcugcccccugccuacaccaacagcuucacccggggcguguacuaccccgacaagguguuccggagcagcgugcugcacagcacccaggaccuguuccugcccuucuucagcaacgugaccugguuccacgccauccacgugagcggcaccaacggcaccaagcgguucgacaacccagugcugcccuucaacgacggcguguacuucgccagcaccgagaagucaaacaucauccggggcuggaucuucggcaccacccuggacagcaagacacagagccugcugaucgugaacaacgccaccaacguggugaucaaggugugcgaguuucaguucugcaacgaccccuuccugggcguguacuaccacaagaacaacaagagcuggauggagagcgaguuccgggucuacagcagcgcuaacaauugcaccuucgaguacgugagccagcccuuccugauggaccucgagggcaagcagggcaacuucaagaaccugcgggaguucguguucaagaacaucgauggcuacuucaagaucuacagcaagcacacccccaucaaccuggugcgggaccugccccagggauucagcgcccuggagccucugguggaccugcccaucggcaucaacaucaccagguuccagacccugcuggcccugcaccggagcuaccugacccccggcgacagcagcagcggcuggaccgccggcgccgccgcauacuacgugggcuaccugcagccacggaccuuccugcugaaguacaacgagaacggcaccaucaccgacgccguggacugcgcccuggacccccugagcgagaccaagugcacccuaaagagcuucaccguggagaagggcaucuaccagaccagcaacuuccgggugcagcccacugagagcaucgugcgguuccccaacauuaccaaccugugucccuucggcgagguguucaacgccacccgguucgccagcguguacgccuggaaccggaagcggaucagcaacugcguggccgacuacagcgugcuguacaacagcgccagcuucagcaccuucaagugcuacggcgugagcccuaccaagcugaacgaccugugcuucaccaacguguacgcugacagcuucgugauccggggcgacgaggugcggcagaucgcccccggccagaccggcaagaucgccgacuacaacuacaagcugcccgacgacuucaccggcugcgugaucgccuggaacagcaacaaccuggacagcaaggugggcggcaacuacaacuaccuguaccggcuguuccguaagagcaaccugaagccauucgagcgggacaucagcaccgagaucuaccaggccggcagcacccccugcaacgguguggagggcuuuaacugcuacuucccccugcagagcuacggcuuccagcccaccuacggcgugggcuaccagcccuaccgggugguggugcugagcuucgagcugcugcacgcccccgccaccgugugcggcccuaaaaagagcaccaaccuggugaagaacaagugcgugaacuucaacuucaauggccugaccggcaccggcgugcugaccgagagcaacaagaaguuccugcccuuccagcaguucggccgggauaucgccgacaccaccgacgcagugcgggacccccagacccuggagauccuggacaucaccccaugcagcuucggcggcgugagcgucaucacccccggcacaaacaccagcaaccagguggccgugcuguaccagggagugaacugcaccgaggugcccguggccauccacgccgaccagcugacccccaccuggcggguguacagcaccggcagcaacguguuccagacccgggccggcugccugaucggcgccgagcacgugaacaacuccuacgagugcgacauccccaucggcgcuggcaucugcgccagcuaccagacccagaccaacagcccccggcgggcccggagcguggccagccagagcaucaucgccuacaccaugagcuuaggcgccgagaacagcguggccuacagcaacaacagcaucgcgaucccuaccaacuucaccaucagcgugaccaccgagauacugcccgugagcaugaccaagaccagcguggacuguaccauguacaucugcggcgacagcaccgagugcagcaaccugcugcugcaguacggcagcuucugcacccagcugaaccgggcccugaccggcaucgccguggagcaggacaagaacacccaagagguguucgcccaggugaagcagaucuacaagacucccccaaucaaggacuucggcggcuucaacuucagccagauccugcccgaccccagcaagcccagcaagcggagcuucaucgaggaccugcuguucaacaaggugacccuggccgacgccggcuucaucaagcaguacggcgacugccugggggauaucgccgcucgggaccugaucugcgcccagaaguucaacggccugaccgugcugcccccucugcugaccgacgagaugaucgcccaguacaccagcgcccugcuugccggcaccaucaccagcggcuggaccuucggcgccggcgcagcccugcagauccccuucgccaugcagauggccuaccgguucaacggcaucggcgugacccagaacgugcuguacgagaaccagaagcugaucgccaaccaguucaacagcgccaucggcaagauccaggacagccugagcagcaccgccagcgcccugggcaagcugcaggacguggugaaccagaacgcucaggcccugaacacccuggugaagcagcugagcagcaacuucggcgccaucagcucagugcugaacgacauccugagcaggcuggacaagguggaggccgaggugcagaucgaccggcugaucaccggccggcugcagagccugcagaccuacgugacccagcagcugauccgggccgccgagauccgggccagcgccaaucuggcagccaccaagaugagcgagugcgugcugggccagagcaagcggguggacuuuugcggcaagggcuaccaccugaugagcuucccccagagcgccccacacggcgugguguuccuccacgucacauacgugcccgcccaggagaagaacuucaccaccgcccccgccauuugccacgacggcaaggcucacuucccccgggagggaguguucgugagcaacggcacccacugguucgugacccagcggaacuucuacgagccccagaucaucaccaccgacaacaccuucgugagcggcaacugcgacguggugaucggcaucgugaacaacaccguguacgacccccugcagccugagcuggacagcuucaaggaggagcuggacaaguacuucaagaaccacaccagccccgacguggaucugggcgacaucagcggcaucaacgccagcguggugaacauccagaaggagaucgaccggcugaacgagguggccaagaaccugaacgagagccugaucgaccugcaggagcugggcaaguacgagcaguacaucaaguggcccugguacaucuggcugggcuucaucgccggccugaucgccaucgugauggugaccaucaugcugugcugcaugaccagcugcuguagcugccugaagggcugcugcagcugcggcagcugcugcaaguucgacgaggacgacagcgagccagugcugaagggcgugaagcugcacuacaccugauaauaggcuggagccucgguggccuagcuucuugccccuugggccuccccccagccccuccuccccuuccugcacccguacccccguggucuuugaauaaagucugagugggcggcaaaaaaaaaaaaaaaaaaaaaaaaaaaaaaaaaaaaaaaaaaaaaaaaaaaaaaaaaaaaaaaaaaaaaaaaaaaaaaaaaaaaaaaaaaaaaaaaaaaaucuag

SEQ ID NO: 26549 - RNA, 4094 nt, Artificial Sequence
  SARS-CoV-2/Wuhan/WIV05/2019__EPI_ISL_402128 spike protein mRNA gc (1-1273)(H69del_V70del_D614G)
gggaaauaagagagaaaagaagaguaagaagaaauauaagaccccggcgccgccaccauguucguguuccuggugcugcugccccuggugagcagccagugcgugaaccugaccacccggacccagcugcccccugccuacaccaacagcuucacccggggcguguacuaccccgacaagguguuccggagcagcgugcugcacagcacccaggaccuguuccugcccuucuucagcaacgugaccugguuccacgccaucagcggcaccaacggcaccaagcgguucgacaacccagugcugcccuucaacgacggcguguacuucgccagcaccgagaagucaaacaucauccggggcuggaucuucggcaccacccuggacagcaagacacagagccugcugaucgugaacaacgccaccaacguggugaucaaggugugcgaguuucaguucugcaacgaccccuuccugggcguguacuaccacaagaacaacaagagcuggauggagagcgaguuccggguguacagcagcgcuaacaauugcaccuucgaguacgucagccagcccuuccugauggaccucgagggcaagcagggcaacuucaagaaccugcgggaguucguguucaagaacaucgauggcuacuucaagaucuacagcaagcacacccccaucaaccuggugcgggaccugccccagggauucagcgcccuggagccucugguggaccugcccaucggcaucaacaucaccagguuccagacccugcuggcccugcaccggagcuaccugacccccggcgacagcagcagcggcuggaccgccggcgccgccgcauacuacgugggcuaccugcagccacggaccuuccugcugaaguacaacgagaacggcaccaucaccgacgccguggacugcgcccuggacccccugagcgagaccaagugcacccuaaagagcuucaccguggagaagggcaucuaccagaccagcaacuuccgggugcagcccacugagagcaucgugcgguuccccaacauuaccaaccugugucccuucggcgagguguucaacgccacccgguucgccagcguguacgccuggaaccggaagcggaucagcaacugcguggccgacuacagcgugcuguacaacagcgccagcuucagcaccuucaagugcuacggcgugagcccuaccaagcugaacgaccugugcuucaccaacguguacgcugacagcuucgugauccggggcgacgaggugcggcagaucgcccccggccagaccggcaagaucgccgacuacaacuacaagcugcccgacgacuucaccggcugcgugaucgccuggaacagcaacaaccuggacagcaaggugggcggcaacuacaacuaccuguaccggcuguuccguaagagcaaccugaagccauucgagcgggacaucagcaccgagaucuaccaggccggcagcacccccugcaacgguguggagggcuuuaacugcuacuucccccugcagagcuacggcuuccagcccaccaacggcgugggcuaccagcccuaccgggugguggugcugagcuucgagcugcugcacgcccccgccaccgugugcggcccuaaaaagagcaccaaccuggugaagaacaagugcgugaacuucaauuucaacggccugaccggcaccggcgugcugaccgagagcaacaagaaguuccugcccuuccagcaguucggccgggauaucgccgacaccaccgacgcagugcgggacccccagacccuggagauccuggacaucaccccaugcagcuucggcggcgugagcgugaucacccccggcacaaacaccagcaaccaggucgccgugcuguaccagggagugaacugcaccgaggugcccguggccauccacgccgaccagcugacccccaccuggcggguguacagcaccggcagcaacguguuccagacccgggccggcugccugaucggcgccgagcacgugaacaacuccuacgagugcgacauccccaucggcgcuggcaucugcgccagcuaccagacccagaccaacagcccccggcgggcccggagcguggccagccagagcaucaucgccuacaccaugagcuuaggcgccgagaacagcguggccuacagcaacaacagcaucgcgaucccuaccaacuucaccaucagcgugaccaccgagauacugcccgugagcaugaccaagaccagcguggacuguaccauguacaucugcggcgacagcaccgagugcagcaaccugcugcugcaguacggcagcuucugcacccagcugaaccgggcccugaccggcaucgccguggagcaggacaagaacacccaagagguguucgcccaggugaagcagaucuacaagacucccccaaucaaggacuucggcggcuucaacuucagccagauccugcccgaccccagcaagcccagcaagcggagcuucaucgaggaccugcuguucaacaaggugacccuggccgacgccggcuucaucaagcaguacggcgacugccugggggauaucgccgcucgggaccugaucugcgcccagaaguucaacggccugaccgugcugcccccucugcugaccgacgagaugaucgcccaguacaccagcgcccugcuugccggcaccaucaccagcggcuggaccuucggcgccggcgcagcccugcagauccccuucgccaugcagauggccuaccgguucaacggcaucggcgugacccagaacgugcuguacgagaaccagaagcugaucgccaaccaguucaacagcgccaucggcaagauccaggacagccugagcagcaccgccagcgcccugggcaagcugcaggacguggugaaccagaacgcucaggcccugaacacccuggugaagcagcugagcagcaacuucggcgccaucagcucagugcugaaugacauccugagcaggcuggacaagguggaggccgaggugcagaucgaccggcugaucaccggccggcugcagagccugcagaccuacgugacccagcagcugauccgggccgccgagauccgggccagcgccaaccuggcagccaccaagaugagcgagugcgugcugggccagagcaagcggguggacuuuugcggcaagggcuaccaccugaugagcuucccccagagcgccccacacggcgugguguuccuccacgugacauacguccccgcccaggagaagaacuucaccaccgcccccgccauuugccacgacggcaaggcucacuucccccgggagggaguguucgugagcaacggcacccacugguucgugacccagcggaacuucuacgagccccagaucaucaccaccgacaacaccuucgugagcggcaacugcgacguggugaucggcaucgugaacaacaccguguacgacccccugcagccugagcuggacagcuucaaggaggagcuggacaaguacuucaagaaccacaccagccccgacguggaucugggcgacaucagcggcaucaacgccagcguggugaacauccagaaggagaucgaccggcugaacgagguggccaagaaccugaacgagagccugaucgaccugcaggagcugggcaaguacgagcaguacaucaaguggcccugguacaucuggcugggcuucaucgccggccugaucgccaucgugauggugaccaucaugcugugcugcaugaccagcugcuguagcugccugaagggcugcugcagcugcggcagcugcugcaaguucgacgaggacgacagcgagccagugcugaagggcgugaagcugcacuacaccugauaauaggcuggagccucgguggccuagcuucuugccccuugggccuccccccagccccuccuccccuuccugcacccguacccccguggucuuugaauaaagucugagugggcggcaaaaaaaaaaaaaaaaaaaaaaaaaaaaaaaaaaaaaaaaaaaaaaaaaaaaaaaaaaaaaaaaaaaaaaaaaaaaaaaaaaaaaaaaaaaaaaaaaaaaucuag

SEQ ID NO: 26550 - RNA, 4100 nt, Artificial Sequence
  SARS-CoV-2/Wuhan/WIV05/2019__EPI_ISL_402128 spike protein mRNA gc (1-1273)(Y453F_D614G)
gggaaauaagagagaaaagaagaguaagaagaaauauaagaccccggcgccgccaccauguucguguuccuggugcugcugccccuggugagcagccagugcgugaaccugaccacccggacccagcugcccccugccuacaccaacagcuucacccggggcguguacuaccccgacaagguguuccggagcagcgugcugcacagcacccaggaccuguuccugcccuucuucagcaacgugaccugguuccacgccauccacgugagcggcaccaacggcaccaagcgguucgacaacccagugcugcccuucaacgacggcguguacuucgccagcaccgagaagucaaacaucauccggggcuggaucuucggcaccacccuggacagcaagacacagagccugcugaucgugaacaacgccaccaacguggugaucaaggugugcgaguuucaguucugcaacgaccccuuccugggcguguacuaccacaagaacaacaagagcuggauggagagcgaguuccgggucuacagcagcgcuaacaauugcaccuucgaguacgugagccagcccuuccugauggaccucgagggcaagcagggcaacuucaagaaccugcgggaguucguguucaagaacaucgauggcuacuucaagaucuacagcaagcacacccccaucaaccuggugcgggaccugccccagggauucagcgcccuggagccucugguggaccugcccaucggcaucaacaucaccagguuccagacccugcuggcccugcaccggagcuaccugacccccggcgacagcagcagcggcuggaccgccggcgccgccgcauacuacgugggcuaccugcagccacggaccuuccugcugaaguacaacgagaacggcaccaucaccgacgccguggacugcgcccuggacccccugagcgagaccaagugcacccuaaagagcuucaccguggagaagggcaucuaccagaccagcaacuuccgggugcagcccacugagagcaucgugcgguuccccaacauuaccaaccugugucccuucggcgagguguucaacgccacccgguucgccagcguguacgccuggaaccggaagcggaucagcaacugcguggccgacuacagcgugcuguacaacagcgccagcuucagcaccuucaagugcuacggcgugagcccuaccaagcugaacgaccugugcuucaccaacguguacgcugacagcuucgugauccggggcgacgaggugcggcagaucgcccccggccagaccggcaagaucgccgacuacaacuacaagcugcccgacgacuucaccggcugcgugaucgccuggaacagcaacaaccuggacagcaaggugggcggcaacuacaacuaccuguuccggcuguuccguaagagcaaccugaagccauuugagcgggacaucagcaccgagaucuaccaggccggcagcacccccugcaacgguguggagggcuucaacugcuacuucccccugcagagcuacggcuuccagcccaccaacggcgugggcuaccagcccuaccgggugguggugcugagcuucgagcugcugcacgcccccgccaccgugugcggcccuaaaaagagcaccaaccuggugaagaacaagugcgugaacuucaauuucaacggccugaccggcaccggcgugcugaccgagagcaacaagaaguuccugcccuuccagcaguucggccgggauaucgccgacaccaccgacgcagugcgggacccccagacccuggagauccuggacaucaccccaugcagcuucggcggcgugagcgucaucacccccggcacaaacaccagcaaccagguggccgugcuguaccagggagugaacugcaccgaggugcccguggccauccacgccgaccagcugacccccaccuggcggguguacagcaccggcagcaacguguuccagacccgggccggcugccugaucggcgccgagcacgugaacaacuccuacgagugcgacauccccaucggcgcuggcaucugcgccagcuaccagacccagaccaacagcccccggcgggcccggagcguggccagccagagcaucaucgccuacaccaugagcuuaggcgccgagaacagcguggccuacagcaacaacagcaucgcgaucccuaccaacuucaccaucagcgugaccaccgagauacugcccgugagcaugaccaagaccagcguggacuguaccauguacaucugcggcgacagcaccgagugcagcaaccugcugcugcaguacggcagcuucugcacccagcugaaccgggcccugaccggcaucgccguggagcaggacaagaacacccaagagguguucgcccaggugaagcagaucuacaagacucccccaaucaaggacuucggcggcuucaacuucagccagauccugcccgaccccagcaagcccagcaagcggagcuucaucgaggaccugcuguucaacaaggugacccuggccgacgccggcuucaucaagcaguacggcgacugccugggggauaucgccgcucgggaccugaucugcgcccagaaguucaacggccugaccgugcugcccccucugcugaccgacgagaugaucgcccaguacaccagcgcccugcuugccggcaccaucaccagcggcuggaccuucggcgccggcgcagcccugcagauccccuucgccaugcagauggccuaccgguucaacggcaucggcgugacccagaacgugcuguacgagaaccagaagcugaucgccaaccaguucaacagcgccaucggcaagauccaggacagccugagcagcaccgccagcgcccugggcaagcugcaggacguggugaaccagaacgcucaggcccugaacacccuggugaagcagcugagcagcaacuuuggcgccaucagcucagugcugaaugacauccugagcaggcuggacaagguggaggccgaggugcagaucgaccggcugaucaccggccggcugcagagccugcagaccuacgugacccagcagcugauccgggccgccgagauccgggccagcgccaaccuggcagccaccaagaugagcgagugcgugcugggccagagcaagcggguggacuucugcggcaagggcuaccaccugaugagcuucccccagagcgccccacacggcgugguguuccuccacgucacauacgugcccgcccaggagaagaacuucaccaccgcccccgccauuugccacgacggcaaggcucacuucccccgggagggaguguucgugagcaacggcacccacugguucgugacccagcggaacuucuacgagccccagaucaucaccaccgacaacaccuucgugagcggcaacugcgacguggugaucggcaucgugaacaacaccguguacgacccccugcagccugagcuggacagcuucaaggaggagcuggacaaguacuucaagaaccacaccagccccgacguggaucugggcgacaucagcggcaucaacgccagcguggugaacauccagaaggagaucgaccggcugaacgagguggccaagaaccugaacgagagccugaucgaccugcaggagcugggcaaguacgagcaguacaucaaguggcccugguacaucuggcugggcuucaucgccggccugaucgccaucgugauggugaccaucaugcugugcugcaugaccagcugcuguagcugccugaagggcugcugcagcugcggcagcugcugcaaguucgacgaggacgacagcgagccagugcugaagggcgugaagcugcacuacaccugauaauaggcuggagccucgguggccuagcuucuugccccuugggccuccccccagccccuccuccccuuccugcacccguacccccguggucuuugaauaaagucugagugggcggcaaaaaaaaaaaaaaaaaaaaaaaaaaaaaaaaaaaaaaaaaaaaaaaaaaaaaaaaaaaaaaaaaaaaaaaaaaaaaaaaaaaaaaaaaaaaaaaaaaaaucuag

SEQ ID NO: 26551 - RNA, 4100 nt, Artificial Sequence
  SARS-CoV-2/Wuhan/WIV05/2019__EPI_ISL_402128 spike protein mRNA gc (1-1273)(D614G_I692V)
gggaaauaagagagaaaagaagaguaagaagaaauauaagaccccggcgccgccaccauguucguguuccuggugcugcugccccuggugagcagccagugcgugaaccugaccacccggacccagcugcccccugccuacaccaacagcuucacccggggcguguacuaccccgacaagguguuccggagcagcgugcugcacagcacccaggaccuguuccugcccuucuucagcaacgugaccugguuccacgccauccacgugagcggcaccaacggcaccaagcgguucgacaacccagugcugcccuucaacgacggcguguacuucgccagcaccgagaagucaaacaucauccggggcuggaucuucggcaccacccuggacagcaagacacagagccugcugaucgugaacaacgccaccaacguggugaucaaggugugcgaguuucaguucugcaacgaccccuuccugggcguguacuaccacaagaacaacaagagcuggauggagagcgaguuccgggucuacagcagcgcuaacaauugcaccuucgaguacgugagccagcccuuccugauggaccucgagggcaagcagggcaacuucaagaaccugcgggaguucguguucaagaacaucgauggcuacuucaagaucuacagcaagcacacccccaucaaccuggugcgggaccugccccagggauucagcgcccuggagccucugguggaccugcccaucggcaucaacaucaccagguuccagacccugcuggcccugcaccggagcuaccugacccccggcgacagcagcagcggcuggaccgccggcgccgccgcauacuacgugggcuaccugcagccacggaccuuccugcugaaguacaacgagaacggcaccaucaccgacgccguggacugcgcccuggacccccugagcgagaccaagugcacccuaaagagcuucaccguggagaagggcaucuaccagaccagcaacuuccgggugcagcccacugagagcaucgugcgguuccccaacauuaccaaccugugucccuucggcgagguguucaacgccacccgguucgccagcguguacgccuggaaccggaagcggaucagcaacugcguggccgacuacagcgugcuguacaacagcgccagcuucagcaccuucaagugcuacggcgugagcccuaccaagcugaacgaccugugcuucaccaacguguacgcugacagcuucgugauccggggcgacgaggugcggcagaucgcccccggccagaccggcaagaucgccgacuacaacuacaagcugcccgacgacuucaccggcugcgugaucgccuggaacagcaacaaccuggacagcaaggugggcggcaacuacaacuaccuguaccggcuguuccguaagagcaaccugaagccauucgagcgggacaucagcaccgagaucuaccaggccggcagcacccccugcaacgguguggagggcuuuaacugcuacuucccccugcagagcuacggcuuccagcccaccaacggcgugggcuaccagcccuaccgggugguggugcugagcuucgagcugcugcacgcccccgccaccgugugcggcccuaaaaagagcaccaaccuggugaagaacaagugcgugaacuucaauuucaacggccugaccggcaccggcgugcugaccgagagcaacaagaaguuccugcccuuccagcaguucggccgggauaucgccgacaccaccgacgcagugcgggacccccagacccuggagauccuggacaucaccccaugcagcuucggcggcgugagcgucaucacccccggcacaaacaccagcaaccagguggccgugcuguaccagggagugaacugcaccgaggugcccguggccauccacgccgaccagcugacccccaccuggcggguguacagcaccggcagcaacguguuccagacccgggccggcugccugaucggcgccgagcacgugaacaacuccuacgagugcgacauccccaucggcgcuggcaucugcgccagcuaccagacccagaccaacagcccccggcgggcccggagcguggccagccagagcgugaucgccuacaccaugagcuuaggcgccgagaacagcguggccuacagcaacaacagcaucgcgaucccuaccaacuucaccaucagcgugaccaccgagauccugcccgugagcaugaccaagaccagcguggacuguaccauguacauaugcggcgacagcaccgagugcagcaaccugcugcugcaguacggcagcuucugcacccagcugaaccgggcccugaccggcaucgccguggagcaggacaagaacacccaagagguguucgcccaggugaagcagaucuacaagacucccccaaucaaggacuucggcggcuucaacuucagccagauccugcccgaccccagcaagcccagcaagcggagcuucaucgaggaccugcuguucaacaaggugacccuggccgacgccggcuucaucaagcaguacggcgacugccugggggauaucgccgcucgggaccugaucugcgcccagaaguucaacggccugaccgugcugcccccucugcugaccgacgagaugaucgcccaguacaccagcgcccugcuugccggcaccaucaccagcggcuggaccuucggcgccggcgcagcccugcagauccccuucgccaugcagauggccuaccgguucaacggcaucggcgugacccagaacgugcuguacgagaaccagaagcugaucgccaaccaguucaacagcgccaucggcaagauccaggacagccugagcagcaccgccagcgcccugggcaagcugcaggacguggugaaccagaacgcucaggcccugaacacccuggugaagcagcugagcagcaacuucggcgccaucagcucagugcugaaugacauccugagcaggcuggacaagguggaggccgaggugcagaucgaccggcugaucaccggccggcugcagagccugcagaccuacgugacccagcagcugauccgggccgccgagauccgggccagcgccaaccuggcagccaccaagaugagcgagugcgugcugggccagagcaagcggguggacuuuugcggcaagggcuaccaccugaugagcuucccccagagcgccccacacggcguggucuuccuccacgugacauacgugcccgcccaggagaagaacuucaccaccgcccccgccaucugccacgacggcaaggcucacuucccccgggagggaguguucgugagcaacggcacccacugguucgugacccagcggaacuucuacgagccccagauuaucaccaccgacaacaccuucgugagcggcaacugcgacguggugaucggcaucgugaacaacaccguguacgacccccugcagccugagcuggacagcuucaaggaggagcuggacaaguacuucaagaaccacaccagccccgacguggaucugggcgacaucagcggcaucaacgccagcguggugaacauccagaaggagaucgaccggcugaacgagguggccaagaaccugaacgagagccugaucgaccugcaggagcugggcaaguacgagcaguacaucaaguggcccugguacaucuggcugggcuucaucgccggccugaucgccaucgugauggugaccaucaugcugugcugcaugaccagcugcuguagcugccugaagggcugcugcagcugcggcagcugcugcaaguucgacgaggacgacagcgagccagugcugaagggcgugaagcugcacuacaccugauaauaggcuggagccucgguggccuagcuucuugccccuugggccuccccccagccccuccuccccuuccugcacccguacccccguggucuuugaauaaagucugagugggcggcaaaaaaaaaaaaaaaaaaaaaaaaaaaaaaaaaaaaaaaaaaaaaaaaaaaaaaaaaaaaaaaaaaaaaaaaaaaaaaaaaaaaaaaaaaaaaaaaaaaaucuag

SEQ ID NO: 26552 - RNA, 4100 nt, Artificial Sequence
  SARS-CoV-2/Wuhan/WIV05/2019__EPI_ISL_402128 spike protein mRNA gc (1-1273)(D614G_M1229I)
gggaaauaagagagaaaagaagaguaagaagaaauauaagaccccggcgccgccaccauguucguguuccuggugcugcugccccuggugagcagccagugcgugaaccugaccacccggacccagcugcccccugccuacaccaacagcuucacccggggcguguacuaccccgacaagguguuccggagcagcgugcugcacagcacccaggaccuguuccugcccuucuucagcaacgugaccugguuccacgccauccacgugagcggcaccaacggcaccaagcgguucgacaacccagugcugcccuucaacgacggcguguacuucgccagcaccgagaagucaaacaucauccggggcuggaucuucggcaccacccuggacagcaagacacagagccugcugaucgugaacaacgccaccaacguggugaucaaggugugcgaguuucaguucugcaacgaccccuuccugggcguguacuaccacaagaacaacaagagcuggauggagagcgaguuccgggucuacagcagcgcuaacaauugcaccuucgaguacgugagccagcccuuccugauggaccucgagggcaagcagggcaacuucaagaaccugcgggaguucguguucaagaacaucgauggcuacuucaagaucuacagcaagcacacccccaucaaccuggugcgggaccugccccagggauucagcgcccuggagccucugguggaccugcccaucggcaucaacaucaccagguuccagacccugcuggcccugcaccggagcuaccugacccccggcgacagcagcagcggcuggaccgccggcgccgccgcauacuacgugggcuaccugcagccacggaccuuccugcugaaguacaacgagaacggcaccaucaccgacgccguggacugcgcccuggacccccugagcgagaccaagugcacccuaaagagcuucaccguggagaagggcaucuaccagaccagcaacuuccgggugcagcccacugagagcaucgugcgguuccccaacauuaccaaccugugucccuucggcgagguguucaacgccacccgguucgccagcguguacgccuggaaccggaagcggaucagcaacugcguggccgacuacagcgugcuguacaacagcgccagcuucagcaccuucaagugcuacggcgugagcccuaccaagcugaacgaccugugcuucaccaacguguacgcugacagcuucgugauccggggcgacgaggugcggcagaucgcccccggccagaccggcaagaucgccgacuacaacuacaagcugcccgacgacuucaccggcugcgugaucgccuggaacagcaacaaccuggacagcaaggugggcggcaacuacaacuaccuguaccggcuguuccguaagagcaaccugaagccauucgagcgggacaucagcaccgagaucuaccaggccggcagcacccccugcaacgguguggagggcuuuaacugcuacuucccccugcagagcuacggcuuccagcccaccaacggcgugggcuaccagcccuaccgggugguggugcugagcuucgagcugcugcacgcccccgccaccgugugcggcccuaaaaagagcaccaaccuggugaagaacaagugcgugaacuucaauuucaacggccugaccggcaccggcgugcugaccgagagcaacaagaaguuccugcccuuccagcaguucggccgggauaucgccgacaccaccgacgcagugcgggacccccagacccuggagauccuggacaucaccccaugcagcuucggcggcgugagcgucaucacccccggcacaaacaccagcaaccagguggccgugcuguaccagggagugaacugcaccgaggugcccguggccauccacgccgaccagcugacccccaccuggcggguguacagcaccggcagcaacguguuccagacccgggccggcugccugaucggcgccgagcacgugaacaacuccuacgagugcgacauccccaucggcgcuggcaucugcgccagcuaccagacccagaccaacagcccccggcgggcccggagcguggccagccagagcaucaucgccuacaccaugagcuuaggcgccgagaacagcguggccuacagcaacaacagcaucgcgaucccuaccaacuucaccaucagcgugaccaccgagauacugcccgugagcaugaccaagaccagcguggacuguaccauguacaucugcggcgacagcaccgagugcagcaaccugcugcugcaguacggcagcuucugcacccagcugaaccgggcccugaccggcaucgccguggagcaggacaagaacacccaagagguguucgcccaggugaagcagaucuacaagacucccccaaucaaggacuucggcggcuucaacuucagccagauccugcccgaccccagcaagcccagcaagcggagcuucaucgaggaccugcuguucaacaaggugacccuggccgacgccggcuucaucaagcaguacggcgacugccugggggauaucgccgcucgggaccugaucugcgcccagaaguucaacggccugaccgugcugcccccucugcugaccgacgagaugaucgcccaguacaccagcgcccugcuugccggcaccaucaccagcggcuggaccuucggcgccggcgcagcccugcagauccccuucgccaugcagauggccuaccgguucaacggcaucggcgugacccagaacgugcuguacgagaaccagaagcugaucgccaaccaguucaacagcgccaucggcaagauccaggacagccugagcagcaccgccagcgcccugggcaagcugcaggacguggugaaccagaacgcucaggcccugaacacccuggugaagcagcugagcagcaacuucggcgccaucagcucagugcugaaugacauccugagcaggcuggacaagguggaggccgaggugcagaucgaccggcugaucaccggccggcugcagagccugcagaccuacgugacccagcagcugauccgggccgccgagauccgggccagcgccaaccuggcagccaccaagaugagcgagugcgugcugggccagagcaagcggguggacuuuugcggcaagggcuaccaccugaugagcuucccccagagcgccccacacggcgugguguuccuccacgucacauacgugcccgcccaggagaagaacuucaccaccgcccccgccauuugccacgacggcaaggcucacuucccccgggagggaguguucgugagcaacggcacccacugguucgugacccagcggaacuucuacgagccccagaucaucaccaccgacaacaccuucgugagcggcaacugcgacguggugaucggcaucgugaacaacaccguguacgacccccugcagccugagcuggacagcuucaaggaggagcuggacaaguacuucaagaaccacaccagccccgacguggaucugggcgacaucagcggcaucaacgccagcguggugaacauccagaaggagaucgaccggcugaacgagguggccaagaaccugaacgagagccugaucgaccugcaggagcugggcaaguacgagcaguacaucaaguggcccugguacaucuggcugggcuucaucgccggccugaucgccaucgugaucgugaccaucaugcugugcugcaugaccagcugcuguagcugccugaagggcugcugcagcugcggcagcugcugcaaguucgacgaggacgacagcgagccagugcugaagggcgugaagcugcacuacaccugauaauaggcuggagccucgguggccuagcuucuugccccuugggccuccccccagccccuccuccccuuccugcacccguacccccguggucuuugaauaaagucugagugggcggcaaaaaaaaaaaaaaaaaaaaaaaaaaaaaaaaaaaaaaaaaaaaaaaaaaaaaaaaaaaaaaaaaaaaaaaaaaaaaaaaaaaaaaaaaaaaaaaaaaaaucuag

SEQ ID NO: 26553 - RNA, 4094 nt, Artificial Sequence
  SARS-CoV-2/Wuhan/WIV05/2019__EPI_ISL_402128 spike protein mRNA gc (1-1273)(H69del_V70del_A222V_Y453F_S477N_D614G_I692V)
gggaaauaagagagaaaagaagaguaagaagaaauauaagaccccggcgccgccaccauguucguguuccuggugcugcugccccuggugagcagccagugcgugaaccugaccacccggacccagcugcccccugccuacaccaacagcuucacccggggcguguacuaccccgacaagguguuccggagcagcgugcugcacagcacccaggaccuguuccugcccuucuucagcaacgugaccugguuccacgccaucagcggcaccaacggcaccaagcgguucgacaacccagugcugcccuucaacgacggcguguacuucgccagcaccgagaagucaaacaucauccggggcuggaucuucggcaccacccuggacagcaagacacagagccugcugaucgugaacaacgccaccaacguggugaucaaggugugcgaguuucaguucugcaacgaccccuuccugggcguguacuaccacaagaacaacaagagcuggauggagagcgaguuccggguguacagcagcgcuaacaauugcaccuucgaguacgucagccagcccuuccugauggaccucgagggcaagcagggcaacuucaagaaccugcgggaguucguguucaagaacaucgauggcuacuucaagaucuacagcaagcacacccccaucaaccuggugcgggaccugccccagggauucagcgugcuggagccucugguggaccugcccaucggcaucaacaucaccagguuccagacccugcuggcccugcaccggagcuaccugacccccggcgacagcagcagcggcuggaccgccggcgccgccgccuacuacgugggcuaccugcagccacggaccuuccugcugaaguacaacgagaacggcaccaucaccgacgcaguggacugcgcccuggacccccugagcgagaccaagugcacccuaaagagcuucaccguggagaagggcaucuaccagaccagcaacuuccgggugcagcccacugagagcaucgugcgguuccccaacauuaccaaccugugucccuucggcgagguguucaacgccacccgguucgccagcguguacgccuggaaccggaagcggaucagcaacugcguggccgacuacagcgugcuguacaacagcgccagcuucagcaccuucaagugcuacggcgugagcccuaccaagcugaacgaccugugcuucaccaacguguacgccgacagcuucgugauccggggcgacgaggugcggcagaucgcucccggccagaccggcaagaucgccgacuacaacuacaagcugcccgacgacuucaccggcugcgugaucgccuggaacagcaacaaccuggacagcaaggugggcggcaacuacaacuaccuguuccggcuguuccguaagagcaaccugaagccauuugagcgggacaucagcaccgagaucuaccaggccggcaacacccccugcaacgguguggagggcuucaacugcuacuucccccugcagagcuacggcuuccagcccaccaacggcgugggcuaccagcccuaccgggugguggugcugagcuucgagcugcugcacgcccccgccaccgugugcggcccuaaaaagagcaccaaccuggugaagaacaagugcgugaauuucaacuucaacggccugaccggcaccggcgugcugaccgagagcaacaagaaguuccugcccuuccagcaguucggccgggauaucgccgacaccaccgacgccgugcgggacccccagacccuggagauccuggacaucaccccaugcagcuucggcggcgugagcgucaucacccccggcacaaacaccagcaaccagguggcagugcuguaccagggagugaacugcaccgaggugcccguggccauccacgccgaccagcugacccccaccuggcggguguacagcaccggcagcaacguguuccagacccgggccggcugccugaucggcgccgagcacgugaacaacagcuacgagugcgacauccccaucggcgccggcaucugcgcuuccuaccagacccagaccaacagcccccggcgggcccggagcguggccagccagagcgugaucgccuacaccaugagcuuaggcgccgagaacagcguggccuacagcaacaacagcaucgccaucccuaccaacuucaccaucagcgugaccaccgagauccugcccgugagcaugaccaagaccagcguggacuguaccauguacauaugcggcgacagcaccgagugcagcaaccugcugcugcaguacggcagcuucugcacccagcugaaccgggcgcugaccggcaucgccguggagcaggacaagaacacccaagagguguucgcccaggugaagcagaucuacaagacucccccaaucaaggacuucggcggcuucaacuucagccagauccugcccgaccccagcaagcccagcaagcggagcuucaucgaggaccugcuguucaacaaggugacccuggccgacgccggcuucaucaagcaguacggcgacugccugggggauaucgccgcccgggaccugaucugcgcucagaaguucaacggccugaccgugcugcccccucugcugaccgacgagaugaucgcccaguacaccagcgcccugcuugccggcaccaucaccagcggcuggaccuucggcgccggcgccgcacugcagauccccuucgccaugcagauggccuaccgguucaacggcaucggcgugacccagaacgugcuguacgagaaccagaagcugaucgccaaccaguucaacagcgccaucggcaagauccaggacagccugagcagcaccgccagcgcccugggcaagcugcaggacguggugaaccagaacgcccaggcucugaacacccuggugaagcagcugagcagcaauuuuggcgccaucagcagcgugcugaacgacauccugucaaggcuggacaagguggaggccgaggugcagaucgaccggcugaucaccggccggcugcagagccugcagaccuacgugacccagcagcugauccgggccgccgagauccgggccagcgccaaccuggccgcaaccaagaugagcgagugcgugcugggccagagcaagcggguggacuucugcggcaagggcuaccaccugaugagcuucccccagagcgccccacacggcguggucuuccuccacgugacauacgugcccgcccaggagaagaacuucaccaccgcccccgccaucugccacgacggcaaggcccacuucccccgggagggaguguucgugagcaacggcacccacugguucgugacccagcggaacuucuacgagccccagauuaucaccaccgacaacaccuucgugagcggcaacugcgacguggugaucggcaucgugaacaacaccguguacgacccccugcagccugagcuggacagcuucaaggaggagcuggacaaguacuucaagaaccacaccagccccgacguggaucugggcgacaucagcggcaucaacgcuagcguggugaacauccagaaggagaucgaccggcugaacgagguggccaagaaccugaacgagagccugaucgaccugcaggagcugggcaaguacgagcaguacaucaaguggcccugguacaucuggcugggcuucaucgccggccugaucgccaucgugauggugaccaucaugcugugcugcaugaccagcugcuguagcugccugaagggcugcugcagcugcggcagcugcugcaaguucgacgaggacgacagcgagccagugcugaagggcgugaagcugcacuacaccugauaauaggcuggagccucgguggccuagcuucuugccccuugggccuccccccagccccuccuccccuuccugcacccguacccccguggucuuugaauaaagucugagugggcggcaaaaaaaaaaaaaaaaaaaaaaaaaaaaaaaaaaaaaaaaaaaaaaaaaaaaaaaaaaaaaaaaaaaaaaaaaaaaaaaaaaaaaaaaaaaaaaaaaaaaucuag

SEQ ID NO: 26554 - RNA, 4094 nt, Artificial Sequence
  SARS-CoV-2/Wuhan/WIV05/2019__EPI_ISL_402128 spike protein mRNA gc (1-1273)(H69del_V70del_Y453F_D614G_I692V_M1229I)
gggaaauaagagagaaaagaagaguaagaagaaauauaagaccccggcgccgccaccauguucguguuccuggugcugcugccccuggugagcagccagugcgugaaccugaccacccggacccagcugcccccugccuacaccaacagcuucacccggggcguguacuaccccgacaagguguuccggagcagcgugcugcacagcacccaggaccuguuccugcccuucuucagcaacgugaccugguuccacgccaucagcggcaccaacggcaccaagcgguucgacaacccagugcugcccuucaacgacggcguguacuucgccagcaccgagaagucaaacaucauccggggcuggaucuucggcaccacccuggacagcaagacacagagccugcugaucgugaacaacgccaccaacguggugaucaaggugugcgaguuucaguucugcaacgaccccuuccugggcguguacuaccacaagaacaacaagagcuggauggagagcgaguuccggguguacagcagcgcuaacaauugcaccuucgaguacgucagccagcccuuccugauggaccucgagggcaagcagggcaacuucaagaaccugcgggaguucguguucaagaacaucgauggcuacuucaagaucuacagcaagcacacccccaucaaccuggugcgggaccugccccagggauucagcgcccuggagccucugguggaccugcccaucggcaucaacaucaccagguuccagacccugcuggcccugcaccggagcuaccugacccccggcgacagcagcagcggcuggaccgccggcgccgccgcauacuacgugggcuaccugcagccacggaccuuccugcugaaguacaacgagaacggcaccaucaccgacgccguggacugcgcccuggacccccugagcgagaccaagugcacccuaaagagcuucaccguggagaagggcaucuaccagaccagcaacuuccgggugcagcccacugagagcaucgugcgguuccccaacauuaccaaccugugucccuucggcgagguguucaacgccacccgguucgccagcguguacgccuggaaccggaagcggaucagcaacugcguggccgacuacagcgugcuguacaacagcgccagcuucagcaccuucaagugcuacggcgugagcccuaccaagcugaacgaccugugcuucaccaacguguacgcugacagcuucgugauccggggcgacgaggugcggcagaucgcccccggccagaccggcaagaucgccgacuacaacuacaagcugcccgacgacuucaccggcugcgugaucgccuggaacagcaacaaccuggacagcaaggugggcggcaacuacaacuaccuguuccggcuguuccguaagagcaaccugaagccauuugagcgggacaucagcaccgagaucuaccaggccggcagcacccccugcaacgguguggagggcuucaacugcuacuucccccugcagagcuacggcuuccagcccaccaacggcgugggcuaccagcccuaccgggugguggugcugagcuucgagcugcugcacgcccccgccaccgugugcggcccuaaaaagagcaccaaccuggugaagaacaagugcgugaacuucaauuucaacggccugaccggcaccggcgugcugaccgagagcaacaagaaguuccugcccuuccagcaguucggccgggauaucgccgacaccaccgacgcagugcgggacccccagacccuggagauccuggacaucaccccaugcagcuucggcggcgugagcgugaucacccccggcacaaacaccagcaaccaggucgccgugcuguaccagggagugaacugcaccgaggugcccguggccauccacgccgaccagcugacccccaccuggcggguguacagcaccggcagcaacguguuccagacccgggccggcugccugaucggcgccgagcacgugaacaacuccuacgagugcgacauccccaucggcgcuggcaucugcgccagcuaccagacccagaccaacagcccccggcgggcccggagcguggccagccagagcgugaucgccuacaccaugagcuuaggcgccgagaacagcguggccuacagcaacaacagcaucgcgaucccuaccaacuucaccaucagcgugaccaccgagauccugcccgugagcaugaccaagaccagcguggacuguaccauguacauaugcggcgacagcaccgagugcagcaaccugcugcugcaguacggcagcuucugcacccagcugaaccgggcccugaccggcaucgccguggagcaggacaagaacacccaagagguguucgcccaggugaagcagaucuacaagacucccccaaucaaggacuucggcggcuucaacuucagccagauccugcccgaccccagcaagcccagcaagcggagcuucaucgaggaccugcuguucaacaaggugacccuggccgacgccggcuucaucaagcaguacggcgacugccugggggauaucgccgcucgggaccugaucugcgcccagaaguucaacggccugaccgugcugcccccucugcugaccgacgagaugaucgcccaguacaccagcgcccugcuugccggcaccaucaccagcggcuggaccuucggcgccggcgcagcccugcagauccccuucgccaugcagauggccuaccgguucaacggcaucggcgugacccagaacgugcuguacgagaaccagaagcugaucgccaaccaguucaacagcgccaucggcaagauccaggacagccugagcagcaccgccagcgcccugggcaagcugcaggacguggugaaccagaacgcucaggcccugaacacccuggugaagcagcugagcagcaacuuuggcgccaucagcucagugcugaaugacauccugagcaggcuggacaagguggaggccgaggugcagaucgaccggcugaucaccggccggcugcagagccugcagaccuacgugacccagcagcugauccgggccgccgagauccgggccagcgccaaccuggcagccaccaagaugagcgagugcgugcugggccagagcaagcggguggacuucugcggcaagggcuaccaccugaugagcuucccccagagcgccccacacggcgugguguuccuccacgucacauacgugcccgcccaggagaagaacuucaccaccgcccccgccaucugccacgacggcaaggcucacuucccccgggagggaguguucgugagcaacggcacccacugguucgugacccagcggaacuucuacgagccccagauuaucaccaccgacaacaccuucgugagcggcaacugcgacguggugaucggcaucgugaacaacaccguguacgacccccugcagccugagcuggacagcuucaaggaggagcuggacaaguacuucaagaaccacaccagccccgacguggaucugggcgacaucagcggcaucaacgccagcguggugaacauccagaaggagaucgaccggcugaacgagguggccaagaaccugaacgagagccugaucgaccugcaggagcugggcaaguacgagcaguacaucaaguggcccugguacaucuggcugggcuucaucgccggccugaucgccaucgugaucgugaccaucaugcugugcugcaugaccagcugcuguagcugccugaagggcugcugcagcugcggcagcugcugcaaguucgacgaggacgacagcgagccagugcugaagggcgugaagcugcacuacaccugauaauaggcuggagccucgguggccuagcuucuugccccuugggccuccccccagccccuccuccccuuccugcacccguacccccguggucuuugaauaaagucugagugggcggcaaaaaaaaaaaaaaaaaaaaaaaaaaaaaaaaaaaaaaaaaaaaaaaaaaaaaaaaaaaaaaaaaaaaaaaaaaaaaaaaaaaaaaaaaaaaaaaaaaaaucuag

SEQ ID NO: 26555 - RNA, 4091 nt, Artificial Sequence
  SARS-CoV-2/Wuhan/WIV05/2019__EPI_ISL_402128 spike protein mRNA gc (1-1273)(H69del_V70del_Y144del_N501Y_A570D_D614G_P681H_T716I_S982 A_D1118H)
gggaaauaagagagaaaagaagaguaagaagaaauauaagaccccggcgccgccaccauguucguguuccuggugcugcugccccuggugagcagccagugcgugaaccugaccacccggacccagcugcccccugccuacaccaacagcuucacccggggcguguacuaccccgacaagguguuccggagcagcgugcugcacagcacccaggaccuguuccugcccuucuucagcaacgugaccugguuccacgccaucagcggcaccaacggcaccaagcgguucgacaacccagugcugcccuucaacgacggcguguacuucgccagcaccgagaagucaaacaucauccggggcuggaucuucggcaccacccuggacagcaagacacagagccugcugaucgugaacaacgccaccaacguggugaucaaggugugcgaguuucaguucugcaacgaccccuuccugggcguguaccacaagaacaacaagagcuggauggagagcgaguuccggguguacagcagcgcuaacaauugcaccuucgaguacgucagccagcccuuccugauggaccucgagggcaagcagggcaacuucaagaaccugcgggaguucguguucaagaacaucgauggcuacuucaagaucuacagcaagcacacccccaucaaccuggugcgggaccugccccagggauucagcgcccuggagccucugguggaccugcccaucggcaucaacaucaccagguuccagacccugcuggcccugcaccggagcuaccugacccccggcgacagcagcagcggcuggaccgccggcgccgccgcauacuacgugggcuaccugcagccacggaccuuccugcugaaguacaacgagaacggcaccaucaccgacgccguggacugcgcccuggacccccugagcgagaccaagugcacccuaaagagcuucaccguggagaagggcaucuaccagaccagcaacuuccgggugcagcccacugagagcaucgugcgguuccccaacauuaccaaccugugucccuucggcgagguguucaacgccacccgguucgccagcguguacgccuggaaccggaagcggaucagcaacugcguggccgacuacagcgugcuguacaacagcgccagcuucagcaccuucaagugcuacggcgugagcccuaccaagcugaacgaccugugcuucaccaacguguacgcugacagcuucgugauccggggcgacgaggugcggcagaucgcccccggccagaccggcaagaucgccgacuacaacuacaagcugcccgacgacuucaccggcugcgugaucgccuggaacagcaacaaccuggacagcaaggugggcggcaacuacaacuaccuguaccggcuguuccguaagagcaaccugaagccauucgagcgggacaucagcaccgagaucuaccaggccggcagcacccccugcaacgguguggagggcuuuaacugcuacuucccccugcagagcuacggcuuccagcccaccuacggcgugggcuaccagcccuaccgggugguggugcugagcuucgagcugcugcacgcccccgccaccgugugcggcccuaaaaagagcaccaaccuggugaagaacaagugcgugaacuucaacuucaauggccugaccggcaccggcgugcugaccgagagcaacaagaaguuccugcccuuccagcaguucggccgggauaucgacgacaccaccgacgccgugcgggacccccagacccuggagauccuggacaucaccccaugcagcuucggcggcgugagcgugaucacccccggcacaaacaccagcaaccaggucgcagugcuguaccagggagugaacugcaccgaggugcccguggccauccacgccgaccagcugacccccaccuggcggguguacagcaccggcagcaacguguuccagacccgggccggcugccugaucggcgccgagcacgugaacaacuccuacgagugcgacauccccaucggcgccggcaucugcgcuagcuaccagacccagaccaacagccaccggcgggcccggagcguggccagccagagcaucaucgccuacaccaugagcuuaggcgccgagaacagcguggccuacagcaacaacagcaucgccauccccaucaacuucaccauaagcgugaccaccgagauccugccugugagcaugaccaagaccagcguggacuguaccauguacaucugcggcgacagcaccgagugcagcaaccugcugcugcaguacggcagcuucugcacccagcugaaccgggcgcugaccggcaucgccguggagcaggacaagaacacccaagagguguucgcccaggugaagcagaucuacaagaccccacccaucaaggacuucggcggcuucaacuucagccagauccugcccgaccccagcaagcccagcaagcggagcuucaucgaggaccugcuguucaacaaggugacucuggccgacgccggcuucaucaagcaguacggcgauugccugggggacaucgccgcccgggaccugaucugcgcucagaaguucaacggccugaccgugcugccuccccugcugaccgacgagaugaucgcccaguacaccagcgcccugcuugccggcaccaucaccagcggcuggaccuucggcgccggcgccgcacugcagauccccuucgccaugcagauggccuaccgguucaacggcaucggcgugacccagaacgugcuguacgagaaccagaagcugaucgccaaccaguucaacagcgccaucggcaagauccaggacagccugagcagcaccgccagcgcccugggcaagcugcaggacguggugaaccagaacgcccaggcucugaacacccuggugaagcagcugagcagcaacuucggcgccaucagcucagugcugaacgacauccuggccaggcuggacaagguggaggccgaggugcagaucgaccggcugaucaccggccggcugcagagccugcagaccuacgugacccagcagcugauccgggccgccgagauucgggccagcgccaaucuggcagccaccaagaugagcgagugcgugcugggccagagcaagcggguggacuuuugcggcaagggcuaccaccugaugagcuucccccagagcgcuccccacggcgugguguuccuccacgugaccuacgucccagcccaggagaagaacuucacaaccgcccccgccaucugccacgacggcaaggcccacuucccccgggagggaguguucgugagcaacggcacccacugguucgugacccagcggaacuucuacgagccccagaucaucaccacccacaacaccuucgugagcggcaacugcgacguggugaucggcaucgugaacaacaccguguacgacccccugcagcccgagcuggacagcuucaaggaggagcuggacaaguacuucaagaaccacaccagcccugacguggaucugggcgacaucagcggcaucaacgccagcguggugaacauccagaaggagaucgaccggcugaacgagguggccaagaaccugaacgagagccugaucgaccugcaggagcugggcaaguacgagcaguacaucaaguggcccugguacaucuggcugggcuucaucgccggccugaucgccaucgugauggugaccaucaugcugugcugcaugaccagcugcuguagcugccugaagggcugcugcagcugcggcagcugcugcaaguucgacgaggacgacagcgagcccgugcugaagggcgugaagcugcacuacaccugauaauaggcuggagccucgguggccuagcuucuugccccuugggccuccccccagccccuccuccccuuccugcacccguacccccguggucuuugaauaaagucugagugggcggcaaaaaaaaaaaaaaaaaaaaaaaaaaaaaaaaaaaaaaaaaaaaaaaaaaaaaaaaaaaaaaaaaaaaaaaaaaaaaaaaaaaaaaaaaaaaaaaaaaaaucuag

SEQ ID NO: 26556 - RNA, 4100 nt, Artificial Sequence
  SARS-CoV-2/Wuhan/WIV05/2019__EPI_ISL_402128 spike protein mRNA gc (1-1273)(K417N_E484K_N501Y_D614G)
gggaaauaagagagaaaagaagaguaagaagaaauauaagaccccggcgccgccaccauguucguguuccuggugcugcugccccuggugagcagccagugcgugaaccugaccacccggacccagcugcccccugccuacaccaacagcuucacccggggcguguacuaccccgacaagguguuccggagcagcgugcugcacagcacccaggaccuguuccugcccuucuucagcaacgugaccugguuccacgccauccacgugagcggcaccaacggcaccaagcgguucgacaacccagugcugcccuucaacgacggcguguacuucgccagcaccgagaagucaaacaucauccggggcuggaucuucggcaccacccuggacagcaagacacagagccugcugaucgugaacaacgccaccaacguggugaucaaggugugcgaguuucaguucugcaacgaccccuuccugggcguguacuaccacaagaacaacaagagcuggauggagagcgaguuccgggucuacagcagcgcuaacaauugcaccuucgaguacgugagccagcccuuccugauggaccucgagggcaagcagggcaacuucaagaaccugcgggaguucguguucaagaacaucgauggcuacuucaagaucuacagcaagcacacccccaucaaccuggugcgggaccugccccagggauucagcgcccuggagccucugguggaccugcccaucggcaucaacaucaccagguuccagacccugcuggcccugcaccggagcuaccugacccccggcgacagcagcagcggcuggaccgccggcgccgccgcauacuacgugggcuaccugcagccacggaccuuccugcugaaguacaacgagaacggcaccaucaccgacgccguggacugcgcccuggacccccugagcgagaccaagugcacccuaaagagcuucaccguggagaagggcaucuaccagaccagcaacuuccgggugcagcccacugagagcaucgugcgguuccccaacauuaccaaccugugucccuucggcgagguguucaacgccacccgguucgccagcguguacgccuggaaccggaagcggaucagcaacugcguggccgacuacagcgugcuguacaacagcgccagcuucagcaccuucaagugcuacggcgugagcccuaccaagcugaacgaccugugcuucaccaacguguacgcugacagcuucgugauccggggcgacgaggugcggcagaucgcccccggccagaccggcaacaucgccgacuacaacuacaagcugcccgacgacuucaccggcugcgugaucgccuggaacagcaacaaccuggacagcaaggugggcggcaacuacaacuaccuguaccggcuguuccguaagagcaaccugaagccauucgagcgggacaucagcaccgagaucuaccaggccggcagcacccccugcaacggugugaagggcuuuaacugcuacuucccccugcagagcuacggcuuccagcccaccuacggcgugggcuaccagcccuaccgggugguggugcugagcuucgagcugcugcacgcccccgccaccgugugcggcccuaaaaagagcaccaaccuggugaagaacaagugcgugaacuucaauuucaacggccugaccggcaccggcgugcugaccgagagcaacaagaaguuccugcccuuccagcaguucggccgggauaucgccgacaccaccgacgcagugcgggacccccagacccuggagauccuggacaucaccccaugcagcuucggcggcgugagcgucaucacccccggcacaaacaccagcaaccagguggccgugcuguaccagggagugaacugcaccgaggugcccguggccauccacgccgaccagcugacccccaccuggcggguguacagcaccggcagcaacguguuccagacccgggccggcugccugaucggcgccgagcacgugaacaacuccuacgagugcgacauccccaucggcgcuggcaucugcgccagcuaccagacccagaccaacagcccccggcgggcccggagcguggccagccagagcaucaucgccuacaccaugagcuuaggcgccgagaacagcguggccuacagcaacaacagcaucgcgaucccuaccaacuucaccaucagcgugaccaccgagauacugcccgugagcaugaccaagaccagcguggacuguaccauguacaucugcggcgacagcaccgagugcagcaaccugcugcugcaguacggcagcuucugcacccagcugaaccgggcccugaccggcaucgccguggagcaggacaagaacacccaagagguguucgcccaggugaagcagaucuacaagacucccccaaucaaggacuucggcggcuucaacuucagccagauccugcccgaccccagcaagcccagcaagcggagcuucaucgaggaccugcuguucaacaaggugacccuggccgacgccggcuucaucaagcaguacggcgacugccugggggauaucgccgcucgggaccugaucugcgcccagaaguucaacggccugaccgugcugcccccucugcugaccgacgagaugaucgcccaguacaccagcgcccugcuugccggcaccaucaccagcggcuggaccuucggcgccggcgcagcccugcagauccccuucgccaugcagauggccuaccgguucaacggcaucggcgugacccagaacgugcuguacgagaaccagaagcugaucgccaaccaguucaacagcgccaucggcaagauccaggacagccugagcagcaccgccagcgcccugggcaagcugcaggacguggugaaccagaacgcucaggcccugaacacccuggugaagcagcugagcagcaacuucggcgccaucagcucagugcugaaugacauccugagcaggcuggacaagguggaggccgaggugcagaucgaccggcugaucaccggccggcugcagagccugcagaccuacgugacccagcagcugauccgggccgccgagauccgggccagcgccaaccuggcagccaccaagaugagcgagugcgugcugggccagagcaagcggguggacuuuugcggcaagggcuaccaccugaugagcuucccccagagcgccccacacggcgugguguuccuccacgucacauacgugcccgcccaggagaagaacuucaccaccgcccccgccauuugccacgacggcaaggcucacuucccccgggagggaguguucgugagcaacggcacccacugguucgugacccagcggaacuucuacgagccccagaucaucaccaccgacaacaccuucgugagcggcaacugcgacguggugaucggcaucgugaacaacaccguguacgacccccugcagccugagcuggacagcuucaaggaggagcuggacaaguacuucaagaaccacaccagccccgacguggaucugggcgacaucagcggcaucaacgccagcguggugaacauccagaaggagaucgaccggcugaacgagguggccaagaaccugaacgagagccugaucgaccugcaggagcugggcaaguacgagcaguacaucaaguggcccugguacaucuggcugggcuucaucgccggccugaucgccaucgugauggugaccaucaugcugugcugcaugaccagcugcuguagcugccugaagggcugcugcagcugcggcagcugcugcaaguucgacgaggacgacagcgagccagugcugaagggcgugaagcugcacuacaccugauaauaggcuggagccucgguggccuagcuucuugccccuugggccuccccccagccccuccuccccuuccugcacccguacccccguggucuuugaauaaagucugagugggcggcaaaaaaaaaaaaaaaaaaaaaaaaaaaaaaaaaaaaaaaaaaaaaaaaaaaaaaaaaaaaaaaaaaaaaaaaaaaaaaaaaaaaaaaaaaaaaaaaaaaaucuag

SEQ ID NO: 26557 - RNA, 4091 nt, Artificial Sequence
  SARS-CoV-2/Wuhan/WIV05/2019__EPI_ISL_402128 spike protein mRNA gc (1-1273)(L18F_D80A_D215G_L242del_A243del_L244del_R246I_K417N_E484 K_N501Y_D614G_A701V)
gggaaauaagagagaaaagaagaguaagaagaaauauaagaccccggcgccgccaccauguucguguuccuggugcugcugccccuggugagcagccagugcgugaacuucaccacccggacccagcugcccccugccuacaccaacagcuucacccggggcguguacuaccccgacaagguguuccggagcagcgugcugcacagcacccaggaccuguuccugcccuucuucagcaacgugaccugguuccacgccauccacgugagcggcaccaacggcaccaagcgguucgccaacccagugcugcccuucaacgacggcguguacuucgccagcaccgagaagucaaacaucauccggggcuggaucuuuggcaccacccuggacagcaagacacagagccugcugaucgugaacaacgcuaccaacguggugaucaaggugugcgaguuccaguucugcaacgaccccuuccugggcguguacuaccacaagaacaacaagagcuggauggagagcgaguuccgggucuacagcagcgccaacaauugcaccuucgaguacgugagccagcccuuccugauggaccuggagggcaagcagggcaacuucaagaaccuccgggaguucguguucaagaacaucgacggcuacuucaagaucuacagcaagcacacccccaucaaccuggugcggggacugccccagggcuucagcgcccuggagccucugguggaucugcccaucggcaucaacaucaccagguuccagacccugcacaucagcuaccugacccccggcgacagcagcagcggcuggaccgccggcgccgccgcauacuacgugggcuaccugcagccacggaccuuccugcugaaguacaacgagaacggcaccaucaccgacgccguggacugcgcccuggacccccugagcgagaccaagugcacccuuaagagcuucaccguggagaagggcaucuaccagaccagcaacuuccgggugcagcccacugagagcauugugcgguuccccaacaucaccaaccugugucccuucggcgagguguucaacgccacccgguucgccagcguguacgccuggaaccggaagcggaucagcaacugcguggccgacuacagcgugcuguacaacagcgccagcuucagcaccuucaagugcuacggcgugagcccuaccaagcugaacgaccugugcuucaccaacguguacgcugacagcuucgugauccggggcgacgaggugcggcagaucgcccccggccagaccggcaacaucgccgacuacaacuacaagcugcccgacgacuucaccggcugcgugaucgccuggaacagcaacaaccuggacagcaaggugggcggcaacuacaacuaccuguaccggcuauuccguaagagcaaccugaagccauuugagcgggacaucagcaccgagaucuaccaggccgguagcacccccugcaacggcgugaagggcuucaacugcuacuucccccugcagagcuacggcuuccagcccaccuacggcgugggcuaccagcccuaccgggugguggugcugagcuucgagcugcugcacgcccccgccaccgugugcggcccuaaaaagagcaccaaccuggugaagaacaagugcgugaacuucaauuucaacggccugaccggcaccggcgugcugaccgagagcaacaagaaguuccugcccuuccagcaguucggccgggacaucgccgacaccaccgaugcagugcgggacccccagacccuggagauccuggacaucaccccaugcagcuucggcggcgugagcgucaucacccccggaacaaacaccagcaaccagguggccgugcuguaccagggcgugaacugcaccgaggugcccguggccauccacgccgaccagcugacccccaccuggcggguguacagcaccggcagcaacguguuccagacccgggccggcugccugaucggcgccgagcacgugaacaacuccuacgagugcgacauccccaucggcgcuggcaucugcgccagcuaccagacccagaccaacagcccccggcgggcccggagcguggccagccagagcaucaucgccuacaccaugagccugggcguggagaacagcguggccuacagcaacaacagcaucgccaucccuaccaacuucaccauaagcgugaccaccgagauccugcccgugagcaugaccaagaccagcguggacuguaccauguacaucugcggcgacagcaccgagugcagcaaccuguuacugcaguacggcagcuucugcacccagcugaaccgggcgcugaccggcaucgccguggagcaggacaagaacacccaagagguguucgcccaggugaagcagaucuacaagacucccccaaucaaggacuucggcggcuucaacuucagccagauccugcccgaccccagcaagcccagcaagcggagcuucaucgaggaccugcuguucaacaaggugacccuggccgacgccggcuucaucaagcaguacggggacugccugggcgacaucgccgcccgggaccugaucugcgcucagaaguucaacggccugaccgugcugcccccucugcugaccgaugagaugaucgcccaguacaccagcgcccugcuggccggcaccaucaccagcggcuggaccuucggcgccggcgccgcacugcagauccccuucgccaugcagauggccuaccgguucaacggcaucggcgugacccagaacgugcuguacgagaaccagaagcugaucgccaaccaguucaacagcgccaucggcaagauccaggacagccugagcagcaccgccagcgcccugggcaagcugcaggacguggugaaccagaacgcccaggcucugaacacccuggugaagcagcugagcagcaacuuuggcgccaucagcucagugcugaaugacauccugagccggcuggacaagguggaggccgaggugcagaucgacaggcugaucaccggccggcugcagagccugcagaccuacgugacccagcagcugauccgggccgccgagauucgggccagcgccaaccuggccgcaaccaagaugagcgagugcgugcugggccagagcaagcggguggacuucugcggcaagggcuaccaccugaugagcuucccccagagcgccccacacggcguggucuuccugcacgugacauacgugcccgcccaggagaagaacuucaccaccgcccccgccaucugccacgacggaaaggcccacuucccccgggagggcguguucgugagcaacggcacccacugguucgugacccagcggaacuucuacgagccccagaucaucaccaccgacaacaccuucgugagcggcaacugcgacguggugaucggcaucgugaacaacaccguguacgacccccugcagccugagcuggacagcuucaaggaggagcucgacaaguacuucaagaaccacaccagccccgacguggaccugggcgacaucagcggcaucaacgcuagcguggugaacauccagaaggagaucgaucggcugaacgagguggccaagaaccugaacgagagccugaucgaccugcaggagcugggcaaguacgagcaguacaucaaguggcccugguacaucuggcugggcuucaucgccggccugaucgccaucgugauggugaccaucaugcugugcugcaugaccagcugcuguagcugccugaagggcugcugcagcugcggcagcugcugcaaguucgacgaggacgacagcgagccagugcugaagggcgugaagcugcacuacaccugauaauaggcuggagccucgguggccuagcuucuugccccuugggccuccccccagccccuccuccccuuccugcacccguacccccguggucuuugaauaaagucugagugggcggcaaaaaaaaaaaaaaaaaaaaaaaaaaaaaaaaaaaaaaaaaaaaaaaaaaaaaaaaaaaaaaaaaaaaaaaaaaaaaaaaaaaaaaaaaaaaaaaaaaaaucuag

SEQ ID NO: 26558 - RNA, 4100 nt, Artificial Sequence
  SARS-CoV-2/Wuhan/WIV05/2019__EPI_ISL_402128 spike protein mRNA gc (1-1273)(E484K_D614G)
gggaaauaagagagaaaagaagaguaagaagaaauauaagaccccggcgccgccaccauguucguguuccuggugcugcugccccuggugagcagccagugcgugaaccugaccacccggacccagcugcccccugccuacaccaacagcuucacccggggcguguacuaccccgacaagguguuccggagcagcgugcugcacagcacccaggaccuguuccugcccuucuucagcaacgugaccugguuccacgccauccacgugagcggcaccaacggcaccaagcgguucgacaacccagugcugcccuucaacgacggcguguacuucgccagcaccgagaagucaaacaucauccggggcuggaucuucggcaccacccuggacagcaagacacagagccugcugaucgugaacaacgccaccaacguggugaucaaggugugcgaguuucaguucugcaacgaccccuuccugggcguguacuaccacaagaacaacaagagcuggauggagagcgaguuccgggucuacagcagcgcuaacaauugcaccuucgaguacgugagccagcccuuccugauggaccucgagggcaagcagggcaacuucaagaaccugcgggaguucguguucaagaacaucgauggcuacuucaagaucuacagcaagcacacccccaucaaccuggugcgggaccugccccagggauucagcgcccuggagccucugguggaccugcccaucggcaucaacaucaccagguuccagacccugcuggcccugcaccggagcuaccugacccccggcgacagcagcagcggcuggaccgccggcgccgccgcauacuacgugggcuaccugcagccacggaccuuccugcugaaguacaacgagaacggcaccaucaccgacgccguggacugcgcccuggacccccugagcgagaccaagugcacccuaaagagcuucaccguggagaagggcaucuaccagaccagcaacuuccgggugcagcccacugagagcaucgugcgguuccccaacauuaccaaccugugucccuucggcgagguguucaacgccacccgguucgccagcguguacgccuggaaccggaagcggaucagcaacugcguggccgacuacagcgugcuguacaacagcgccagcuucagcaccuucaagugcuacggcgugagcccuaccaagcugaacgaccugugcuucaccaacguguacgcugacagcuucgugauccggggcgacgaggugcggcagaucgcccccggccagaccggcaagaucgccgacuacaacuacaagcugcccgacgacuucaccggcugcgugaucgccuggaacagcaacaaccuggacagcaaggugggcggcaacuacaacuaccuguaccggcuguuccguaagagcaaccugaagccauucgagcgggacaucagcaccgagaucuaccaggccggcagcacccccugcaacggugugaagggcuuuaacugcuacuucccccugcagagcuacggcuuccagcccaccaacggcgugggcuaccagcccuaccgggugguggugcugagcuucgagcugcugcacgcccccgccaccgugugcggcccuaaaaagagcaccaaccuggugaagaacaagugcgugaacuucaauuucaacggccugaccggcaccggcgugcugaccgagagcaacaagaaguuccugcccuuccagcaguucggccgggauaucgccgacaccaccgacgcagugcgggacccccagacccuggagauccuggacaucaccccaugcagcuucggcggcgugagcgucaucacccccggcacaaacaccagcaaccagguggccgugcuguaccagggagugaacugcaccgaggugcccguggccauccacgccgaccagcugacccccaccuggcggguguacagcaccggcagcaacguguuccagacccgggccggcugccugaucggcgccgagcacgugaacaacuccuacgagugcgacauccccaucggcgcuggcaucugcgccagcuaccagacccagaccaacagcccccggcgggcccggagcguggccagccagagcaucaucgccuacaccaugagcuuaggcgccgagaacagcguggccuacagcaacaacagcaucgcgaucccuaccaacuucaccaucagcgugaccaccgagauacugcccgugagcaugaccaagaccagcguggacuguaccauguacaucugcggcgacagcaccgagugcagcaaccugcugcugcaguacggcagcuucugcacccagcugaaccgggcccugaccggcaucgccguggagcaggacaagaacacccaagagguguucgcccaggugaagcagaucuacaagacucccccaaucaaggacuucggcggcuucaacuucagccagauccugcccgaccccagcaagcccagcaagcggagcuucaucgaggaccugcuguucaacaaggugacccuggccgacgccggcuucaucaagcaguacggcgacugccugggggauaucgccgcucgggaccugaucugcgcccagaaguucaacggccugaccgugcugcccccucugcugaccgacgagaugaucgcccaguacaccagcgcccugcuugccggcaccaucaccagcggcuggaccuucggcgccggcgcagcccugcagauccccuucgccaugcagauggccuaccgguucaacggcaucggcgugacccagaacgugcuguacgagaaccagaagcugaucgccaaccaguucaacagcgccaucggcaagauccaggacagccugagcagcaccgccagcgcccugggcaagcugcaggacguggugaaccagaacgcucaggcccugaacacccuggugaagcagcugagcagcaacuucggcgccaucagcucagugcugaaugacauccugagcaggcuggacaagguggaggccgaggugcagaucgaccggcugaucaccggccggcugcagagccugcagaccuacgugacccagcagcugauccgggccgccgagauccgggccagcgccaaccuggcagccaccaagaugagcgagugcgugcugggccagagcaagcggguggacuuuugcggcaagggcuaccaccugaugagcuucccccagagcgccccacacggcgugguguuccuccacgucacauacgugcccgcccaggagaagaacuucaccaccgcccccgccauuugccacgacggcaaggcucacuucccccgggagggaguguucgugagcaacggcacccacugguucgugacccagcggaacuucuacgagccccagaucaucaccaccgacaacaccuucgugagcggcaacugcgacguggugaucggcaucgugaacaacaccguguacgacccccugcagccugagcuggacagcuucaaggaggagcuggacaaguacuucaagaaccacaccagccccgacguggaucugggcgacaucagcggcaucaacgccagcguggugaacauccagaaggagaucgaccggcugaacgagguggccaagaaccugaacgagagccugaucgaccugcaggagcugggcaaguacgagcaguacaucaaguggcccugguacaucuggcugggcuucaucgccggccugaucgccaucgugauggugaccaucaugcugugcugcaugaccagcugcuguagcugccugaagggcugcugcagcugcggcagcugcugcaaguucgacgaggacgacagcgagccagugcugaagggcgugaagcugcacuacaccugauaauaggcuggagccucgguggccuagcuucuugccccuugggccuccccccagccccuccuccccuuccugcacccguacccccguggucuuugaauaaagucugagugggcggcaaaaaaaaaaaaaaaaaaaaaaaaaaaaaaaaaaaaaaaaaaaaaaaaaaaaaaaaaaaaaaaaaaaaaaaaaaaaaaaaaaaaaaaaaaaaaaaaaaaaucuag

SEQ ID NO: 26559 - RNA, 4100 nt, Artificial Sequence
  SARS-CoV-2/Wuhan/WIV05/2019__EPI_ISL_402128 spike protein mRNA gc (1-1273)(L18F_T20N_P26S_D138Y_R190S_K417T_E484K_N501Y_D614G_H655Y _T1027I)
gggaaauaagagagaaaagaagaguaagaagaaauauaagaccccggcgccgccaccauguucguguuccuggugcugcugccccuggugagcagccagugcgugaacuucaccaaccggacccagcugcccagcgccuacaccaacagcuucacccggggcguguacuacccugacaagguguuccggagcagcgugcugcacagcacccaggaccuguuccugcccuucuucagcaacgugaccugguuccacgccauccacgugagcggcaccaacggcaccaagcgguucgacaaccccgugcugccauucaacgacggcguguacuucgccagcaccgagaagucaaacaucauccggggcuggaucuuuggcaccacccuggacagcaagacccagagccugcugaucgugaacaacgccacaaacguggugaucaaggugugcgaguuccaguucugcaacuaccccuuccugggcguguacuaccacaagaacaacaagagcuggauggagagcgaguuccgggucuacagcagcgcuaauaacugcaccuucgaguacgugagccagcccuuccugauggaccuggagggcaagcagggcaacuucaagaaccucagcgaguucguguucaagaacaucgacggcuacuucaagaucuacagcaagcacacccccaucaaccuggugcgggaucugccccagggauucagcgcccuggagccccugguggaccugccuaucggcaucaacaucacccgguuccagacccugcuggcccugcacaggagcuaccugacccccggcgacagcagcagcggcuggaccgccggcgccgccgcauacuacgugggcuaccugcagccccggaccuuccugcugaaguacaacgagaacggcaccaucaccgacgccguggacugcgcccuggacccacugagcgagaccaagugcacccuaaagagcuucaccguggagaagggcaucuaccagaccagcaacuuccgggugcagcccaccgagagcaucgugcgguuccccaacauuacuaaccugugucccuucggcgagguguucaacgccacccgguucgccagcguguacgccuggaaccggaagcggaucagcaacugcguggccgacuacagcgugcuguacaacagcgccagcuucagcaccuucaagugcuacggcgugagccccaccaagcugaacgaccugugcuucaccaacguguacgcugacagcuucgugauccggggcgacgaggugcggcagaucgccccuggccagaccggcaccaucgccgacuacaacuacaagcugcccgacgacuucaccggcugcgugaucgccuggaacagcaacaaccuggacagcaaggugggcggcaacuacaacuaccuguaccggcuguuccguaagagcaaccugaagcccuuugagcgggacaucagcaccgagaucuaccaggccggcagcaccccaugcaacggugugaagggcuucaacugcuacuucccccugcagagcuacggcuuccagcccaccuacggcgugggcuaccagcccuaccgggugguggugcugagcuucgagcugcugcacgcccccgccaccgugugcggccccaaaaagagcaccaaccuggugaagaacaagugcgugaacuucaauuucaacggccugaccggcaccggcgugcugaccgagagcaacaagaaguuccugccuuuccagcaguucggccgggacaucgccgauaccaccgacgcagugcgggacccccagacccuggagauccuggacaucacccccugcagcuucggcggcgugagcgucaucaccccaggcacaaacaccagcaaccagguggccgugcuguaccagggagugaacugcaccgaggugcccguggccauccacgccgaccagcugacccccaccuggcggguguacuccaccggcagcaacguguuccagacccgggccggcugccugaucggcgccgaguacgugaacaacagcuacgagugcgacauccccaucggcgcuggcaucugcgccagcuaccagacccagaccaacagcccccggcgggcccggagcguggccagccagagcaucaucgccuacaccaugagccugggcgccgagaacagcguggccuacagcaacaacagcaucgcgauccccaccaacuucaccaucagcgugaccaccgagauauuaccugugagcaugaccaagaccagcguggacuguaccauguacaucugcggcgacagcaccgagugcagcaaccugcugcugcaguacggcagcuucugcacccagcugaaccgggcccugaccggcaucgccguggagcaggacaagaacacccaagagguguucgcccaggugaagcagaucuacaagacuccacccaucaaggacuucggcggcuucaacuucagccagauccugcccgaccccagcaagcccagcaagcggagcuucaucgaggaccugcuguucaacaaggugacccuggccgacgccggcuucaucaagcaguacggcgacugccugggggacaucgccgcucgggaucugaucugcgcccagaaguucaacggccugaccgugcugccuccccugcugaccgacgagaugaucgcccaguacaccagcgcccugcuggccggcaccaucaccagcggcuggaccuucggcgccggcgcagcccuucagauccccuucgccaugcagauggccuaccgguucaacggcaucggcgugacccagaacgugcuguacgagaaccagaagcugaucgccaaccaguucaacagcgccaucggcaagauccaggacagccugagcagcaccgccagcgcccugggcaagcugcaggacguggugaaccagaacgcucaggcccugaacacccuggugaagcagcugagcucaaacuuuggcgccaucagcagcgugcugaaugacauccugagccggcuggacaagguggaggccgaggugcagaucgacaggcugaucaccggccggcugcagagccugcagaccuacgugacccagcagcugauccgggccgccgagauccgggccagcgccaaccuggcagccauuaagaugagcgagugcgugcugggccagagcaagcggguggacuucugcggcaagggcuaccaccugaugagcuucccccagagcgcuccccacggcgugguguuccugcacgucaccuacgugccagcccaggagaagaacuucacaaccgcccccgccaucugccacgacggcaaggcccacuucccccgggagggaguguucgugagcaacggcacccacugguucgugacccagcggaacuucuacgagccccagaucaucaccaccgacaacaccuucgugagcggcaacugcgacguggugaucggcaucgugaacaacaccguguacgacccccuccagcccgagcuggacagcuucaaggaggagcuggacaaguacuucaagaaccacaccagcccugacguggaccugggcgauaucagcggcaucaacgccagcguggugaacauccagaaggagaucgaccggcugaacgagguggccaagaaccugaacgagagccugaucgaccugcaggagcugggcaaguacgagcaguacaucaaguggcccugguacaucuggcugggcuucaucgccggccugaucgccaucgugauggugaccaucaugcugugcugcaugaccagcugcuguagcugccugaagggcugcugcagcugcggcagcugcugcaaguucgacgaggacgacagcgagcccgugcugaagggcgugaagcugcacuacaccugauaauaggcuggagccucgguggccuagcuucuugccccuugggccuccccccagccccuccuccccuuccugcacccguacccccguggucuuugaauaaagucugagugggcggcaaaaaaaaaaaaaaaaaaaaaaaaaaaaaaaaaaaaaaaaaaaaaaaaaaaaaaaaaaaaaaaaaaaaaaaaaaaaaaaaaaaaaaaaaaaaaaaaaaaaucuag

SEQ ID NO: 26560 - RNA, 4100 nt, Artificial Sequence
  SARS-CoV-2/Wuhan/WIV05/2019__EPI_ISL_402128 spike protein mRNA gc (1-1273)(S13I_W152C_L452R_D614G)
gggaaauaagagagaaaagaagaguaagaagaaauauaagaccccggcgccgccaccauguucguguuccuggugcugcugccccuggugagcauccagugcgugaaccugaccacccggacccagcugcccccugccuacaccaacagcuucacccggggcguguacuaccccgacaagguguuccggagcagcgugcugcacagcacccaggaccuguuccugcccuucuucagcaacgugaccugguuccacgccauccacgugagcggcaccaacggcaccaagcgguucgacaacccagugcugcccuucaacgacggcguguacuucgccagcaccgagaagucaaacaucauccggggcuggaucuucggcaccacccuggacagcaagacacagagccugcugaucgugaacaacgccaccaacguggugaucaaggugugcgaguuucaguucugcaacgaccccuuccugggcguguacuaccacaagaacaacaagagcugcauggagagcgaguuccgggucuacagcagcgcuaacaauugcaccuucgaguacgugagccagcccuuccugauggaccucgagggcaagcagggcaacuucaagaaccugcgggaguucguguucaagaacaucgauggcuacuucaagaucuacagcaagcacacccccaucaaccuggugcgggaccugccccagggauucagcgcccuggagccucugguggaccugcccaucggcaucaacaucaccagguuccagacccugcuggcccugcaccggagcuaccugacccccggcgacagcagcagcggcuggaccgccggcgccgccgcauacuacgugggcuaccugcagccacggaccuuccugcugaaguacaacgagaacggcaccaucaccgacgccguggacugcgcccuggacccccugagcgagaccaaguguacccuaaagagcuucaccguggagaagggcaucuaccagaccagcaacuuccgggugcagcccacugagagcauugugcgguuccccaacaucaccaaccugugccccuucggcgagguguucaacgccacccgguucgccagcguguacgccuggaaccggaagcggaucagcaacugcguggccgacuacagcgugcuguacaacagcgccagcuucagcaccuucaagugcuacggcgugagcccuaccaagcugaacgaccugugcuucaccaacguguacgcugacagcuucgugauccggggcgacgaggugcggcagaucgcccccggccagaccggcaagaucgccgacuacaacuacaagcugcccgacgacuucaccggcugcgugaucgccuggaacagcaacaaccuggacagcaaggugggcggcaacuacaacuaccgguaccggcuguuccguaagagcaaccugaagccauucgagcgggacaucagcaccgagaucuaccaggccggcagcacccccugcaacgguguggagggcuuuaacugcuacuucccccugcagagcuacggcuuccagcccaccaacggcgugggcuaccagcccuaccgggugguggugcugagcuucgagcugcugcacgcccccgccaccgugugcggcccuaaaaagagcaccaaccuggugaagaacaagugcgugaacuucaauuucaacggccugaccggcaccggcgugcugaccgagagcaacaagaaguuccugcccuuccagcaguucggccgggauaucgccgacaccaccgacgcagugcgggacccccagacccuggagauccuggacaucaccccaugcagcuucggcggcgugagcgucaucacccccggcacaaacaccagcaaccagguggccgugcuguaccagggagugaacugcaccgaggugcccguggccauccacgccgaccagcugacccccaccuggcggguguacagcaccggcagcaacguguuccagacccgggccggcugccugaucggcgccgagcacgugaacaacagcuacgagugcgacauccccaucggcgcuggcaucugugccuccuaccagacccagaccaacagcccccggcgggcccggagcguggccagccagagcaucaucgccuacaccaugagccugggcgccgagaacagcguggccuacagcaacaacagcaucgcgaucccuaccaacuucaccauaagcgugaccaccgagaucuuacccgugagcaugaccaagaccagcguggacugcaccauguacaucugcggcgacagcaccgagugcagcaaccugcugcugcaguacggcagcuucugcacccagcugaaccgggcccugaccggcaucgccguggagcaggacaagaacacccaagagguguucgcccaggugaagcagaucuacaagacucccccaaucaaggacuucggcggcuucaacuucagccagauccugcccgaccccagcaagcccagcaagcggagcuucaucgaggaccugcuguucaacaaggugacccuggccgacgccggcuucaucaagcaguacggcgacugccugggggauaucgccgcucgggaccugaucugcgcccagaaguucaacggccugaccgugcugcccccucugcugaccgacgagaugaucgcccaguacaccagcgcccugcuggccggcaccaucaccagcggcuggaccuucggcgccggcgcagcccuucagauccccuucgccaugcagauggccuacagguucaacggcaucggcgugacccagaacgugcuguacgagaaccagaagcugaucgccaaccaguucaacagcgccaucggcaagauccaggacagccugagcagcaccgccagcgcccugggcaagcugcaggacguggugaaccagaacgcucaggcccugaacacccuggugaagcagcugagcagcaacuucggcgccaucagcagcgugcugaaugacauccugucacggcuggacaagguggaggccgaggugcagaucgaccggcugaucaccggccggcugcagagccugcagaccuacgugacccagcagcugauccgggccgccgagauucgggccagcgccaaccuggcagccaccaagaugagcgagugcgugcugggccagagcaagcggguggacuuuugcggcaagggcuaccaccugaugagcuucccccagagcgccccacacggcgugguguuccugcacgucacauacgugcccgcccaggagaagaacuucaccaccgcccccgccaucugccacgacggcaaggcucacuucccccgggagggaguguucgugagcaacggcacccacugguucgugacccagcggaacuucuacgagccccagaucaucaccaccgacaacaccuucgugagcggcaacugcgacguggugaucggcaucgugaacaacaccguguacgacccccuccagccugagcuggacagcuucaaggaggagcuggacaaguacuucaagaaccacaccagccccgacguggaucugggcgacaucagcggcaucaacgccagcguggugaacauccagaaggagaucgaccggcugaacgagguggccaagaaccugaacgagagccugaucgaccugcaggagcugggcaaguacgagcaguacaucaaguggcccugguacaucuggcugggcuucaucgccggccugaucgccaucgugauggugaccaucaugcugugcugcaugaccagcuguugcagcugccugaagggcugcugcagcugcggcagcugcugcaaguucgacgaggacgacagcgagccagugcugaagggcgugaagcugcacuacaccugauaauaggcuggagccucgguggccuagcuucuugccccuugggccuccccccagccccuccuccccuuccugcacccguacccccguggucuuugaauaaagucugagugggcggcaaaaaaaaaaaaaaaaaaaaaaaaaaaaaaaaaaaaaaaaaaaaaaaaaaaaaaaaaaaaaaaaaaaaaaaaaaaaaaaaaaaaaaaaaaaaaaaaaaaaucuag

SEQ ID NO: 26561 - RNA, 4100 nt, Artificial Sequence
  SARS-CoV-2/Wuhan/WIV05/2019__EPI_ISL_402128 spike protein mRNA gc mod (1-1273)
gggaaauaagagagaaaagaagaguaagaagaaauauaagaccccggcgccgccaccauguucguguuucuggugcugcugccccugguguccagccagugugugaaccugaccaccagaacacagcugccuccagccuacaccaacagcuucaccagaggcguguacuaccccgacaagguguucagauccagcgugcugcacucuacccaggaccuguuccugccuuucuucagcaacgugaccugguuccacgccauccacguguccggcaccaauggcaccaagagauucgacaaccccgugcugcccuucaacgacgggguguacuuugccagcaccgagaaguccaacaucaucagaggcuggaucuucggcaccacacuggacagcaagacccagagccugcugaucgugaacaacgccaccaacguggucaucaaagugugcgaguuccaguucugcaacgaccccuuccugggcgucuacuaccacaagaacaacaagagcuggauggaaagcgaguuccggguguacagcagcgccaacaacugcaccuucgaguacgugucccagccuuuccugauggaccuggaaggcaagcagggcaacuucaagaaccugcgcgaguucguguucaagaacaucgacggcuacuucaaaaucuacagcaagcacaccccuaucaaccucgugcgggaucugccucagggcuucucugcucuggaaccccugguggaucugcccaucggcaucaacaucacccgguuucagacacugcuggcccugcacagaagcuaccugacaccuggcgauagcagcagcggauggacagcuggugccgccgcuuacuaugugggcuaccugcagccuagaaccuuccugcugaaguacaacgagaacggcaccaucaccgacgccguggauugugcucuggauccucugagcgagacaaagugcacccugaaguccuucaccguggaaaagggcaucuaccagaccagcaacuuccgggugcagcccaccgaauccaucgugcgguuccccaauaucaccaaucugugccccuucggcgagguguucaaugccaccagauucgccucuguguacgccuggaaccggaagcggaucagcaauugcguggccgacuacuccgugcuguacaacuccgccagcuucagcaccuucaagugcuacggcguguccccuaccaagcugaacgaccugugcuucacaaacguguacgccgacagcuucgugauccggggagaugaagugcggcagauugccccuggacagacaggcaagaucgccgacuacaacuacaagcugcccgacgacuucaccggcugugugauugccuggaacagcaacaaccuggacuccaaagucggcggcaacuacaauuaccuguaccggcuguuccggaaguccaaucugaagcccuucgagcgggacaucagcaccgaaaucuaucaggccggcagcaccccuugcaacggcguggaaggcuucaacugcuacuucccacugcaguccuacggcuuucagcccacaaauggcgugggcuaucagcccuacagagugguggugcugagcuucgaacugcugcaugcuccugccacagugugcggcccuaagaaaagcaccaaucucgugaagaacaaaugcgugaacuucaacuucaacggccugaccggcaccggcgugcugacagagagcaacaagaaguuccugccauuccagcaguuuggccgggauaucgccgauaccacagacgccguuagagauccccagacacuggaaauccuggacaucaccccaugcagcuucggcggagugucugugaucaccccuggcaccaacaccagcaaucagguggcagugcuguaccaggacgugaacuguaccgaagugcccguggccauucacgccgaucagcugacaccuacauggcggguguacuccaccggcagcaauguguuucagaccagagccggcugucugaucggagccgagcacgugaacaauagcuacgagugcgacauccccaucggcgcuggcaucugugccagcuaccagacacagacaaacagccccagacgggcuagaagcguggccagccagagcaucauugccuacacaaugucucugggcgccgagaacagcguggccuacuccaacaacucuaucgcuauccccaccaacuucaccaucagcgugaccaccgagauccugccuguguccaugaccaagaccagcguggacugcaccauguacaucugcggcgauuccaccgagugcuccaaccugcugcugcaguacggcagcuucugcacccagcugaauagagcccugacagggaucgccguggaacaggacaagaacacccaagagguguucgcccaagugaagcaaaucuacaagaccccuccuaucaaggacuucggcggcuucaauuucagccagauucugcccgauccuagcaagcccagcaagcggagcuucaucgaggaccugcuguucaacaaagugacacuggccgacgccggcuucaucaagcaguauggcgauugucugggcgacauugccgccagggaucugauuugcgcccagaaguuuaacggacugacagugcugccuccucugcugaccgaugagaugaucgcccaguacacaucugcccugcuggccggcacaaucacaagcggcuggacauuuggagcuggcgccgcucugcagauccccuuugcuaugcagauggccuaccgguucaacggcaucggagugacccagaaugugcuguacgagaaccagaagcugaucgccaaccaguucaacagcgccaucggcaagauccaggacagccugagcagcacagcaagcgcccugggaaagcugcaggacguggucaaccagaaugcccaggcacugaacacccuggucaagcagcuguccuccaacuucggcgccaucagcucugugcugaacgauauccugagcagacuggacaaggucgaggccgaggugcagaucgacagacugaucacaggcagacugcagagccuccagacauacgugacccagcagcugaucagagccgccgagauuagagccucugccaaucuggccgccaccaagaugucugagugugugcugggccagagcaagagaguggacuuuugcggcaagggcuaccaccugaugagcuucccucagucugccccucacggcgugguguuucugcacgugacauaugugcccgcucaagagaagaauuucaccaccgcuccagccaucugccacgacggcaaagcccacuuuccuagagaaggcguguucguguccaacggcacccauugguucgugacacagcggaacuucuacgagccccagaucaucaccaccgacaacaccuucgugucuggcaacugcgacguugugaucggcauugugaacaauaccguguacgacccucugcagcccgagcuggacagcuucaaagaggaacuggacaaguacuuuaagaaccacacaagccccgacguggaccugggcgauaucagcggaaucaaugccagcgucgugaacauccagaaagagaucgaccggcugaacgagguggccaagaaucugaacgagagccugaucgaccugcaagaacuggggaaguacgagcaguacaucaaguggcccugguacaucuggcugggcuuuaucgccggacugauugccaucgugauggucacaaucaugcuguguugcaugaccagcugcuguagcugccugaagggcuguuguagcuguggcagcugcugcaaguucgacgaggacgauucugagcccgugcugaagggcgugaaacugcacuacaccugauaauaggcuggagccucgguggccuagcuucuugccccuugggccuccccccagccccuccuccccuuccugcacccguacccccguggucuuugaauaaagucugagugggcggcaaaaaaaaaaaaaaaaaaaaaaaaaaaaaaaaaaaaaaaaaaaaaaaaaaaaaaaaaaaaaaaaaaaaaaaaaaaaaaaaaaaaaaaaaaaaaaaaaaaaucuag

SEQ ID NO: 26562 - RNA, 4100 nt, Artificial Sequence
  SARS-CoV-2/Wuhan/WIV05/2019__EPI_ISL_402128 spike protein mRNA gc mod (1-1273)(D614G)
gggaaauaagagagaaaagaagaguaagaagaaauauaagaccccggcgccgccaccauguucguguuucuggugcugcugccccugguguccagccagugugugaaccugaccaccagaacacagcugccuccagccuacaccaacagcuucaccagaggcguguacuaccccgacaagguguucagauccagcgugcugcacucuacccaggaccuguuccugccuuucuucagcaacgugaccugguuccacgccauccacguguccggcaccaauggcaccaagagauucgacaaccccgugcugcccuucaacgacgggguguacuuugccagcaccgagaaguccaacaucaucagaggcuggaucuucggcaccacacuggacagcaagacccagagccugcugaucgugaacaacgccaccaacguggucaucaaagugugcgaguuccaguucugcaacgaccccuuccugggcgucuacuaccacaagaacaacaagagcuggauggaaagcgaguuccggguguacagcagcgccaacaacugcaccuucgaguacgugucccagccuuuccugauggaccuggaaggcaagcagggcaacuucaagaaccugcgcgaguucguguucaagaacaucgacggcuacuucaaaaucuacagcaagcacaccccuaucaaccucgugcgggaucugccucagggcuucucugcucuggaaccccugguggaucugcccaucggcaucaacaucacccgguuucagacacugcuggcccugcacagaagcuaccugacaccuggcgauagcagcagcggauggacagcuggugccgccgcuuacuaugugggcuaccugcagccuagaaccuuccugcugaaguacaacgagaacggcaccaucaccgacgccguggauugugcucuggauccucugagcgagacaaagugcacccugaaguccuucaccguggaaaagggcaucuaccagaccagcaacuuccgggugcagcccaccgaauccaucgugcgguuccccaauaucaccaaucugugccccuucggcgagguguucaaugccaccagauucgccucuguguacgccuggaaccggaagcggaucagcaauugcguggccgacuacuccgugcuguacaacuccgccagcuucagcaccuucaagugcuacggcguguccccuaccaagcugaacgaccugugcuucacaaacguguacgccgacagcuucgugauccggggagaugaagugcggcagauugccccuggacagacaggcaagaucgccgacuacaacuacaagcugcccgacgacuucaccggcugugugauugccuggaacagcaacaaccuggacuccaaagucggcggcaacuacaauuaccuguaccggcuguuccggaaguccaaucugaagcccuucgagcgggacaucagcaccgaaaucuaucaggccggcagcaccccuugcaacggcguggaaggcuucaacugcuacuucccacugcaguccuacggcuuucagcccacaaauggcgugggcuaucagcccuacagagugguggugcugagcuucgaacugcugcaugcuccugccacagugugcggcccuaagaaaagcaccaaucucgugaagaacaaaugcgugaacuucaacuucaacggccugaccggcaccggcgugcugacagagagcaacaagaaguuccugccauuccagcaguuuggccgggauaucgccgauaccacagacgccguuagagauccccagacacuggaaauccuggacaucaccccaugcagcuucggcggagugucugugaucaccccuggcaccaacaccagcaaucagguggcagugcuguaccagggcgugaacuguaccgaagugcccguggccauucacgccgaucagcugacaccuacauggcggguguacuccaccggcagcaauguguuucagaccagagccggcugucugaucggagccgagcacgugaacaauagcuacgagugcgacauccccaucggcgcuggcaucugugccagcuaccagacacagacaaacagccccagacgggcuagaagcguggccagccagagcaucauugccuacacaaugucucugggcgccgagaacagcguggccuacuccaacaacucuaucgcuauccccaccaacuucaccaucagcgugaccaccgagauccugccuguguccaugaccaagaccagcguggacugcaccauguacaucugcggcgauuccaccgagugcuccaaccugcugcugcaguacggcagcuucugcacccagcugaauagagcccugacagggaucgccguggaacaggacaagaacacccaagagguguucgcccaagugaagcaaaucuacaagaccccuccuaucaaggacuucggcggcuucaauuucagccagauucugcccgauccuagcaagcccagcaagcggagcuucaucgaggaccugcuguucaacaaagugacacuggccgacgccggcuucaucaagcaguauggcgauugucugggcgacauugccgccagggaucugauuugcgcccagaaguuuaacggacugacagugcugccuccucugcugaccgaugagaugaucgcccaguacacaucugcccugcuggccggcacaaucacaagcggcuggacauuuggagcuggcgccgcucugcagauccccuuugcuaugcagauggccuaccgguucaacggcaucggagugacccagaaugugcuguacgagaaccagaagcugaucgccaaccaguucaacagcgccaucggcaagauccaggacagccugagcagcacagcaagcgcccugggaaagcugcaggacguggucaaccagaaugcccaggcacugaacacccuggucaagcagcuguccuccaacuucggcgccaucagcucugugcugaacgauauccugagcagacuggacaaggucgaggccgaggugcagaucgacagacugaucacaggcagacugcagagccuccagacauacgugacccagcagcugaucagagccgccgagauuagagccucugccaaucuggccgccaccaagaugucugagugugugcugggccagagcaagagaguggacuuuugcggcaagggcuaccaccugaugagcuucccucagucugccccucacggcgugguguuucugcacgugacauaugugcccgcucaagagaagaauuucaccaccgcuccagccaucugccacgacggcaaagcccacuuuccuagagaaggcguguucguguccaacggcacccauugguucgugacacagcggaacuucuacgagccccagaucaucaccaccgacaacaccuucgugucuggcaacugcgacguugugaucggcauugugaacaauaccguguacgacccucugcagcccgagcuggacagcuucaaagaggaacuggacaaguacuuuaagaaccacacaagccccgacguggaccugggcgauaucagcggaaucaaugccagcgucgugaacauccagaaagagaucgaccggcugaacgagguggccaagaaucugaacgagagccugaucgaccugcaagaacuggggaaguacgagcaguacaucaaguggcccugguacaucuggcugggcuuuaucgccggacugauugccaucgugauggucacaaucaugcuguguugcaugaccagcugcuguagcugccugaagggcuguuguagcuguggcagcugcugcaaguucgacgaggacgauucugagcccgugcugaagggcgugaaacugcacuacaccugauaauaggcuggagccucgguggccuagcuucuugccccuugggccuccccccagccccuccuccccuuccugcacccguacccccguggucuuugaauaaagucugagugggcggcaaaaaaaaaaaaaaaaaaaaaaaaaaaaaaaaaaaaaaaaaaaaaaaaaaaaaaaaaaaaaaaaaaaaaaaaaaaaaaaaaaaaaaaaaaaaaaaaaaaaucuag

SEQ ID NO: 26563 - RNA, 4100 nt, Artificial Sequence
  SARS-CoV-2/Wuhan/WIV05/2019__EPI_ISL_402128 spike protein mRNA gc mod (1-1273)(A222V_D614G)
gggaaauaagagagaaaagaagaguaagaagaaauauaagaccccggcgccgccaccauguucguguuucuggugcugcugccccugguguccagccagugugugaaccugaccaccagaacacagcugccuccagccuacaccaacagcuucaccagaggcguguacuaccccgacaagguguucagauccagcgugcugcacucuacccaggaccuguuccugccuuucuucagcaacgugaccugguuccacgccauccacguguccggcaccaauggcaccaagagauucgacaaccccgugcugcccuucaacgacgggguguacuuugccagcaccgagaaguccaacaucaucagaggcuggaucuucggcaccacacuggacagcaagacccagagccugcugaucgugaacaacgccaccaacguggucaucaaagugugcgaguuccaguucugcaacgaccccuuccugggcgucuacuaccacaagaacaacaagagcuggauggaaagcgaguuccggguguacagcagcgccaacaacugcaccuucgaguacgugucccagccuuuccugauggaccuggaaggcaagcagggcaacuucaagaaccugcgcgaguucguguucaagaacaucgacggcuacuucaaaaucuacagcaagcacaccccuaucaaccucgugcgggaucugccucagggcuucucugugcuggaaccccugguggaucugcccaucggcaucaacaucacccgguuucagacacugcuggcccugcacagaagcuaccugacaccuggcgauagcagcagcggauggacagcuggugccgccgcuuacuaugugggcuaccugcagccuagaaccuuccugcugaaguacaacgagaacggcaccaucaccgacgccguggauugugcucuggauccucugagcgagacaaagugcacccugaaguccuucaccguggaaaagggcaucuaccagaccagcaacuuccgggugcagcccaccgaauccaucgugcgguuccccaauaucaccaaucugugccccuucggcgagguguucaaugccaccagauucgccucuguguacgccuggaaccggaagcggaucagcaauugcguggccgacuacuccgugcuguacaacuccgccagcuucagcaccuucaagugcuacggcguguccccuaccaagcugaacgaccugugcuucacaaacguguacgccgacagcuucgugauccggggagaugaagugcggcagauugccccuggacagacaggcaagaucgccgacuacaacuacaagcugcccgacgacuucaccggcugugugauugccuggaacagcaacaaccuggacuccaaagucggcggcaacuacaauuaccuguaccggcuguuccggaaguccaaucugaagcccuucgagcgggacaucagcaccgaaaucuaucaggccggcagcaccccuugcaacggcguggaaggcuucaacugcuacuucccacugcaguccuacggcuuucagcccacaaauggcgugggcuaucagcccuacagagugguggugcugagcuucgaacugcugcaugcuccugccacagugugcggcccuaagaaaagcaccaaucucgugaagaacaaaugcgugaacuucaacuucaacggccugaccggcaccggcgugcugacagagagcaacaagaaguuccugccauuccagcaguuuggccgggauaucgccgauaccacagacgccguuagagauccccagacacuggaaauccuggacaucaccccaugcagcuucggcggagugucugugaucaccccuggcaccaacaccagcaaucagguggcagugcuguaccagggcgugaacuguaccgaagugcccguggccauucacgccgaucagcugacaccuacauggcggguguacuccaccggcagcaauguguuucagaccagagccggcugucugaucggagccgagcacgugaacaauagcuacgagugcgacauccccaucggcgcuggcaucugugccagcuaccagacacagacaaacagccccagacgggcuagaagcguggccagccagagcaucauugccuacacaaugucucugggcgccgagaacagcguggccuacuccaacaacucuaucgcuauccccaccaacuucaccaucagcgugaccaccgagauccugccuguguccaugaccaagaccagcguggacugcaccauguacaucugcggcgauuccaccgagugcuccaaccugcugcugcaguacggcagcuucugcacccagcugaauagagcccugacagggaucgccguggaacaggacaagaacacccaagagguguucgcccaagugaagcaaaucuacaagaccccuccuaucaaggacuucggcggcuucaauuucagccagauucugcccgauccuagcaagcccagcaagcggagcuucaucgaggaccugcuguucaacaaagugacacuggccgacgccggcuucaucaagcaguauggcgauugucugggcgacauugccgccagggaucugauuugcgcccagaaguuuaacggacugacagugcugccuccucugcugaccgaugagaugaucgcccaguacacaucugcccugcuggccggcacaaucacaagcggcuggacauuuggagcuggcgccgcucugcagauccccuuugcuaugcagauggccuaccgguucaacggcaucggagugacccagaaugugcuguacgagaaccagaagcugaucgccaaccaguucaacagcgccaucggcaagauccaggacagccugagcagcacagcaagcgcccugggaaagcugcaggacguggucaaccagaaugcccaggcacugaacacccuggucaagcagcuguccuccaacuucggcgccaucagcucugugcugaacgauauccugagcagacuggacaaggucgaggccgaggugcagaucgacagacugaucacaggcagacugcagagccuccagacauacgugacccagcagcugaucagagccgccgagauuagagccucugccaaucuggccgccaccaagaugucugagugugugcugggccagagcaagagaguggacuuuugcggcaagggcuaccaccugaugagcuucccucagucugccccucacggcgugguguuucugcacgugacauaugugcccgcucaagagaagaauuucaccaccgcuccagccaucugccacgacggcaaagcccacuuuccuagagaaggcguguucguguccaacggcacccauugguucgugacacagcggaacuucuacgagccccagaucaucaccaccgacaacaccuucgugucuggcaacugcgacguugugaucggcauugugaacaauaccguguacgacccucugcagcccgagcuggacagcuucaaagaggaacuggacaaguacuuuaagaaccacacaagccccgacguggaccugggcgauaucagcggaaucaaugccagcgucgugaacauccagaaagagaucgaccggcugaacgagguggccaagaaucugaacgagagccugaucgaccugcaagaacuggggaaguacgagcaguacaucaaguggcccugguacaucuggcugggcuuuaucgccggacugauugccaucgugauggucacaaucaugcuguguugcaugaccagcugcuguagcugccugaagggcuguuguagcuguggcagcugcugcaaguucgacgaggacgauucugagcccgugcugaagggcgugaaacugcacuacaccugauaauaggcuggagccucgguggccuagcuucuugccccuugggccuccccccagccccuccuccccuuccugcacccguacccccguggucuuugaauaaagucugagugggcggcaaaaaaaaaaaaaaaaaaaaaaaaaaaaaaaaaaaaaaaaaaaaaaaaaaaaaaaaaaaaaaaaaaaaaaaaaaaaaaaaaaaaaaaaaaaaaaaaaaaaucuag

SEQ ID NO: 26564 - RNA, 4100 nt, Artificial Sequence
  SARS-CoV-2/Wuhan/WIV05/2019__EPI_ISL_402128 spike protein mRNA gc mod (1-1273)(N439K_D614G)
gggaaauaagagagaaaagaagaguaagaagaaauauaagaccccggcgccgccaccauguucguguuucuggugcugcugccccugguguccagccagugugugaaccugaccaccagaacacagcugccuccagccuacaccaacagcuucaccagaggcguguacuaccccgacaagguguucagauccagcgugcugcacucuacccaggaccuguuccugccuuucuucagcaacgugaccugguuccacgccauccacguguccggcaccaauggcaccaagagauucgacaaccccgugcugcccuucaacgacgggguguacuuugccagcaccgagaaguccaacaucaucagaggcuggaucuucggcaccacacuggacagcaagacccagagccugcugaucgugaacaacgccaccaacguggucaucaaagugugcgaguuccaguucugcaacgaccccuuccugggcgucuacuaccacaagaacaacaagagcuggauggaaagcgaguuccggguguacagcagcgccaacaacugcaccuucgaguacgugucccagccuuuccugauggaccuggaaggcaagcagggcaacuucaagaaccugcgcgaguucguguucaagaacaucgacggcuacuucaaaaucuacagcaagcacaccccuaucaaccucgugcgggaucugccucagggcuucucugcucuggaaccccugguggaucugcccaucggcaucaacaucacccgguuucagacacugcuggcccugcacagaagcuaccugacaccuggcgauagcagcagcggauggacagcuggugccgccgcuuacuaugugggcuaccugcagccuagaaccuuccugcugaaguacaacgagaacggcaccaucaccgacgccguggauugugcucuggauccucugagcgagacaaagugcacccugaaguccuucaccguggaaaagggcaucuaccagaccagcaacuuccgggugcagcccaccgaauccaucgugcgguuccccaauaucaccaaucugugccccuucggcgagguguucaaugccaccagauucgccucuguguacgccuggaaccggaagcggaucagcaauugcguggccgacuacuccgugcuguacaacuccgccagcuucagcaccuucaagugcuacggcguguccccuaccaagcugaacgaccugugcuucacaaacguguacgccgacagcuucgugauccggggagaugaagugcggcagauugccccuggacagacaggcaagaucgccgacuacaacuacaagcugcccgacgacuucaccggcugugugauugccuggaacagcaagaaccuggacuccaaagucggcggcaacuacaauuaccuguaccggcuguuccggaaguccaaucugaagcccuucgagcgggacaucagcaccgaaaucuaucaggccggcagcaccccuugcaacggcguggaaggcuucaacugcuacuucccacugcaguccuacggcuuucagcccacaaauggcgugggcuaucagcccuacagagugguggugcugagcuucgaacugcugcaugcuccugccacagugugcggcccuaagaaaagcaccaaucucgugaagaacaaaugcgugaacuucaacuucaacggccugaccggcaccggcgugcugacagagagcaacaagaaguuccugccauuccagcaguuuggccgggauaucgccgauaccacagacgccguuagagauccccagacacuggaaauccuggacaucaccccaugcagcuucggcggagugucugugaucaccccuggcaccaacaccagcaaucagguggcagugcuguaccagggcgugaacuguaccgaagugcccguggccauucacgccgaucagcugacaccuacauggcggguguacuccaccggcagcaauguguuucagaccagagccggcugucugaucggagccgagcacgugaacaauagcuacgagugcgacauccccaucggcgcuggcaucugugccagcuaccagacacagacaaacagccccagacgggcuagaagcguggccagccagagcaucauugccuacacaaugucucugggcgccgagaacagcguggccuacuccaacaacucuaucgcuauccccaccaacuucaccaucagcgugaccaccgagauccugccuguguccaugaccaagaccagcguggacugcaccauguacaucugcggcgauuccaccgagugcuccaaccugcugcugcaguacggcagcuucugcacccagcugaauagagcccugacagggaucgccguggaacaggacaagaacacccaagagguguucgcccaagugaagcaaaucuacaagaccccuccuaucaaggacuucggcggcuucaauuucagccagauucugcccgauccuagcaagcccagcaagcggagcuucaucgaggaccugcuguucaacaaagugacacuggccgacgccggcuucaucaagcaguauggcgauugucugggcgacauugccgccagggaucugauuugcgcccagaaguuuaacggacugacagugcugccuccucugcugaccgaugagaugaucgcccaguacacaucugcccugcuggccggcacaaucacaagcggcuggacauuuggagcuggcgccgcucugcagauccccuuugcuaugcagauggccuaccgguucaacggcaucggagugacccagaaugugcuguacgagaaccagaagcugaucgccaaccaguucaacagcgccaucggcaagauccaggacagccugagcagcacagcaagcgcccugggaaagcugcaggacguggucaaccagaaugcccaggcacugaacacccuggucaagcagcuguccuccaacuucggcgccaucagcucugugcugaacgauauccugagcagacuggacaaggucgaggccgaggugcagaucgacagacugaucacaggcagacugcagagccuccagacauacgugacccagcagcugaucagagccgccgagauuagagccucugccaaucuggccgccaccaagaugucugagugugugcugggccagagcaagagaguggacuuuugcggcaagggcuaccaccugaugagcuucccucagucugccccucacggcgugguguuucugcacgugacauaugugcccgcucaagagaagaauuucaccaccgcuccagccaucugccacgacggcaaagcccacuuuccuagagaaggcguguucguguccaacggcacccauugguucgugacacagcggaacuucuacgagccccagaucaucaccaccgacaacaccuucgugucuggcaacugcgacguugugaucggcauugugaacaauaccguguacgacccucugcagcccgagcuggacagcuucaaagaggaacuggacaaguacuuuaagaaccacacaagccccgacguggaccugggcgauaucagcggaaucaaugccagcgucgugaacauccagaaagagaucgaccggcugaacgagguggccaagaaucugaacgagagccugaucgaccugcaagaacuggggaaguacgagcaguacaucaaguggcccugguacaucuggcugggcuuuaucgccggacugauugccaucgugauggucacaaucaugcuguguugcaugaccagcugcuguagcugccugaagggcuguuguagcuguggcagcugcugcaaguucgacgaggacgauucugagcccgugcugaagggcgugaaacugcacuacaccugauaauaggcuggagccucgguggccuagcuucuugccccuugggccuccccccagccccuccuccccuuccugcacccguacccccguggucuuugaauaaagucugagugggcggcaaaaaaaaaaaaaaaaaaaaaaaaaaaaaaaaaaaaaaaaaaaaaaaaaaaaaaaaaaaaaaaaaaaaaaaaaaaaaaaaaaaaaaaaaaaaaaaaaaaaucuag

SEQ ID NO: 26565 - RNA, 4100 nt, Artificial Sequence
  SARS-CoV-2/Wuhan/WIV05/2019__EPI_ISL_402128 spike protein mRNA gc mod (1-1273)(S477N_D614G)
gggaaauaagagagaaaagaagaguaagaagaaauauaagaccccggcgccgccaccauguucguguuucuggugcugcugccccugguguccagccagugugugaaccugaccaccagaacacagcugccuccagccuacaccaacagcuucaccagaggcguguacuaccccgacaagguguucagauccagcgugcugcacucuacccaggaccuguuccugccuuucuucagcaacgugaccugguuccacgccauccacguguccggcaccaauggcaccaagagauucgacaaccccgugcugcccuucaacgacgggguguacuuugccagcaccgagaaguccaacaucaucagaggcuggaucuucggcaccacacuggacagcaagacccagagccugcugaucgugaacaacgccaccaacguggucaucaaagugugcgaguuccaguucugcaacgaccccuuccugggcgucuacuaccacaagaacaacaagagcuggauggaaagcgaguuccggguguacagcagcgccaacaacugcaccuucgaguacgugucccagccuuuccugauggaccuggaaggcaagcagggcaacuucaagaaccugcgcgaguucguguucaagaacaucgacggcuacuucaaaaucuacagcaagcacaccccuaucaaccucgugcgggaucugccucagggcuucucugcucuggaaccccugguggaucugcccaucggcaucaacaucacccgguuucagacacugcuggcccugcacagaagcuaccugacaccuggcgauagcagcagcggauggacagcuggugccgccgcuuacuaugugggcuaccugcagccuagaaccuuccugcugaaguacaacgagaacggcaccaucaccgacgccguggauugugcucuggauccucugagcgagacaaagugcacccugaaguccuucaccguggaaaagggcaucuaccagaccagcaacuuccgggugcagcccaccgaauccaucgugcgguuccccaauaucaccaaucugugccccuucggcgagguguucaaugccaccagauucgccucuguguacgccuggaaccggaagcggaucagcaauugcguggccgacuacuccgugcuguacaacuccgccagcuucagcaccuucaagugcuacggcguguccccuaccaagcugaacgaccugugcuucacaaacguguacgccgacagcuucgugauccggggagaugaagugcggcagauugccccuggacagacaggcaagaucgccgacuacaacuacaagcugcccgacgacuucaccggcugugugauugccuggaacagcaacaaccuggacuccaaagucggcggcaacuacaauuaccuguaccggcuguuccggaaguccaaucugaagcccuucgagcgggacaucagcaccgaaaucuaucaggccggcaacaccccuugcaacggcguggaaggcuucaacugcuacuucccacugcaguccuacggcuuucagcccacaaauggcgugggcuaucagcccuacagagugguggugcugagcuucgaacugcugcaugcuccugccacagugugcggcccuaagaaaagcaccaaucucgugaagaacaaaugcgugaacuucaacuucaacggccugaccggcaccggcgugcugacagagagcaacaagaaguuccugccauuccagcaguuuggccgggauaucgccgauaccacagacgccguuagagauccccagacacuggaaauccuggacaucaccccaugcagcuucggcggagugucugugaucaccccuggcaccaacaccagcaaucagguggcagugcuguaccagggcgugaacuguaccgaagugcccguggccauucacgccgaucagcugacaccuacauggcggguguacuccaccggcagcaauguguuucagaccagagccggcugucugaucggagccgagcacgugaacaauagcuacgagugcgacauccccaucggcgcuggcaucugugccagcuaccagacacagacaaacagccccagacgggcuagaagcguggccagccagagcaucauugccuacacaaugucucugggcgccgagaacagcguggccuacuccaacaacucuaucgcuauccccaccaacuucaccaucagcgugaccaccgagauccugccuguguccaugaccaagaccagcguggacugcaccauguacaucugcggcgauuccaccgagugcuccaaccugcugcugcaguacggcagcuucugcacccagcugaauagagcccugacagggaucgccguggaacaggacaagaacacccaagagguguucgcccaagugaagcaaaucuacaagaccccuccuaucaaggacuucggcggcuucaauuucagccagauucugcccgauccuagcaagcccagcaagcggagcuucaucgaggaccugcuguucaacaaagugacacuggccgacgccggcuucaucaagcaguauggcgauugucugggcgacauugccgccagggaucugauuugcgcccagaaguuuaacggacugacagugcugccuccucugcugaccgaugagaugaucgcccaguacacaucugcccugcuggccggcacaaucacaagcggcuggacauuuggagcuggcgccgcucugcagauccccuuugcuaugcagauggccuaccgguucaacggcaucggagugacccagaaugugcuguacgagaaccagaagcugaucgccaaccaguucaacagcgccaucggcaagauccaggacagccugagcagcacagcaagcgcccugggaaagcugcaggacguggucaaccagaaugcccaggcacugaacacccuggucaagcagcuguccuccaacuucggcgccaucagcucugugcugaacgauauccugagcagacuggacaaggucgaggccgaggugcagaucgacagacugaucacaggcagacugcagagccuccagacauacgugacccagcagcugaucagagccgccgagauuagagccucugccaaucuggccgccaccaagaugucugagugugugcugggccagagcaagagaguggacuuuugcggcaagggcuaccaccugaugagcuucccucagucugccccucacggcgugguguuucugcacgugacauaugugcccgcucaagagaagaauuucaccaccgcuccagccaucugccacgacggcaaagcccacuuuccuagagaaggcguguucguguccaacggcacccauugguucgugacacagcggaacuucuacgagccccagaucaucaccaccgacaacaccuucgugucuggcaacugcgacguugugaucggcauugugaacaauaccguguacgacccucugcagcccgagcuggacagcuucaaagaggaacuggacaaguacuuuaagaaccacacaagccccgacguggaccugggcgauaucagcggaaucaaugccagcgucgugaacauccagaaagagaucgaccggcugaacgagguggccaagaaucugaacgagagccugaucgaccugcaagaacuggggaaguacgagcaguacaucaaguggcccugguacaucuggcugggcuuuaucgccggacugauugccaucgugauggucacaaucaugcuguguugcaugaccagcugcuguagcugccugaagggcuguuguagcuguggcagcugcugcaaguucgacgaggacgauucugagcccgugcugaagggcgugaaacugcacuacaccugauaauaggcuggagccucgguggccuagcuucuugccccuugggccuccccccagccccuccuccccuuccugcacccguacccccguggucuuugaauaaagucugagugggcggcaaaaaaaaaaaaaaaaaaaaaaaaaaaaaaaaaaaaaaaaaaaaaaaaaaaaaaaaaaaaaaaaaaaaaaaaaaaaaaaaaaaaaaaaaaaaaaaaaaaaucuag

SEQ ID NO: 26566 - RNA, 4100 nt, Artificial Sequence
  SARS-CoV-2/Wuhan/WIV05/2019__EPI_ISL_402128 spike protein mRNA gc mod (1-1273)(N501Y_D614G)
gggaaauaagagagaaaagaagaguaagaagaaauauaagaccccggcgccgccaccauguucguguuucuggugcugcugccccugguguccagccagugugugaaccugaccaccagaacacagcugccuccagccuacaccaacagcuucaccagaggcguguacuaccccgacaagguguucagauccagcgugcugcacucuacccaggaccuguuccugccuuucuucagcaacgugaccugguuccacgccauccacguguccggcaccaauggcaccaagagauucgacaaccccgugcugcccuucaacgacgggguguacuuugccagcaccgagaaguccaacaucaucagaggcuggaucuucggcaccacacuggacagcaagacccagagccugcugaucgugaacaacgccaccaacguggucaucaaagugugcgaguuccaguucugcaacgaccccuuccugggcgucuacuaccacaagaacaacaagagcuggauggaaagcgaguuccggguguacagcagcgccaacaacugcaccuucgaguacgugucccagccuuuccugauggaccuggaaggcaagcagggcaacuucaagaaccugcgcgaguucguguucaagaacaucgacggcuacuucaaaaucuacagcaagcacaccccuaucaaccucgugcgggaucugccucagggcuucucugcucuggaaccccugguggaucugcccaucggcaucaacaucacccgguuucagacacugcuggcccugcacagaagcuaccugacaccuggcgauagcagcagcggauggacagcuggugccgccgcuuacuaugugggcuaccugcagccuagaaccuuccugcugaaguacaacgagaacggcaccaucaccgacgccguggauugugcucuggauccucugagcgagacaaagugcacccugaaguccuucaccguggaaaagggcaucuaccagaccagcaacuuccgggugcagcccaccgaauccaucgugcgguuccccaauaucaccaaucugugccccuucggcgagguguucaaugccaccagauucgccucuguguacgccuggaaccggaagcggaucagcaauugcguggccgacuacuccgugcuguacaacuccgccagcuucagcaccuucaagugcuacggcguguccccuaccaagcugaacgaccugugcuucacaaacguguacgccgacagcuucgugauccggggagaugaagugcggcagauugccccuggacagacaggcaagaucgccgacuacaacuacaagcugcccgacgacuucaccggcugugugauugccuggaacagcaacaaccuggacuccaaagucggcggcaacuacaauuaccuguaccggcuguuccggaaguccaaucugaagcccuucgagcgggacaucagcaccgaaaucuaucaggccggcagcaccccuugcaacggcguggaaggcuucaacugcuacuucccacugcaguccuacggcuuucagcccacauacggcgugggcuaucagcccuacagagugguggugcugagcuucgaacugcugcaugcuccugccacagugugcggcccuaagaaaagcaccaaucucgugaagaacaaaugcgugaacuucaacuucaacggccugaccggcaccggcgugcugacagagagcaacaagaaguuccugccauuccagcaguuuggccgggauaucgccgauaccacagacgccguuagagauccccagacacuggaaauccuggacaucaccccaugcagcuucggcggagugucugugaucaccccuggcaccaacaccagcaaucagguggcagugcuguaccagggcgugaacuguaccgaagugcccguggccauucacgccgaucagcugacaccuacauggcggguguacuccaccggcagcaauguguuucagaccagagccggcugucugaucggagccgagcacgugaacaauagcuacgagugcgacauccccaucggcgcuggcaucugugccagcuaccagacacagacaaacagccccagacgggcuagaagcguggccagccagagcaucauugccuacacaaugucucugggcgccgagaacagcguggccuacuccaacaacucuaucgcuauccccaccaacuucaccaucagcgugaccaccgagauccugccuguguccaugaccaagaccagcguggacugcaccauguacaucugcggcgauuccaccgagugcuccaaccugcugcugcaguacggcagcuucugcacccagcugaauagagcccugacagggaucgccguggaacaggacaagaacacccaagagguguucgcccaagugaagcaaaucuacaagaccccuccuaucaaggacuucggcggcuucaauuucagccagauucugcccgauccuagcaagcccagcaagcggagcuucaucgaggaccugcuguucaacaaagugacacuggccgacgccggcuucaucaagcaguauggcgauugucugggcgacauugccgccagggaucugauuugcgcccagaaguuuaacggacugacagugcugccuccucugcugaccgaugagaugaucgcccaguacacaucugcccugcuggccggcacaaucacaagcggcuggacauuuggagcuggcgccgcucugcagauccccuuugcuaugcagauggccuaccgguucaacggcaucggagugacccagaaugugcuguacgagaaccagaagcugaucgccaaccaguucaacagcgccaucggcaagauccaggacagccugagcagcacagcaagcgcccugggaaagcugcaggacguggucaaccagaaugcccaggcacugaacacccuggucaagcagcuguccuccaacuucggcgccaucagcucugugcugaacgauauccugagcagacuggacaaggucgaggccgaggugcagaucgacagacugaucacaggcagacugcagagccuccagacauacgugacccagcagcugaucagagccgccgagauuagagccucugccaaucuggccgccaccaagaugucugagugugugcugggccagagcaagagaguggacuuuugcggcaagggcuaccaccugaugagcuucccucagucugccccucacggcgugguguuucugcacgugacauaugugcccgcucaagagaagaauuucaccaccgcuccagccaucugccacgacggcaaagcccacuuuccuagagaaggcguguucguguccaacggcacccauugguucgugacacagcggaacuucuacgagccccagaucaucaccaccgacaacaccuucgugucuggcaacugcgacguugugaucggcauugugaacaauaccguguacgacccucugcagcccgagcuggacagcuucaaagaggaacuggacaaguacuuuaagaaccacacaagccccgacguggaccugggcgauaucagcggaaucaaugccagcgucgugaacauccagaaagagaucgaccggcugaacgagguggccaagaaucugaacgagagccugaucgaccugcaagaacuggggaaguacgagcaguacaucaaguggcccugguacaucuggcugggcuuuaucgccggacugauugccaucgugauggucacaaucaugcuguguugcaugaccagcugcuguagcugccugaagggcuguuguagcuguggcagcugcugcaaguucgacgaggacgauucugagcccgugcugaagggcgugaaacugcacuacaccugauaauaggcuggagccucgguggccuagcuucuugccccuugggccuccccccagccccuccuccccuuccugcacccguacccccguggucuuugaauaaagucugagugggcggcaaaaaaaaaaaaaaaaaaaaaaaaaaaaaaaaaaaaaaaaaaaaaaaaaaaaaaaaaaaaaaaaaaaaaaaaaaaaaaaaaaaaaaaaaaaaaaaaaaaaucuag

SEQ ID NO: 26567 - RNA, 4094 nt, Artificial Sequence
  SARS-CoV-2/Wuhan/WIV05/2019__EPI_ISL_402128 spike protein mRNA gc mod (1-1273)(H69del_V70del_D614G)
gggaaauaagagagaaaagaagaguaagaagaaauauaagaccccggcgccgccaccauguucguguuucuggugcugcugccccugguguccagccagugugugaaccugaccaccagaacacagcugccuccagccuacaccaacagcuucaccagaggcguguacuaccccgacaagguguucagauccagcgugcugcacucuacccaggaccuguuccugccuuucuucagcaacgugaccugguuccacgccaucuccggcaccaauggcaccaagagauucgacaaccccgugcugcccuucaacgacgggguguacuuugccagcaccgagaaguccaacaucaucagaggcuggaucuucggcaccacacuggacagcaagacccagagccugcugaucgugaacaacgccaccaacguggucaucaaagugugcgaguuccaguucugcaacgaccccuuccugggcgucuacuaccacaagaacaacaagagcuggauggaaagcgaguuccggguguacagcagcgccaacaacugcaccuucgaguacgugucccagccuuuccugauggaccuggaaggcaagcagggcaacuucaagaaccugcgcgaguucguguucaagaacaucgacggcuacuucaaaaucuacagcaagcacaccccuaucaaccucgugcgggaucugccucagggcuucucugcucuggaaccccugguggaucugcccaucggcaucaacaucacccgguuucagacacugcuggcccugcacagaagcuaccugacaccuggcgauagcagcagcggauggacagcuggugccgccgcuuacuaugugggcuaccugcagccuagaaccuuccugcugaaguacaacgagaacggcaccaucaccgacgccguggauugugcucuggauccucugagcgagacaaagugcacccugaaguccuucaccguggaaaagggcaucuaccagaccagcaacuuccgggugcagcccaccgaauccaucgugcgguuccccaauaucaccaaucugugccccuucggcgagguguucaaugccaccagauucgccucuguguacgccuggaaccggaagcggaucagcaauugcguggccgacuacuccgugcuguacaacuccgccagcuucagcaccuucaagugcuacggcguguccccuaccaagcugaacgaccugugcuucacaaacguguacgccgacagcuucgugauccggggagaugaagugcggcagauugccccuggacagacaggcaagaucgccgacuacaacuacaagcugcccgacgacuucaccggcugugugauugccuggaacagcaacaaccuggacuccaaagucggcggcaacuacaauuaccuguaccggcuguuccggaaguccaaucugaagcccuucgagcgggacaucagcaccgaaaucuaucaggccggcagcaccccuugcaacggcguggaaggcuucaacugcuacuucccacugcaguccuacggcuuucagcccacaaauggcgugggcuaucagcccuacagagugguggugcugagcuucgaacugcugcaugcuccugccacagugugcggcccuaagaaaagcaccaaucucgugaagaacaaaugcgugaacuucaacuucaacggccugaccggcaccggcgugcugacagagagcaacaagaaguuccugccauuccagcaguuuggccgggauaucgccgauaccacagacgccguuagagauccccagacacuggaaauccuggacaucaccccaugcagcuucggcggagugucugugaucaccccuggcaccaacaccagcaaucagguggcagugcuguaccagggcgugaacuguaccgaagugcccguggccauucacgccgaucagcugacaccuacauggcggguguacuccaccggcagcaauguguuucagaccagagccggcugucugaucggagccgagcacgugaacaauagcuacgagugcgacauccccaucggcgcuggcaucugugccagcuaccagacacagacaaacagccccagacgggcuagaagcguggccagccagagcaucauugccuacacaaugucucugggcgccgagaacagcguggccuacuccaacaacucuaucgcuauccccaccaacuucaccaucagcgugaccaccgagauccugccuguguccaugaccaagaccagcguggacugcaccauguacaucugcggcgauuccaccgagugcuccaaccugcugcugcaguacggcagcuucugcacccagcugaauagagcccugacagggaucgccguggaacaggacaagaacacccaagagguguucgcccaagugaagcaaaucuacaagaccccuccuaucaaggacuucggcggcuucaauuucagccagauucugcccgauccuagcaagcccagcaagcggagcuucaucgaggaccugcuguucaacaaagugacacuggccgacgccggcuucaucaagcaguauggcgauugucugggcgacauugccgccagggaucugauuugcgcccagaaguuuaacggacugacagugcugccuccucugcugaccgaugagaugaucgcccaguacacaucugcccugcuggccggcacaaucacaagcggcuggacauuuggagcuggcgccgcucugcagauccccuuugcuaugcagauggccuaccgguucaacggcaucggagugacccagaaugugcuguacgagaaccagaagcugaucgccaaccaguucaacagcgccaucggcaagauccaggacagccugagcagcacagcaagcgcccugggaaagcugcaggacguggucaaccagaaugcccaggcacugaacacccuggucaagcagcuguccuccaacuucggcgccaucagcucugugcugaacgauauccugagcagacuggacaaggucgaggccgaggugcagaucgacagacugaucacaggcagacugcagagccuccagacauacgugacccagcagcugaucagagccgccgagauuagagccucugccaaucuggccgccaccaagaugucugagugugugcugggccagagcaagagaguggacuuuugcggcaagggcuaccaccugaugagcuucccucagucugccccucacggcgugguguuucugcacgugacauaugugcccgcucaagagaagaauuucaccaccgcuccagccaucugccacgacggcaaagcccacuuuccuagagaaggcguguucguguccaacggcacccauugguucgugacacagcggaacuucuacgagccccagaucaucaccaccgacaacaccuucgugucuggcaacugcgacguugugaucggcauugugaacaauaccguguacgacccucugcagcccgagcuggacagcuucaaagaggaacuggacaaguacuuuaagaaccacacaagccccgacguggaccugggcgauaucagcggaaucaaugccagcgucgugaacauccagaaagagaucgaccggcugaacgagguggccaagaaucugaacgagagccugaucgaccugcaagaacuggggaaguacgagcaguacaucaaguggcccugguacaucuggcugggcuuuaucgccggacugauugccaucgugauggucacaaucaugcuguguugcaugaccagcugcuguagcugccugaagggcuguuguagcuguggcagcugcugcaaguucgacgaggacgauucugagcccgugcugaagggcgugaaacugcacuacaccugauaauaggcuggagccucgguggccuagcuucuugccccuugggccuccccccagccccuccuccccuuccugcacccguacccccguggucuuugaauaaagucugagugggcggcaaaaaaaaaaaaaaaaaaaaaaaaaaaaaaaaaaaaaaaaaaaaaaaaaaaaaaaaaaaaaaaaaaaaaaaaaaaaaaaaaaaaaaaaaaaaaaaaaaaaucuag

SEQ ID NO: 26568 - RNA, 4100 nt, Artificial Sequence
  SARS-CoV-2/Wuhan/WIV05/2019__EPI_ISL_402128 spike protein mRNA gc mod (1-1273)(Y453F_D614G)
gggaaauaagagagaaaagaagaguaagaagaaauauaagaccccggcgccgccaccauguucguguuucuggugcugcugccccugguguccagccagugugugaaccugaccaccagaacacagcugccuccagccuacaccaacagcuucaccagaggcguguacuaccccgacaagguguucagauccagcgugcugcacucuacccaggaccuguuccugccuuucuucagcaacgugaccugguuccacgccauccacguguccggcaccaauggcaccaagagauucgacaaccccgugcugcccuucaacgacgggguguacuuugccagcaccgagaaguccaacaucaucagaggcuggaucuucggcaccacacuggacagcaagacccagagccugcugaucgugaacaacgccaccaacguggucaucaaagugugcgaguuccaguucugcaacgaccccuuccugggcgucuacuaccacaagaacaacaagagcuggauggaaagcgaguuccggguguacagcagcgccaacaacugcaccuucgaguacgugucccagccuuuccugauggaccuggaaggcaagcagggcaacuucaagaaccugcgcgaguucguguucaagaacaucgacggcuacuucaaaaucuacagcaagcacaccccuaucaaccucgugcgggaucugccucagggcuucucugcucuggaaccccugguggaucugcccaucggcaucaacaucacccgguuucagacacugcuggcccugcacagaagcuaccugacaccuggcgauagcagcagcggauggacagcuggugccgccgcuuacuaugugggcuaccugcagccuagaaccuuccugcugaaguacaacgagaacggcaccaucaccgacgccguggauugugcucuggauccucugagcgagacaaagugcacccugaaguccuucaccguggaaaagggcaucuaccagaccagcaacuuccgggugcagcccaccgaauccaucgugcgguuccccaauaucaccaaucugugccccuucggcgagguguucaaugccaccagauucgccucuguguacgccuggaaccggaagcggaucagcaauugcguggccgacuacuccgugcuguacaacuccgccagcuucagcaccuucaagugcuacggcguguccccuaccaagcugaacgaccugugcuucacaaacguguacgccgacagcuucgugauccggggagaugaagugcggcagauugccccuggacagacaggcaagaucgccgacuacaacuacaagcugcccgacgacuucaccggcugugugauugccuggaacagcaacaaccuggacuccaaagucggcggcaacuacaauuaccuguuccggcuguuccggaaguccaaucugaagcccuucgagcgggacaucagcaccgaaaucuaucaggccggcagcaccccuugcaacggcguggaaggcuucaacugcuacuucccacugcaguccuacggcuuucagcccacaaauggcgugggcuaucagcccuacagagugguggugcugagcuucgaacugcugcaugcuccugccacagugugcggcccuaagaaaagcaccaaucucgugaagaacaaaugcgugaacuucaacuucaacggccugaccggcaccggcgugcugacagagagcaacaagaaguuccugccauuccagcaguuuggccgggauaucgccgauaccacagacgccguuagagauccccagacacuggaaauccuggacaucaccccaugcagcuucggcggagugucugugaucaccccuggcaccaacaccagcaaucagguggcagugcuguaccagggcgugaacuguaccgaagugcccguggccauucacgccgaucagcugacaccuacauggcggguguacuccaccggcagcaauguguuucagaccagagccggcugucugaucggagccgagcacgugaacaauagcuacgagugcgacauccccaucggcgcuggcaucugugccagcuaccagacacagacaaacagccccagacgggcuagaagcguggccagccagagcaucauugccuacacaaugucucugggcgccgagaacagcguggccuacuccaacaacucuaucgcuauccccaccaacuucaccaucagcgugaccaccgagauccugccuguguccaugaccaagaccagcguggacugcaccauguacaucugcggcgauuccaccgagugcuccaaccugcugcugcaguacggcagcuucugcacccagcugaauagagcccugacagggaucgccguggaacaggacaagaacacccaagagguguucgcccaagugaagcaaaucuacaagaccccuccuaucaaggacuucggcggcuucaauuucagccagauucugcccgauccuagcaagcccagcaagcggagcuucaucgaggaccugcuguucaacaaagugacacuggccgacgccggcuucaucaagcaguauggcgauugucugggcgacauugccgccagggaucugauuugcgcccagaaguuuaacggacugacagugcugccuccucugcugaccgaugagaugaucgcccaguacacaucugcccugcuggccggcacaaucacaagcggcuggacauuuggagcuggcgccgcucugcagauccccuuugcuaugcagauggccuaccgguucaacggcaucggagugacccagaaugugcuguacgagaaccagaagcugaucgccaaccaguucaacagcgccaucggcaagauccaggacagccugagcagcacagcaagcgcccugggaaagcugcaggacguggucaaccagaaugcccaggcacugaacacccuggucaagcagcuguccuccaacuucggcgccaucagcucugugcugaacgauauccugagcagacuggacaaggucgaggccgaggugcagaucgacagacugaucacaggcagacugcagagccuccagacauacgugacccagcagcugaucagagccgccgagauuagagccucugccaaucuggccgccaccaagaugucugagugugugcugggccagagcaagagaguggacuuuugcggcaagggcuaccaccugaugagcuucccucagucugccccucacggcgugguguuucugcacgugacauaugugcccgcucaagagaagaauuucaccaccgcuccagccaucugccacgacggcaaagcccacuuuccuagagaaggcguguucguguccaacggcacccauugguucgugacacagcggaacuucuacgagccccagaucaucaccaccgacaacaccuucgugucuggcaacugcgacguugugaucggcauugugaacaauaccguguacgacccucugcagcccgagcuggacagcuucaaagaggaacuggacaaguacuuuaagaaccacacaagccccgacguggaccugggcgauaucagcggaaucaaugccagcgucgugaacauccagaaagagaucgaccggcugaacgagguggccaagaaucugaacgagagccugaucgaccugcaagaacuggggaaguacgagcaguacaucaaguggcccugguacaucuggcugggcuuuaucgccggacugauugccaucgugauggucacaaucaugcuguguugcaugaccagcugcuguagcugccugaagggcuguuguagcuguggcagcugcugcaaguucgacgaggacgauucugagcccgugcugaagggcgugaaacugcacuacaccugauaauaggcuggagccucgguggccuagcuucuugccccuugggccuccccccagccccuccuccccuuccugcacccguacccccguggucuuugaauaaagucugagugggcggcaaaaaaaaaaaaaaaaaaaaaaaaaaaaaaaaaaaaaaaaaaaaaaaaaaaaaaaaaaaaaaaaaaaaaaaaaaaaaaaaaaaaaaaaaaaaaaaaaaaaucuag

SEQ ID NO: 26569 - RNA, 4100 nt, Artificial Sequence
  SARS-CoV-2/Wuhan/WIV05/2019__EPI_ISL_402128 spike protein mRNA gc mod (1-1273)(D614G_I692V)
gggaaauaagagagaaaagaagaguaagaagaaauauaagaccccggcgccgccaccauguucguguuucuggugcugcugccccugguguccagccagugugugaaccugaccaccagaacacagcugccuccagccuacaccaacagcuucaccagaggcguguacuaccccgacaagguguucagauccagcgugcugcacucuacccaggaccuguuccugccuuucuucagcaacgugaccugguuccacgccauccacguguccggcaccaauggcaccaagagauucgacaaccccgugcugcccuucaacgacgggguguacuuugccagcaccgagaaguccaacaucaucagaggcuggaucuucggcaccacacuggacagcaagacccagagccugcugaucgugaacaacgccaccaacguggucaucaaagugugcgaguuccaguucugcaacgaccccuuccugggcgucuacuaccacaagaacaacaagagcuggauggaaagcgaguuccggguguacagcagcgccaacaacugcaccuucgaguacgugucccagccuuuccugauggaccuggaaggcaagcagggcaacuucaagaaccugcgcgaguucguguucaagaacaucgacggcuacuucaaaaucuacagcaagcacaccccuaucaaccucgugcgggaucugccucagggcuucucugcucuggaaccccugguggaucugcccaucggcaucaacaucacccgguuucagacacugcuggcccugcacagaagcuaccugacaccuggcgauagcagcagcggauggacagcuggugccgccgcuuacuaugugggcuaccugcagccuagaaccuuccugcugaaguacaacgagaacggcaccaucaccgacgccguggauugugcucuggauccucugagcgagacaaagugcacccugaaguccuucaccguggaaaagggcaucuaccagaccagcaacuuccgggugcagcccaccgaauccaucgugcgguuccccaauaucaccaaucugugccccuucggcgagguguucaaugccaccagauucgccucuguguacgccuggaaccggaagcggaucagcaauugcguggccgacuacuccgugcuguacaacuccgccagcuucagcaccuucaagugcuacggcguguccccuaccaagcugaacgaccugugcuucacaaacguguacgccgacagcuucgugauccggggagaugaagugcggcagauugccccuggacagacaggcaagaucgccgacuacaacuacaagcugcccgacgacuucaccggcugugugauugccuggaacagcaacaaccuggacuccaaagucggcggcaacuacaauuaccuguaccggcuguuccggaaguccaaucugaagcccuucgagcgggacaucagcaccgaaaucuaucaggccggcagcaccccuugcaacggcguggaaggcuucaacugcuacuucccacugcaguccuacggcuuucagcccacaaauggcgugggcuaucagcccuacagagugguggugcugagcuucgaacugcugcaugcuccugccacagugugcggcccuaagaaaagcaccaaucucgugaagaacaaaugcgugaacuucaacuucaacggccugaccggcaccggcgugcugacagagagcaacaagaaguuccugccauuccagcaguuuggccgggauaucgccgauaccacagacgccguuagagauccccagacacuggaaauccuggacaucaccccaugcagcuucggcggagugucugugaucaccccuggcaccaacaccagcaaucagguggcagugcuguaccagggcgugaacuguaccgaagugcccguggccauucacgccgaucagcugacaccuacauggcggguguacuccaccggcagcaauguguuucagaccagagccggcugucugaucggagccgagcacgugaacaauagcuacgagugcgacauccccaucggcgcuggcaucugugccagcuaccagacacagacaaacagccccagacgggcuagaagcguggccagccagagcgugauugccuacacaaugucucugggcgccgagaacagcguggccuacuccaacaacucuaucgcuauccccaccaacuucaccaucagcgugaccaccgagauccugccuguguccaugaccaagaccagcguggacugcaccauguacaucugcggcgauuccaccgagugcuccaaccugcugcugcaguacggcagcuucugcacccagcugaauagagcccugacagggaucgccguggaacaggacaagaacacccaagagguguucgcccaagugaagcaaaucuacaagaccccuccuaucaaggacuucggcggcuucaauuucagccagauucugcccgauccuagcaagcccagcaagcggagcuucaucgaggaccugcuguucaacaaagugacacuggccgacgccggcuucaucaagcaguauggcgauugucugggcgacauugccgccagggaucugauuugcgcccagaaguuuaacggacugacagugcugccuccucugcugaccgaugagaugaucgcccaguacacaucugcccugcuggccggcacaaucacaagcggcuggacauuuggagcuggcgccgcucugcagauccccuuugcuaugcagauggccuaccgguucaacggcaucggagugacccagaaugugcuguacgagaaccagaagcugaucgccaaccaguucaacagcgccaucggcaagauccaggacagccugagcagcacagcaagcgcccugggaaagcugcaggacguggucaaccagaaugcccaggcacugaacacccuggucaagcagcuguccuccaacuucggcgccaucagcucugugcugaacgauauccugagcagacuggacaaggucgaggccgaggugcagaucgacagacugaucacaggcagacugcagagccuccagacauacgugacccagcagcugaucagagccgccgagauuagagccucugccaaucuggccgccaccaagaugucugagugugugcugggccagagcaagagaguggacuuuugcggcaagggcuaccaccugaugagcuucccucagucugccccucacggcgugguguuucugcacgugacauaugugcccgcucaagagaagaauuucaccaccgcuccagccaucugccacgacggcaaagcccacuuuccuagagaaggcguguucguguccaacggcacccauugguucgugacacagcggaacuucuacgagccccagaucaucaccaccgacaacaccuucgugucuggcaacugcgacguugugaucggcauugugaacaauaccguguacgacccucugcagcccgagcuggacagcuucaaagaggaacuggacaaguacuuuaagaaccacacaagccccgacguggaccugggcgauaucagcggaaucaaugccagcgucgugaacauccagaaagagaucgaccggcugaacgagguggccaagaaucugaacgagagccugaucgaccugcaagaacuggggaaguacgagcaguacaucaaguggcccugguacaucuggcugggcuuuaucgccggacugauugccaucgugauggucacaaucaugcuguguugcaugaccagcugcuguagcugccugaagggcuguuguagcuguggcagcugcugcaaguucgacgaggacgauucugagcccgugcugaagggcgugaaacugcacuacaccugauaauaggcuggagccucgguggccuagcuucuugccccuugggccuccccccagccccuccuccccuuccugcacccguacccccguggucuuugaauaaagucugagugggcggcaaaaaaaaaaaaaaaaaaaaaaaaaaaaaaaaaaaaaaaaaaaaaaaaaaaaaaaaaaaaaaaaaaaaaaaaaaaaaaaaaaaaaaaaaaaaaaaaaaaaucuag

SEQ ID NO: 26570 - RNA, 4100 nt, Artificial Sequence
  SARS-CoV-2/Wuhan/WIV05/2019__EPI_ISL_402128 spike protein mRNA gc mod (1-1273)(D614G_M1229I)
gggaaauaagagagaaaagaagaguaagaagaaauauaagaccccggcgccgccaccauguucguguuucuggugcugcugccccugguguccagccagugugugaaccugaccaccagaacacagcugccuccagccuacaccaacagcuucaccagaggcguguacuaccccgacaagguguucagauccagcgugcugcacucuacccaggaccuguuccugccuuucuucagcaacgugaccugguuccacgccauccacguguccggcaccaauggcaccaagagauucgacaaccccgugcugcccuucaacgacgggguguacuuugccagcaccgagaaguccaacaucaucagaggcuggaucuucggcaccacacuggacagcaagacccagagccugcugaucgugaacaacgccaccaacguggucaucaaagugugcgaguuccaguucugcaacgaccccuuccugggcgucuacuaccacaagaacaacaagagcuggauggaaagcgaguuccggguguacagcagcgccaacaacugcaccuucgaguacgugucccagccuuuccugauggaccuggaaggcaagcagggcaacuucaagaaccugcgcgaguucguguucaagaacaucgacggcuacuucaaaaucuacagcaagcacaccccuaucaaccucgugcgggaucugccucagggcuucucugcucuggaaccccugguggaucugcccaucggcaucaacaucacccgguuucagacacugcuggcccugcacagaagcuaccugacaccuggcgauagcagcagcggauggacagcuggugccgccgcuuacuaugugggcuaccugcagccuagaaccuuccugcugaaguacaacgagaacggcaccaucaccgacgccguggauugugcucuggauccucugagcgagacaaagugcacccugaaguccuucaccguggaaaagggcaucuaccagaccagcaacuuccgggugcagcccaccgaauccaucgugcgguuccccaauaucaccaaucugugccccuucggcgagguguucaaugccaccagauucgccucuguguacgccuggaaccggaagcggaucagcaauugcguggccgacuacuccgugcuguacaacuccgccagcuucagcaccuucaagugcuacggcguguccccuaccaagcugaacgaccugugcuucacaaacguguacgccgacagcuucgugauccggggagaugaagugcggcagauugccccuggacagacaggcaagaucgccgacuacaacuacaagcugcccgacgacuucaccggcugugugauugccuggaacagcaacaaccuggacuccaaagucggcggcaacuacaauuaccuguaccggcuguuccggaaguccaaucugaagcccuucgagcgggacaucagcaccgaaaucuaucaggccggcagcaccccuugcaacggcguggaaggcuucaacugcuacuucccacugcaguccuacggcuuucagcccacaaauggcgugggcuaucagcccuacagagugguggugcugagcuucgaacugcugcaugcuccugccacagugugcggcccuaagaaaagcaccaaucucgugaagaacaaaugcgugaacuucaacuucaacggccugaccggcaccggcgugcugacagagagcaacaagaaguuccugccauuccagcaguuuggccgggauaucgccgauaccacagacgccguuagagauccccagacacuggaaauccuggacaucaccccaugcagcuucggcggagugucugugaucaccccuggcaccaacaccagcaaucagguggcagugcuguaccagggcgugaacuguaccgaagugcccguggccauucacgccgaucagcugacaccuacauggcggguguacuccaccggcagcaauguguuucagaccagagccggcugucugaucggagccgagcacgugaacaauagcuacgagugcgacauccccaucggcgcuggcaucugugccagcuaccagacacagacaaacagccccagacgggcuagaagcguggccagccagagcaucauugccuacacaaugucucugggcgccgagaacagcguggccuacuccaacaacucuaucgcuauccccaccaacuucaccaucagcgugaccaccgagauccugccuguguccaugaccaagaccagcguggacugcaccauguacaucugcggcgauuccaccgagugcuccaaccugcugcugcaguacggcagcuucugcacccagcugaauagagcccugacagggaucgccguggaacaggacaagaacacccaagagguguucgcccaagugaagcaaaucuacaagaccccuccuaucaaggacuucggcggcuucaauuucagccagauucugcccgauccuagcaagcccagcaagcggagcuucaucgaggaccugcuguucaacaaagugacacuggccgacgccggcuucaucaagcaguauggcgauugucugggcgacauugccgccagggaucugauuugcgcccagaaguuuaacggacugacagugcugccuccucugcugaccgaugagaugaucgcccaguacacaucugcccugcuggccggcacaaucacaagcggcuggacauuuggagcuggcgccgcucugcagauccccuuugcuaugcagauggccuaccgguucaacggcaucggagugacccagaaugugcuguacgagaaccagaagcugaucgccaaccaguucaacagcgccaucggcaagauccaggacagccugagcagcacagcaagcgcccugggaaagcugcaggacguggucaaccagaaugcccaggcacugaacacccuggucaagcagcuguccuccaacuucggcgccaucagcucugugcugaacgauauccugagcagacuggacaaggucgaggccgaggugcagaucgacagacugaucacaggcagacugcagagccuccagacauacgugacccagcagcugaucagagccgccgagauuagagccucugccaaucuggccgccaccaagaugucugagugugugcugggccagagcaagagaguggacuuuugcggcaagggcuaccaccugaugagcuucccucagucugccccucacggcgugguguuucugcacgugacauaugugcccgcucaagagaagaauuucaccaccgcuccagccaucugccacgacggcaaagcccacuuuccuagagaaggcguguucguguccaacggcacccauugguucgugacacagcggaacuucuacgagccccagaucaucaccaccgacaacaccuucgugucuggcaacugcgacguugugaucggcauugugaacaauaccguguacgacccucugcagcccgagcuggacagcuucaaagaggaacuggacaaguacuuuaagaaccacacaagccccgacguggaccugggcgauaucagcggaaucaaugccagcgucgugaacauccagaaagagaucgaccggcugaacgagguggccaagaaucugaacgagagccugaucgaccugcaagaacuggggaaguacgagcaguacaucaaguggcccugguacaucuggcugggcuuuaucgccggacugauugccaucgugaucgucacaaucaugcuguguugcaugaccagcugcuguagcugccugaagggcuguuguagcuguggcagcugcugcaaguucgacgaggacgauucugagcccgugcugaagggcgugaaacugcacuacaccugauaauaggcuggagccucgguggccuagcuucuugccccuugggccuccccccagccccuccuccccuuccugcacccguacccccguggucuuugaauaaagucugagugggcggcaaaaaaaaaaaaaaaaaaaaaaaaaaaaaaaaaaaaaaaaaaaaaaaaaaaaaaaaaaaaaaaaaaaaaaaaaaaaaaaaaaaaaaaaaaaaaaaaaaaaucuag

SEQ ID NO: 26571 - RNA, 4094 nt, Artificial Sequence
  SARS-CoV-2/Wuhan/WIV05/2019__EPI_ISL_402128 spike protein mRNA gc mod (1-1273)(H69del_V70del_A222V_Y453F_S477N_D614G_I692V)
gggaaauaagagagaaaagaagaguaagaagaaauauaagaccccggcgccgccaccauguucguguuucuggugcugcugccccugguguccagccagugugugaaccugaccaccagaacacagcugccuccagccuacaccaacagcuucaccagaggcguguacuaccccgacaagguguucagauccagcgugcugcacucuacccaggaccuguuccugccuuucuucagcaacgugaccugguuccacgccaucuccggcaccaauggcaccaagagauucgacaaccccgugcugcccuucaacgacgggguguacuuugccagcaccgagaaguccaacaucaucagaggcuggaucuucggcaccacacuggacagcaagacccagagccugcugaucgugaacaacgccaccaacguggucaucaaagugugcgaguuccaguucugcaacgaccccuuccugggcgucuacuaccacaagaacaacaagagcuggauggaaagcgaguuccggguguacagcagcgccaacaacugcaccuucgaguacgugucccagccuuuccugauggaccuggaaggcaagcagggcaacuucaagaaccugcgcgaguucguguucaagaacaucgacggcuacuucaaaaucuacagcaagcacaccccuaucaaccucgugcgggaucugccucagggcuucucugugcuggaaccccugguggaucugcccaucggcaucaacaucacccgguuucagacacugcuggcccugcacagaagcuaccugacaccuggcgauagcagcagcggauggacagcuggugccgccgcuuacuaugugggcuaccugcagccuagaaccuuccugcugaaguacaacgagaacggcaccaucaccgacgccguggauugugcucuggauccucugagcgagacaaagugcacccugaaguccuucaccguggaaaagggcaucuaccagaccagcaacuuccgggugcagcccaccgaauccaucgugcgguuccccaauaucaccaaucugugccccuucggcgagguguucaaugccaccagauucgccucuguguacgccuggaaccggaagcggaucagcaauugcguggccgacuacuccgugcuguacaacuccgccagcuucagcaccuucaagugcuacggcguguccccuaccaagcugaacgaccugugcuucacaaacguguacgccgacagcuucgugauccggggagaugaagugcggcagauugccccuggacagacaggcaagaucgccgacuacaacuacaagcugcccgacgacuucaccggcugugugauugccuggaacagcaacaaccuggacuccaaagucggcggcaacuacaauuaccuguuccggcuguuccggaaguccaaucugaagcccuucgagcgggacaucagcaccgaaaucuaucaggccggcaacaccccuugcaacggcguggaaggcuucaacugcuacuucccacugcaguccuacggcuuucagcccacaaauggcgugggcuaucagcccuacagagugguggugcugagcuucgaacugcugcaugcuccugccacagugugcggcccuaagaaaagcaccaaucucgugaagaacaaaugcgugaacuucaacuucaacggccugaccggcaccggcgugcugacagagagcaacaagaaguuccugccauuccagcaguuuggccgggauaucgccgauaccacagacgccguuagagauccccagacacuggaaauccuggacaucaccccaugcagcuucggcggagugucugugaucaccccuggcaccaacaccagcaaucagguggcagugcuguaccagggcgugaacuguaccgaagugcccguggccauucacgccgaucagcugacaccuacauggcggguguacuccaccggcagcaauguguuucagaccagagccggcugucugaucggagccgagcacgugaacaauagcuacgagugcgacauccccaucggcgcuggcaucugugccagcuaccagacacagacaaacagccccagacgggcuagaagcguggccagccagagcgugauugccuacacaaugucucugggcgccgagaacagcguggccuacuccaacaacucuaucgcuauccccaccaacuucaccaucagcgugaccaccgagauccugccuguguccaugaccaagaccagcguggacugcaccauguacaucugcggcgauuccaccgagugcuccaaccugcugcugcaguacggcagcuucugcacccagcugaauagagcccugacagggaucgccguggaacaggacaagaacacccaagagguguucgcccaagugaagcaaaucuacaagaccccuccuaucaaggacuucggcggcuucaauuucagccagauucugcccgauccuagcaagcccagcaagcggagcuucaucgaggaccugcuguucaacaaagugacacuggccgacgccggcuucaucaagcaguauggcgauugucugggcgacauugccgccagggaucugauuugcgcccagaaguuuaacggacugacagugcugccuccucugcugaccgaugagaugaucgcccaguacacaucugcccugcuggccggcacaaucacaagcggcuggacauuuggagcuggcgccgcucugcagauccccuuugcuaugcagauggccuaccgguucaacggcaucggagugacccagaaugugcuguacgagaaccagaagcugaucgccaaccaguucaacagcgccaucggcaagauccaggacagccugagcagcacagcaagcgcccugggaaagcugcaggacguggucaaccagaaugcccaggcacugaacacccuggucaagcagcuguccuccaacuucggcgccaucagcucugugcugaacgauauccugagcagacuggacaaggucgaggccgaggugcagaucgacagacugaucacaggcagacugcagagccuccagacauacgugacccagcagcugaucagagccgccgagauuagagccucugccaaucuggccgccaccaagaugucugagugugugcugggccagagcaagagaguggacuuuugcggcaagggcuaccaccugaugagcuucccucagucugccccucacggcgugguguuucugcacgugacauaugugcccgcucaagagaagaauuucaccaccgcuccagccaucugccacgacggcaaagcccacuuuccuagagaaggcguguucguguccaacggcacccauugguucgugacacagcggaacuucuacgagccccagaucaucaccaccgacaacaccuucgugucuggcaacugcgacguugugaucggcauugugaacaauaccguguacgacccucugcagcccgagcuggacagcuucaaagaggaacuggacaaguacuuuaagaaccacacaagccccgacguggaccugggcgauaucagcggaaucaaugccagcgucgugaacauccagaaagagaucgaccggcugaacgagguggccaagaaucugaacgagagccugaucgaccugcaagaacuggggaaguacgagcaguacaucaaguggcccugguacaucuggcugggcuuuaucgccggacugauugccaucgugauggucacaaucaugcuguguugcaugaccagcugcuguagcugccugaagggcuguuguagcuguggcagcugcugcaaguucgacgaggacgauucugagcccgugcugaagggcgugaaacugcacuacaccugauaauaggcuggagccucgguggccuagcuucuugccccuugggccuccccccagccccuccuccccuuccugcacccguacccccguggucuuugaauaaagucugagugggcggcaaaaaaaaaaaaaaaaaaaaaaaaaaaaaaaaaaaaaaaaaaaaaaaaaaaaaaaaaaaaaaaaaaaaaaaaaaaaaaaaaaaaaaaaaaaaaaaaaaaaucuag

SEQ ID NO: 26572 - RNA, 4094 nt, Artificial Sequence
  SARS-CoV-2/Wuhan/WIV05/2019__EPI_ISL_402128 spike protein mRNA gc mod (1-1273)(H69del_V70del_Y453F_D614G_I692V_M1229I)
gggaaauaagagagaaaagaagaguaagaagaaauauaagaccccggcgccgccaccauguucguguuucuggugcugcugccccugguguccagccagugugugaaccugaccaccagaacacagcugccuccagccuacaccaacagcuucaccagaggcguguacuaccccgacaagguguucagauccagcgugcugcacucuacccaggaccuguuccugccuuucuucagcaacgugaccugguuccacgccaucuccggcaccaauggcaccaagagauucgacaaccccgugcugcccuucaacgacgggguguacuuugccagcaccgagaaguccaacaucaucagaggcuggaucuucggcaccacacuggacagcaagacccagagccugcugaucgugaacaacgccaccaacguggucaucaaagugugcgaguuccaguucugcaacgaccccuuccugggcgucuacuaccacaagaacaacaagagcuggauggaaagcgaguuccggguguacagcagcgccaacaacugcaccuucgaguacgugucccagccuuuccugauggaccuggaaggcaagcagggcaacuucaagaaccugcgcgaguucguguucaagaacaucgacggcuacuucaaaaucuacagcaagcacaccccuaucaaccucgugcgggaucugccucagggcuucucugcucuggaaccccugguggaucugcccaucggcaucaacaucacccgguuucagacacugcuggcccugcacagaagcuaccugacaccuggcgauagcagcagcggauggacagcuggugccgccgcuuacuaugugggcuaccugcagccuagaaccuuccugcugaaguacaacgagaacggcaccaucaccgacgccguggauugugcucuggauccucugagcgagacaaagugcacccugaaguccuucaccguggaaaagggcaucuaccagaccagcaacuuccgggugcagcccaccgaauccaucgugcgguuccccaauaucaccaaucugugccccuucggcgagguguucaaugccaccagauucgccucuguguacgccuggaaccggaagcggaucagcaauugcguggccgacuacuccgugcuguacaacuccgccagcuucagcaccuucaagugcuacggcguguccccuaccaagcugaacgaccugugcuucacaaacguguacgccgacagcuucgugauccggggagaugaagugcggcagauugccccuggacagacaggcaagaucgccgacuacaacuacaagcugcccgacgacuucaccggcugugugauugccuggaacagcaacaaccuggacuccaaagucggcggcaacuacaauuaccuguuccggcuguuccggaaguccaaucugaagcccuucgagcgggacaucagcaccgaaaucuaucaggccggcagcaccccuugcaacggcguggaaggcuucaacugcuacuucccacugcaguccuacggcuuucagcccacaaauggcgugggcuaucagcccuacagagugguggugcugagcuucgaacugcugcaugcuccugccacagugugcggcccuaagaaaagcaccaaucucgugaagaacaaaugcgugaacuucaacuucaacggccugaccggcaccggcgugcugacagagagcaacaagaaguuccugccauuccagcaguuuggccgggauaucgccgauaccacagacgccguuagagauccccagacacuggaaauccuggacaucaccccaugcagcuucggcggagugucugugaucaccccuggcaccaacaccagcaaucagguggcagugcuguaccagggcgugaacuguaccgaagugcccguggccauucacgccgaucagcugacaccuacauggcggguguacuccaccggcagcaauguguuucagaccagagccggcugucugaucggagccgagcacgugaacaauagcuacgagugcgacauccccaucggcgcuggcaucugugccagcuaccagacacagacaaacagccccagacgggcuagaagcguggccagccagagcgugauugccuacacaaugucucugggcgccgagaacagcguggccuacuccaacaacucuaucgcuauccccaccaacuucaccaucagcgugaccaccgagauccugccuguguccaugaccaagaccagcguggacugcaccauguacaucugcggcgauuccaccgagugcuccaaccugcugcugcaguacggcagcuucugcacccagcugaauagagcccugacagggaucgccguggaacaggacaagaacacccaagagguguucgcccaagugaagcaaaucuacaagaccccuccuaucaaggacuucggcggcuucaauuucagccagauucugcccgauccuagcaagcccagcaagcggagcuucaucgaggaccugcuguucaacaaagugacacuggccgacgccggcuucaucaagcaguauggcgauugucugggcgacauugccgccagggaucugauuugcgcccagaaguuuaacggacugacagugcugccuccucugcugaccgaugagaugaucgcccaguacacaucugcccugcuggccggcacaaucacaagcggcuggacauuuggagcuggcgccgcucugcagauccccuuugcuaugcagauggccuaccgguucaacggcaucggagugacccagaaugugcuguacgagaaccagaagcugaucgccaaccaguucaacagcgccaucggcaagauccaggacagccugagcagcacagcaagcgcccugggaaagcugcaggacguggucaaccagaaugcccaggcacugaacacccuggucaagcagcuguccuccaacuucggcgccaucagcucugugcugaacgauauccugagcagacuggacaaggucgaggccgaggugcagaucgacagacugaucacaggcagacugcagagccuccagacauacgugacccagcagcugaucagagccgccgagauuagagccucugccaaucuggccgccaccaagaugucugagugugugcugggccagagcaagagaguggacuuuugcggcaagggcuaccaccugaugagcuucccucagucugccccucacggcgugguguuucugcacgugacauaugugcccgcucaagagaagaauuucaccaccgcuccagccaucugccacgacggcaaagcccacuuuccuagagaaggcguguucguguccaacggcacccauugguucgugacacagcggaacuucuacgagccccagaucaucaccaccgacaacaccuucgugucuggcaacugcgacguugugaucggcauugugaacaauaccguguacgacccucugcagcccgagcuggacagcuucaaagaggaacuggacaaguacuuuaagaaccacacaagccccgacguggaccugggcgauaucagcggaaucaaugccagcgucgugaacauccagaaagagaucgaccggcugaacgagguggccaagaaucugaacgagagccugaucgaccugcaagaacuggggaaguacgagcaguacaucaaguggcccugguacaucuggcugggcuuuaucgccggacugauugccaucgugaucgucacaaucaugcuguguugcaugaccagcugcuguagcugccugaagggcuguuguagcuguggcagcugcugcaaguucgacgaggacgauucugagcccgugcugaagggcgugaaacugcacuacaccugauaauaggcuggagccucgguggccuagcuucuugccccuugggccuccccccagccccuccuccccuuccugcacccguacccccguggucuuugaauaaagucugagugggcggcaaaaaaaaaaaaaaaaaaaaaaaaaaaaaaaaaaaaaaaaaaaaaaaaaaaaaaaaaaaaaaaaaaaaaaaaaaaaaaaaaaaaaaaaaaaaaaaaaaaaucuag

SEQ ID NO: 26573 - RNA, 4091 nt, Artificial Sequence
  SARS-CoV-2/Wuhan/WIV05/2019__EPI_ISL_402128 spike protein mRNA gc mod (1-1273)(H69del_V70del_Y144del_N501Y_A570D_D614G_P681H_T716I_S982 A_D1118H)
gggaaauaagagagaaaagaagaguaagaagaaauauaagaccccggcgccgccaccauguucguguuucuggugcugcugccccugguguccagccagugugugaaccugaccaccagaacacagcugccuccagccuacaccaacagcuucaccagaggcguguacuaccccgacaagguguucagauccagcgugcugcacucuacccaggaccuguuccugccuuucuucagcaacgugaccugguuccacgccaucuccggcaccaauggcaccaagagauucgacaaccccgugcugcccuucaacgacgggguguacuuugccagcaccgagaaguccaacaucaucagaggcuggaucuucggcaccacacuggacagcaagacccagagccugcugaucgugaacaacgccaccaacguggucaucaaagugugcgaguuccaguucugcaacgaccccuuccugggcgucuaccacaagaacaacaagagcuggauggaaagcgaguuccggguguacagcagcgccaacaacugcaccuucgaguacgugucccagccuuuccugauggaccuggaaggcaagcagggcaacuucaagaaccugcgcgaguucguguucaagaacaucgacggcuacuucaaaaucuacagcaagcacaccccuaucaaccucgugcgggaucugccucagggcuucucugcucuggaaccccugguggaucugcccaucggcaucaacaucacccgguuucagacacugcuggcccugcacagaagcuaccugacaccuggcgauagcagcagcggauggacagcuggugccgccgcuuacuaugugggcuaccugcagccuagaaccuuccugcugaaguacaacgagaacggcaccaucaccgacgccguggauugugcucuggauccucugagcgagacaaagugcacccugaaguccuucaccguggaaaagggcaucuaccagaccagcaacuuccgggugcagcccaccgaauccaucgugcgguuccccaauaucaccaaucugugccccuucggcgagguguucaaugccaccagauucgccucuguguacgccuggaaccggaagcggaucagcaauugcguggccgacuacuccgugcuguacaacuccgccagcuucagcaccuucaagugcuacggcguguccccuaccaagcugaacgaccugugcuucacaaacguguacgccgacagcuucgugauccggggagaugaagugcggcagauugccccuggacagacaggcaagaucgccgacuacaacuacaagcugcccgacgacuucaccggcugugugauugccuggaacagcaacaaccuggacuccaaagucggcggcaacuacaauuaccuguaccggcuguuccggaaguccaaucugaagcccuucgagcgggacaucagcaccgaaaucuaucaggccggcagcaccccuugcaacggcguggaaggcuucaacugcuacuucccacugcaguccuacggcuuucagcccacauacggcgugggcuaucagcccuacagagugguggugcugagcuucgaacugcugcaugcuccugccacagugugcggcccuaagaaaagcaccaaucucgugaagaacaaaugcgugaacuucaacuucaacggccugaccggcaccggcgugcugacagagagcaacaagaaguuccugccauuccagcaguuuggccgggauaucgacgauaccacagacgccguuagagauccccagacacuggaaauccuggacaucaccccaugcagcuucggcggagugucugugaucaccccuggcaccaacaccagcaaucagguggcagugcuguaccagggcgugaacuguaccgaagugcccguggccauucacgccgaucagcugacaccuacauggcggguguacuccaccggcagcaauguguuucagaccagagccggcugucugaucggagccgagcacgugaacaauagcuacgagugcgacauccccaucggcgcuggcaucugugccagcuaccagacacagacaaacagccacagacgggcuagaagcguggccagccagagcaucauugccuacacaaugucucugggcgccgagaacagcguggccuacuccaacaacucuaucgcuauccccaucaacuucaccaucagcgugaccaccgagauccugccuguguccaugaccaagaccagcguggacugcaccauguacaucugcggcgauuccaccgagugcuccaaccugcugcugcaguacggcagcuucugcacccagcugaauagagcccugacagggaucgccguggaacaggacaagaacacccaagagguguucgcccaagugaagcaaaucuacaagaccccuccuaucaaggacuucggcggcuucaauuucagccagauucugcccgauccuagcaagcccagcaagcggagcuucaucgaggaccugcuguucaacaaagugacacuggccgacgccggcuucaucaagcaguauggcgauugucugggcgacauugccgccagggaucugauuugcgcccagaaguuuaacggacugacagugcugccuccucugcugaccgaugagaugaucgcccaguacacaucugcccugcuggccggcacaaucacaagcggcuggacauuuggagcuggcgccgcucugcagauccccuuugcuaugcagauggccuaccgguucaacggcaucggagugacccagaaugugcuguacgagaaccagaagcugaucgccaaccaguucaacagcgccaucggcaagauccaggacagccugagcagcacagcaagcgcccugggaaagcugcaggacguggucaaccagaaugcccaggcacugaacacccuggucaagcagcuguccuccaacuucggcgccaucagcucugugcugaacgauauccuggccagacuggacaaggucgaggccgaggugcagaucgacagacugaucacaggcagacugcagagccuccagacauacgugacccagcagcugaucagagccgccgagauuagagccucugccaaucuggccgccaccaagaugucugagugugugcugggccagagcaagagaguggacuuuugcggcaagggcuaccaccugaugagcuucccucagucugccccucacggcgugguguuucugcacgugacauaugugcccgcucaagagaagaauuucaccaccgcuccagccaucugccacgacggcaaagcccacuuuccuagagaaggcguguucguguccaacggcacccauugguucgugacacagcggaacuucuacgagccccagaucaucaccacccacaacaccuucgugucuggcaacugcgacguugugaucggcauugugaacaauaccguguacgacccucugcagcccgagcuggacagcuucaaagaggaacuggacaaguacuuuaagaaccacacaagccccgacguggaccugggcgauaucagcggaaucaaugccagcgucgugaacauccagaaagagaucgaccggcugaacgagguggccaagaaucugaacgagagccugaucgaccugcaagaacuggggaaguacgagcaguacaucaaguggcccugguacaucuggcugggcuuuaucgccggacugauugccaucgugauggucacaaucaugcuguguugcaugaccagcugcuguagcugccugaagggcuguuguagcuguggcagcugcugcaaguucgacgaggacgauucugagcccgugcugaagggcgugaaacugcacuacaccugauaauaggcuggagccucgguggccuagcuucuugccccuugggccuccccccagccccuccuccccuuccugcacccguacccccguggucuuugaauaaagucugagugggcggcaaaaaaaaaaaaaaaaaaaaaaaaaaaaaaaaaaaaaaaaaaaaaaaaaaaaaaaaaaaaaaaaaaaaaaaaaaaaaaaaaaaaaaaaaaaaaaaaaaaaucuag

SEQ ID NO: 26574 - RNA, 4100 nt, Artificial Sequence
  SARS-CoV-2/Wuhan/WIV05/2019__EPI_ISL_402128 spike protein mRNA gc mod (1-1273)(K417N_E484K_N501Y_D614G)
gggaaauaagagagaaaagaagaguaagaagaaauauaagaccccggcgccgccaccauguucguguuucuggugcugcugccccugguguccagccagugugugaaccugaccaccagaacacagcugccuccagccuacaccaacagcuucaccagaggcguguacuaccccgacaagguguucagauccagcgugcugcacucuacccaggaccuguuccugccuuucuucagcaacgugaccugguuccacgccauccacguguccggcaccaauggcaccaagagauucgacaaccccgugcugcccuucaacgacgggguguacuuugccagcaccgagaaguccaacaucaucagaggcuggaucuucggcaccacacuggacagcaagacccagagccugcugaucgugaacaacgccaccaacguggucaucaaagugugcgaguuccaguucugcaacgaccccuuccugggcgucuacuaccacaagaacaacaagagcuggauggaaagcgaguuccggguguacagcagcgccaacaacugcaccuucgaguacgugucccagccuuuccugauggaccuggaaggcaagcagggcaacuucaagaaccugcgcgaguucguguucaagaacaucgacggcuacuucaaaaucuacagcaagcacaccccuaucaaccucgugcgggaucugccucagggcuucucugcucuggaaccccugguggaucugcccaucggcaucaacaucacccgguuucagacacugcuggcccugcacagaagcuaccugacaccuggcgauagcagcagcggauggacagcuggugccgccgcuuacuaugugggcuaccugcagccuagaaccuuccugcugaaguacaacgagaacggcaccaucaccgacgccguggauugugcucuggauccucugagcgagacaaagugcacccugaaguccuucaccguggaaaagggcaucuaccagaccagcaacuuccgggugcagcccaccgaauccaucgugcgguuccccaauaucaccaaucugugccccuucggcgagguguucaaugccaccagauucgccucuguguacgccuggaaccggaagcggaucagcaauugcguggccgacuacuccgugcuguacaacuccgccagcuucagcaccuucaagugcuacggcguguccccuaccaagcugaacgaccugugcuucacaaacguguacgccgacagcuucgugauccggggagaugaagugcggcagauugccccuggacagacaggcaacaucgccgacuacaacuacaagcugcccgacgacuucaccggcugugugauugccuggaacagcaacaaccuggacuccaaagucggcggcaacuacaauuaccuguaccggcuguuccggaaguccaaucugaagcccuucgagcgggacaucagcaccgaaaucuaucaggccggcagcaccccuugcaacggcgugaagggcuucaacugcuacuucccacugcaguccuacggcuuucagcccacauacggcgugggcuaucagcccuacagagugguggugcugagcuucgaacugcugcaugcuccugccacagugugcggcccuaagaaaagcaccaaucucgugaagaacaaaugcgugaacuucaacuucaacggccugaccggcaccggcgugcugacagagagcaacaagaaguuccugccauuccagcaguuuggccgggauaucgccgauaccacagacgccguuagagauccccagacacuggaaauccuggacaucaccccaugcagcuucggcggagugucugugaucaccccuggcaccaacaccagcaaucagguggcagugcuguaccagggcgugaacuguaccgaagugcccguggccauucacgccgaucagcugacaccuacauggcggguguacuccaccggcagcaauguguuucagaccagagccggcugucugaucggagccgagcacgugaacaauagcuacgagugcgacauccccaucggcgcuggcaucugugccagcuaccagacacagacaaacagccccagacgggcuagaagcguggccagccagagcaucauugccuacacaaugucucugggcgccgagaacagcguggccuacuccaacaacucuaucgcuauccccaccaacuucaccaucagcgugaccaccgagauccugccuguguccaugaccaagaccagcguggacugcaccauguacaucugcggcgauuccaccgagugcuccaaccugcugcugcaguacggcagcuucugcacccagcugaauagagcccugacagggaucgccguggaacaggacaagaacacccaagagguguucgcccaagugaagcaaaucuacaagaccccuccuaucaaggacuucggcggcuucaauuucagccagauucugcccgauccuagcaagcccagcaagcggagcuucaucgaggaccugcuguucaacaaagugacacuggccgacgccggcuucaucaagcaguauggcgauugucugggcgacauugccgccagggaucugauuugcgcccagaaguuuaacggacugacagugcugccuccucugcugaccgaugagaugaucgcccaguacacaucugcccugcuggccggcacaaucacaagcggcuggacauuuggagcuggcgccgcucugcagauccccuuugcuaugcagauggccuaccgguucaacggcaucggagugacccagaaugugcuguacgagaaccagaagcugaucgccaaccaguucaacagcgccaucggcaagauccaggacagccugagcagcacagcaagcgcccugggaaagcugcaggacguggucaaccagaaugcccaggcacugaacacccuggucaagcagcuguccuccaacuucggcgccaucagcucugugcugaacgauauccugagcagacuggacaaggucgaggccgaggugcagaucgacagacugaucacaggcagacugcagagccuccagacauacgugacccagcagcugaucagagccgccgagauuagagccucugccaaucuggccgccaccaagaugucugagugugugcugggccagagcaagagaguggacuuuugcggcaagggcuaccaccugaugagcuucccucagucugccccucacggcgugguguuucugcacgugacauaugugcccgcucaagagaagaauuucaccaccgcuccagccaucugccacgacggcaaagcccacuuuccuagagaaggcguguucguguccaacggcacccauugguucgugacacagcggaacuucuacgagccccagaucaucaccaccgacaacaccuucgugucuggcaacugcgacguugugaucggcauugugaacaauaccguguacgacccucugcagcccgagcuggacagcuucaaagaggaacuggacaaguacuuuaagaaccacacaagccccgacguggaccugggcgauaucagcggaaucaaugccagcgucgugaacauccagaaagagaucgaccggcugaacgagguggccaagaaucugaacgagagccugaucgaccugcaagaacuggggaaguacgagcaguacaucaaguggcccugguacaucuggcugggcuuuaucgccggacugauugccaucgugauggucacaaucaugcuguguugcaugaccagcugcuguagcugccugaagggcuguuguagcuguggcagcugcugcaaguucgacgaggacgauucugagcccgugcugaagggcgugaaacugcacuacaccugauaauaggcuggagccucgguggccuagcuucuugccccuugggccuccccccagccccuccuccccuuccugcacccguacccccguggucuuugaauaaagucugagugggcggcaaaaaaaaaaaaaaaaaaaaaaaaaaaaaaaaaaaaaaaaaaaaaaaaaaaaaaaaaaaaaaaaaaaaaaaaaaaaaaaaaaaaaaaaaaaaaaaaaaaaucuag

SEQ ID NO: 26575 - RNA, 4091 nt, Artificial Sequence
  SARS-CoV-2/Wuhan/WIV05/2019__EPI_ISL_402128 spike protein mRNA gc mod (1-1273)(L18F_D80A_D215G_L242del_A243del_L244del_R246I_K417N_E484 K_N501Y_D614G_A701V)
gggaaauaagagagaaaagaagaguaagaagaaauauaagaccccggcgccgccaccauguucguguuucuggugcugcugccccugguguccagccagugugugaacuucaccaccagaacacagcugccuccagccuacaccaacagcuucaccagaggcguguacuaccccgacaagguguucagauccagcgugcugcacucuacccaggaccuguuccugccuuucuucagcaacgugaccugguuccacgccauccacguguccggcaccaauggcaccaagagauucgccaaccccgugcugcccuucaacgacgggguguacuuugccagcaccgagaaguccaacaucaucagaggcuggaucuucggcaccacacuggacagcaagacccagagccugcugaucgugaacaacgccaccaacguggucaucaaagugugcgaguuccaguucugcaacgaccccuuccugggcgucuacuaccacaagaacaacaagagcuggauggaaagcgaguuccggguguacagcagcgccaacaacugcaccuucgaguacgugucccagccuuuccugauggaccuggaaggcaagcagggcaacuucaagaaccugcgcgaguucguguucaagaacaucgacggcuacuucaaaaucuacagcaagcacaccccuaucaaccucgugcggggccugccucagggcuucucugcucuggaaccccugguggaucugcccaucggcaucaacaucacccgguuucagacacugcacaucagcuaccugacaccuggcgauagcagcagcggauggacagcuggugccgccgcuuacuaugugggcuaccugcagccuagaaccuuccugcugaaguacaacgagaacggcaccaucaccgacgccguggauugugcucuggauccucugagcgagacaaagugcacccugaaguccuucaccguggaaaagggcaucuaccagaccagcaacuuccgggugcagcccaccgaauccaucgugcgguuccccaauaucaccaaucugugccccuucggcgagguguucaaugccaccagauucgccucuguguacgccuggaaccggaagcggaucagcaauugcguggccgacuacuccgugcuguacaacuccgccagcuucagcaccuucaagugcuacggcguguccccuaccaagcugaacgaccugugcuucacaaacguguacgccgacagcuucgugauccggggagaugaagugcggcagauugccccuggacagacaggcaacaucgccgacuacaacuacaagcugcccgacgacuucaccggcugugugauugccuggaacagcaacaaccuggacuccaaagucggcggcaacuacaauuaccuguaccggcuguuccggaaguccaaucugaagcccuucgagcgggacaucagcaccgaaaucuaucaggccggcagcaccccuugcaacggcgugaagggcuucaacugcuacuucccacugcaguccuacggcuuucagcccacauacggcgugggcuaucagcccuacagagugguggugcugagcuucgaacugcugcaugcuccugccacagugugcggcccuaagaaaagcaccaaucucgugaagaacaaaugcgugaacuucaacuucaacggccugaccggcaccggcgugcugacagagagcaacaagaaguuccugccauuccagcaguuuggccgggauaucgccgauaccacagacgccguuagagauccccagacacuggaaauccuggacaucaccccaugcagcuucggcggagugucugugaucaccccuggcaccaacaccagcaaucagguggcagugcuguaccagggcgugaacuguaccgaagugcccguggccauucacgccgaucagcugacaccuacauggcggguguacuccaccggcagcaauguguuucagaccagagccggcugucugaucggagccgagcacgugaacaauagcuacgagugcgacauccccaucggcgcuggcaucugugccagcuaccagacacagacaaacagccccagacgggcuagaagcguggccagccagagcaucauugccuacacaaugucucugggcguggagaacagcguggccuacuccaacaacucuaucgcuauccccaccaacuucaccaucagcgugaccaccgagauccugccuguguccaugaccaagaccagcguggacugcaccauguacaucugcggcgauuccaccgagugcuccaaccugcugcugcaguacggcagcuucugcacccagcugaauagagcccugacagggaucgccguggaacaggacaagaacacccaagagguguucgcccaagugaagcaaaucuacaagaccccuccuaucaaggacuucggcggcuucaauuucagccagauucugcccgauccuagcaagcccagcaagcggagcuucaucgaggaccugcuguucaacaaagugacacuggccgacgccggcuucaucaagcaguauggcgauugucugggcgacauugccgccagggaucugauuugcgcccagaaguuuaacggacugacagugcugccuccucugcugaccgaugagaugaucgcccaguacacaucugcccugcuggccggcacaaucacaagcggcuggacauuuggagcuggcgccgcucugcagauccccuuugcuaugcagauggccuaccgguucaacggcaucggagugacccagaaugugcuguacgagaaccagaagcugaucgccaaccaguucaacagcgccaucggcaagauccaggacagccugagcagcacagcaagcgcccugggaaagcugcaggacguggucaaccagaaugcccaggcacugaacacccuggucaagcagcuguccuccaacuucggcgccaucagcucugugcugaacgauauccugagcagacuggacaaggucgaggccgaggugcagaucgacagacugaucacaggcagacugcagagccuccagacauacgugacccagcagcugaucagagccgccgagauuagagccucugccaaucuggccgccaccaagaugucugagugugugcugggccagagcaagagaguggacuuuugcggcaagggcuaccaccugaugagcuucccucagucugccccucacggcgugguguuucugcacgugacauaugugcccgcucaagagaagaauuucaccaccgcuccagccaucugccacgacggcaaagcccacuuuccuagagaaggcguguucguguccaacggcacccauugguucgugacacagcggaacuucuacgagccccagaucaucaccaccgacaacaccuucgugucuggcaacugcgacguugugaucggcauugugaacaauaccguguacgacccucugcagcccgagcuggacagcuucaaagaggaacuggacaaguacuuuaagaaccacacaagccccgacguggaccugggcgauaucagcggaaucaaugccagcgucgugaacauccagaaagagaucgaccggcugaacgagguggccaagaaucugaacgagagccugaucgaccugcaagaacuggggaaguacgagcaguacaucaaguggcccugguacaucuggcugggcuuuaucgccggacugauugccaucgugauggucacaaucaugcuguguugcaugaccagcugcuguagcugccugaagggcuguuguagcuguggcagcugcugcaaguucgacgaggacgauucugagcccgugcugaagggcgugaaacugcacuacaccugauaauaggcuggagccucgguggccuagcuucuugccccuugggccuccccccagccccuccuccccuuccugcacccguacccccguggucuuugaauaaagucugagugggcggcaaaaaaaaaaaaaaaaaaaaaaaaaaaaaaaaaaaaaaaaaaaaaaaaaaaaaaaaaaaaaaaaaaaaaaaaaaaaaaaaaaaaaaaaaaaaaaaaaaaaucuag

SEQ ID NO: 26576 - RNA, 4100 nt, Artificial Sequence
  SARS-CoV-2/Wuhan/WIV05/2019__EPI_ISL_402128 spike protein mRNA gc mod (1-1273)(E484K_D614G)
gggaaauaagagagaaaagaagaguaagaagaaauauaagaccccggcgccgccaccauguucguguuucuggugcugcugccccugguguccagccagugugugaaccugaccaccagaacacagcugccuccagccuacaccaacagcuucaccagaggcguguacuaccccgacaagguguucagauccagcgugcugcacucuacccaggaccuguuccugccuuucuucagcaacgugaccugguuccacgccauccacguguccggcaccaauggcaccaagagauucgacaaccccgugcugcccuucaacgacgggguguacuuugccagcaccgagaaguccaacaucaucagaggcuggaucuucggcaccacacuggacagcaagacccagagccugcugaucgugaacaacgccaccaacguggucaucaaagugugcgaguuccaguucugcaacgaccccuuccugggcgucuacuaccacaagaacaacaagagcuggauggaaagcgaguuccggguguacagcagcgccaacaacugcaccuucgaguacgugucccagccuuuccugauggaccuggaaggcaagcagggcaacuucaagaaccugcgcgaguucguguucaagaacaucgacggcuacuucaaaaucuacagcaagcacaccccuaucaaccucgugcgggaucugccucagggcuucucugcucuggaaccccugguggaucugcccaucggcaucaacaucacccgguuucagacacugcuggcccugcacagaagcuaccugacaccuggcgauagcagcagcggauggacagcuggugccgccgcuuacuaugugggcuaccugcagccuagaaccuuccugcugaaguacaacgagaacggcaccaucaccgacgccguggauugugcucuggauccucugagcgagacaaagugcacccugaaguccuucaccguggaaaagggcaucuaccagaccagcaacuuccgggugcagcccaccgaauccaucgugcgguuccccaauaucaccaaucugugccccuucggcgagguguucaaugccaccagauucgccucuguguacgccuggaaccggaagcggaucagcaauugcguggccgacuacuccgugcuguacaacuccgccagcuucagcaccuucaagugcuacggcguguccccuaccaagcugaacgaccugugcuucacaaacguguacgccgacagcuucgugauccggggagaugaagugcggcagauugccccuggacagacaggcaagaucgccgacuacaacuacaagcugcccgacgacuucaccggcugugugauugccuggaacagcaacaaccuggacuccaaagucggcggcaacuacaauuaccuguaccggcuguuccggaaguccaaucugaagcccuucgagcgggacaucagcaccgaaaucuaucaggccggcagcaccccuugcaacggcgugaagggcuucaacugcuacuucccacugcaguccuacggcuuucagcccacaaauggcgugggcuaucagcccuacagagugguggugcugagcuucgaacugcugcaugcuccugccacagugugcggcccuaagaaaagcaccaaucucgugaagaacaaaugcgugaacuucaacuucaacggccugaccggcaccggcgugcugacagagagcaacaagaaguuccugccauuccagcaguuuggccgggauaucgccgauaccacagacgccguuagagauccccagacacuggaaauccuggacaucaccccaugcagcuucggcggagugucugugaucaccccuggcaccaacaccagcaaucagguggcagugcuguaccagggcgugaacuguaccgaagugcccguggccauucacgccgaucagcugacaccuacauggcggguguacuccaccggcagcaauguguuucagaccagagccggcugucugaucggagccgagcacgugaacaauagcuacgagugcgacauccccaucggcgcuggcaucugugccagcuaccagacacagacaaacagccccagacgggcuagaagcguggccagccagagcaucauugccuacacaaugucucugggcgccgagaacagcguggccuacuccaacaacucuaucgcuauccccaccaacuucaccaucagcgugaccaccgagauccugccuguguccaugaccaagaccagcguggacugcaccauguacaucugcggcgauuccaccgagugcuccaaccugcugcugcaguacggcagcuucugcacccagcugaauagagcccugacagggaucgccguggaacaggacaagaacacccaagagguguucgcccaagugaagcaaaucuacaagaccccuccuaucaaggacuucggcggcuucaauuucagccagauucugcccgauccuagcaagcccagcaagcggagcuucaucgaggaccugcuguucaacaaagugacacuggccgacgccggcuucaucaagcaguauggcgauugucugggcgacauugccgccagggaucugauuugcgcccagaaguuuaacggacugacagugcugccuccucugcugaccgaugagaugaucgcccaguacacaucugcccugcuggccggcacaaucacaagcggcuggacauuuggagcuggcgccgcucugcagauccccuuugcuaugcagauggccuaccgguucaacggcaucggagugacccagaaugugcuguacgagaaccagaagcugaucgccaaccaguucaacagcgccaucggcaagauccaggacagccugagcagcacagcaagcgcccugggaaagcugcaggacguggucaaccagaaugcccaggcacugaacacccuggucaagcagcuguccuccaacuucggcgccaucagcucugugcugaacgauauccugagcagacuggacaaggucgaggccgaggugcagaucgacagacugaucacaggcagacugcagagccuccagacauacgugacccagcagcugaucagagccgccgagauuagagccucugccaaucuggccgccaccaagaugucugagugugugcugggccagagcaagagaguggacuuuugcggcaagggcuaccaccugaugagcuucccucagucugccccucacggcgugguguuucugcacgugacauaugugcccgcucaagagaagaauuucaccaccgcuccagccaucugccacgacggcaaagcccacuuuccuagagaaggcguguucguguccaacggcacccauugguucgugacacagcggaacuucuacgagccccagaucaucaccaccgacaacaccuucgugucuggcaacugcgacguugugaucggcauugugaacaauaccguguacgacccucugcagcccgagcuggacagcuucaaagaggaacuggacaaguacuuuaagaaccacacaagccccgacguggaccugggcgauaucagcggaaucaaugccagcgucgugaacauccagaaagagaucgaccggcugaacgagguggccaagaaucugaacgagagccugaucgaccugcaagaacuggggaaguacgagcaguacaucaaguggcccugguacaucuggcugggcuuuaucgccggacugauugccaucgugauggucacaaucaugcuguguugcaugaccagcugcuguagcugccugaagggcuguuguagcuguggcagcugcugcaaguucgacgaggacgauucugagcccgugcugaagggcgugaaacugcacuacaccugauaauaggcuggagccucgguggccuagcuucuugccccuugggccuccccccagccccuccuccccuuccugcacccguacccccguggucuuugaauaaagucugagugggcggcaaaaaaaaaaaaaaaaaaaaaaaaaaaaaaaaaaaaaaaaaaaaaaaaaaaaaaaaaaaaaaaaaaaaaaaaaaaaaaaaaaaaaaaaaaaaaaaaaaaaucuag

SEQ ID NO: 26577 - RNA, 4100 nt, Artificial Sequence
  SARS-CoV-2/Wuhan/WIV05/2019__EPI_ISL_402128 spike protein mRNA gc mod (1-1273)(L18F_T20N_P26S_D138Y_R190S_K417T_E484K_N501Y_D614G_H655Y _T1027I)
gggaaauaagagagaaaagaagaguaagaagaaauauaagaccccggcgccgccaccauguucguguuucuggugcugcugccccugguguccagccagugugugaacuucaccaacagaacacagcugccuagcgccuacaccaacagcuucaccagaggcguguacuaccccgacaagguguucagauccagcgugcugcacucuacccaggaccuguuccugccuuucuucagcaacgugaccugguuccacgccauccacguguccggcaccaauggcaccaagagauucgacaaccccgugcugcccuucaacgacgggguguacuuugccagcaccgagaaguccaacaucaucagaggcuggaucuucggcaccacacuggacagcaagacccagagccugcugaucgugaacaacgccaccaacguggucaucaaagugugcgaguuccaguucugcaacuaccccuuccugggcgucuacuaccacaagaacaacaagagcuggauggaaagcgaguuccggguguacagcagcgccaacaacugcaccuucgaguacgugucccagccuuuccugauggaccuggaaggcaagcagggcaacuucaagaaccugagcgaguucguguucaagaacaucgacggcuacuucaaaaucuacagcaagcacaccccuaucaaccucgugcgggaucugccucagggcuucucugcucuggaaccccugguggaucugcccaucggcaucaacaucacccgguuucagacacugcuggcccugcacagaagcuaccugacaccuggcgauagcagcagcggauggacagcuggugccgccgcuuacuaugugggcuaccugcagccuagaaccuuccugcugaaguacaacgagaacggcaccaucaccgacgccguggauugugcucuggauccucugagcgagacaaagugcacccugaaguccuucaccguggaaaagggcaucuaccagaccagcaacuuccgggugcagcccaccgaauccaucgugcgguuccccaauaucaccaaucugugccccuucggcgagguguucaaugccaccagauucgccucuguguacgccuggaaccggaagcggaucagcaauugcguggccgacuacuccgugcuguacaacuccgccagcuucagcaccuucaagugcuacggcguguccccuaccaagcugaacgaccugugcuucacaaacguguacgccgacagcuucgugauccggggagaugaagugcggcagauugccccuggacagacaggcaccaucgccgacuacaacuacaagcugcccgacgacuucaccggcugugugauugccuggaacagcaacaaccuggacuccaaagucggcggcaacuacaauuaccuguaccggcuguuccggaaguccaaucugaagcccuucgagcgggacaucagcaccgaaaucuaucaggccggcagcaccccuugcaacggcgugaagggcuucaacugcuacuucccacugcaguccuacggcuuucagcccacauacggcgugggcuaucagcccuacagagugguggugcugagcuucgaacugcugcaugcuccugccacagugugcggcccuaagaaaagcaccaaucucgugaagaacaaaugcgugaacuucaacuucaacggccugaccggcaccggcgugcugacagagagcaacaagaaguuccugccauuccagcaguuuggccgggauaucgccgauaccacagacgccguuagagauccccagacacuggaaauccuggacaucaccccaugcagcuucggcggagugucugugaucaccccuggcaccaacaccagcaaucagguggcagugcuguaccagggcgugaacuguaccgaagugcccguggccauucacgccgaucagcugacaccuacauggcggguguacuccaccggcagcaauguguuucagaccagagccggcugucugaucggagccgaguacgugaacaauagcuacgagugcgacauccccaucggcgcuggcaucugugccagcuaccagacacagacaaacagccccagacgggcuagaagcguggccagccagagcaucauugccuacacaaugucucugggcgccgagaacagcguggccuacuccaacaacucuaucgcuauccccaccaacuucaccaucagcgugaccaccgagauccugccuguguccaugaccaagaccagcguggacugcaccauguacaucugcggcgauuccaccgagugcuccaaccugcugcugcaguacggcagcuucugcacccagcugaauagagcccugacagggaucgccguggaacaggacaagaacacccaagagguguucgcccaagugaagcaaaucuacaagaccccuccuaucaaggacuucggcggcuucaauuucagccagauucugcccgauccuagcaagcccagcaagcggagcuucaucgaggaccugcuguucaacaaagugacacuggccgacgccggcuucaucaagcaguauggcgauugucugggcgacauugccgccagggaucugauuugcgcccagaaguuuaacggacugacagugcugccuccucugcugaccgaugagaugaucgcccaguacacaucugcccugcuggccggcacaaucacaagcggcuggacauuuggagcuggcgccgcucugcagauccccuuugcuaugcagauggccuaccgguucaacggcaucggagugacccagaaugugcuguacgagaaccagaagcugaucgccaaccaguucaacagcgccaucggcaagauccaggacagccugagcagcacagcaagcgcccugggaaagcugcaggacguggucaaccagaaugcccaggcacugaacacccuggucaagcagcuguccuccaacuucggcgccaucagcucugugcugaacgauauccugagcagacuggacaaggucgaggccgaggugcagaucgacagacugaucacaggcagacugcagagccuccagacauacgugacccagcagcugaucagagccgccgagauuagagccucugccaaucuggccgccaucaagaugucugagugugugcugggccagagcaagagaguggacuuuugcggcaagggcuaccaccugaugagcuucccucagucugccccucacggcgugguguuucugcacgugacauaugugcccgcucaagagaagaauuucaccaccgcuccagccaucugccacgacggcaaagcccacuuuccuagagaaggcguguucguguccaacggcacccauugguucgugacacagcggaacuucuacgagccccagaucaucaccaccgacaacaccuucgugucuggcaacugcgacguugugaucggcauugugaacaauaccguguacgacccucugcagcccgagcuggacagcuucaaagaggaacuggacaaguacuuuaagaaccacacaagccccgacguggaccugggcgauaucagcggaaucaaugccagcgucgugaacauccagaaagagaucgaccggcugaacgagguggccaagaaucugaacgagagccugaucgaccugcaagaacuggggaaguacgagcaguacaucaaguggcccugguacaucuggcugggcuuuaucgccggacugauugccaucgugauggucacaaucaugcuguguugcaugaccagcugcuguagcugccugaagggcuguuguagcuguggcagcugcugcaaguucgacgaggacgauucugagcccgugcugaagggcgugaaacugcacuacaccugauaauaggcuggagccucgguggccuagcuucuugccccuugggccuccccccagccccuccuccccuuccugcacccguacccccguggucuuugaauaaagucugagugggcggcaaaaaaaaaaaaaaaaaaaaaaaaaaaaaaaaaaaaaaaaaaaaaaaaaaaaaaaaaaaaaaaaaaaaaaaaaaaaaaaaaaaaaaaaaaaaaaaaaaaaucuag

SEQ ID NO: 26578 - RNA, 4100 nt, Artificial Sequence
  SARS-CoV-2/Wuhan/WIV05/2019__EPI_ISL_402128 spike protein mRNA gc mod (1-1273)(S13I_W152C_L452R_D614G)
gggaaauaagagagaaaagaagaguaagaagaaauauaagaccccggcgccgccaccauguucguguuucuggugcugcugccccugguguccauccagugugugaaccugaccaccagaacacagcugccuccagccuacaccaacagcuucaccagaggcguguacuaccccgacaagguguucagauccagcgugcugcacucuacccaggaccuguuccugccuuucuucagcaacgugaccugguuccacgccauccacguguccggcaccaauggcaccaagagauucgacaaccccgugcugcccuucaacgacgggguguacuuugccagcaccgagaaguccaacaucaucagaggcuggaucuucggcaccacacuggacagcaagacccagagccugcugaucgugaacaacgccaccaacguggucaucaaagugugcgaguuccaguucugcaacgaccccuuccugggcgucuacuaccacaagaacaacaagagcugcauggaaagcgaguuccggguguacagcagcgccaacaacugcaccuucgaguacgugucccagccuuuccugauggaccuggaaggcaagcagggcaacuucaagaaccugcgcgaguucguguucaagaacaucgacggcuacuucaaaaucuacagcaagcacaccccuaucaaccucgugcgggaucugccucagggcuucucugcucuggaaccccugguggaucugcccaucggcaucaacaucacccgguuucagacacugcuggcccugcacagaagcuaccugacaccuggcgauagcagcagcggauggacagcuggugccgccgcuuacuaugugggcuaccugcagccuagaaccuuccugcugaaguacaacgagaacggcaccaucaccgacgccguggauugugcucuggauccucugagcgagacaaagugcacccugaaguccuucaccguggaaaagggcaucuaccagaccagcaacuuccgggugcagcccaccgaauccaucgugcgguuccccaauaucaccaaucugugccccuucggcgagguguucaaugccaccagauucgccucuguguacgccuggaaccggaagcggaucagcaauugcguggccgacuacuccgugcuguacaacuccgccagcuucagcaccuucaagugcuacggcguguccccuaccaagcugaacgaccugugcuucacaaacguguacgccgacagcuucgugauccggggagaugaagugcggcagauugccccuggacagacaggcaagaucgccgacuacaacuacaagcugcccgacgacuucaccggcugugugauugccuggaacagcaacaaccuggacuccaaagucggcggcaacuacaauuaccgcuaccggcuguuccggaaguccaaucugaagcccuucgagcgggacaucagcaccgaaaucuaucaggccggcagcaccccuugcaacggcguggaaggcuucaacugcuacuucccacugcaguccuacggcuuucagcccacaaauggcgugggcuaucagcccuacagagugguggugcugagcuucgaacugcugcaugcuccugccacagugugcggcccuaagaaaagcaccaaucucgugaagaacaaaugcgugaacuucaacuucaacggccugaccggcaccggcgugcugacagagagcaacaagaaguuccugccauuccagcaguuuggccgggauaucgccgauaccacagacgccguuagagauccccagacacuggaaauccuggacaucaccccaugcagcuucggcggagugucugugaucaccccuggcaccaacaccagcaaucagguggcagugcuguaccagggcgugaacuguaccgaagugcccguggccauucacgccgaucagcugacaccuacauggcggguguacuccaccggcagcaauguguuucagaccagagccggcugucugaucggagccgagcacgugaacaauagcuacgagugcgacauccccaucggcgcuggcaucugugccagcuaccagacacagacaaacagccccagacgggcuagaagcguggccagccagagcaucauugccuacacaaugucucugggcgccgagaacagcguggccuacuccaacaacucuaucgcuauccccaccaacuucaccaucagcgugaccaccgagauccugccuguguccaugaccaagaccagcguggacugcaccauguacaucugcggcgauuccaccgagugcuccaaccugcugcugcaguacggcagcuucugcacccagcugaauagagcccugacagggaucgccguggaacaggacaagaacacccaagagguguucgcccaagugaagcaaaucuacaagaccccuccuaucaaggacuucggcggcuucaauuucagccagauucugcccgauccuagcaagcccagcaagcggagcuucaucgaggaccugcuguucaacaaagugacacuggccgacgccggcuucaucaagcaguauggcgauugucugggcgacauugccgccagggaucugauuugcgcccagaaguuuaacggacugacagugcugccuccucugcugaccgaugagaugaucgcccaguacacaucugcccugcuggccggcacaaucacaagcggcuggacauuuggagcuggcgccgcucugcagauccccuuugcuaugcagauggccuaccgguucaacggcaucggagugacccagaaugugcuguacgagaaccagaagcugaucgccaaccaguucaacagcgccaucggcaagauccaggacagccugagcagcacagcaagcgcccugggaaagcugcaggacguggucaaccagaaugcccaggcacugaacacccuggucaagcagcuguccuccaacuucggcgccaucagcucugugcugaacgauauccugagcagacuggacaaggucgaggccgaggugcagaucgacagacugaucacaggcagacugcagagccuccagacauacgugacccagcagcugaucagagccgccgagauuagagccucugccaaucuggccgccaccaagaugucugagugugugcugggccagagcaagagaguggacuuuugcggcaagggcuaccaccugaugagcuucccucagucugccccucacggcgugguguuucugcacgugacauaugugcccgcucaagagaagaauuucaccaccgcuccagccaucugccacgacggcaaagcccacuuuccuagagaaggcguguucguguccaacggcacccauugguucgugacacagcggaacuucuacgagccccagaucaucaccaccgacaacaccuucgugucuggcaacugcgacguugugaucggcauugugaacaauaccguguacgacccucugcagcccgagcuggacagcuucaaagaggaacuggacaaguacuuuaagaaccacacaagccccgacguggaccugggcgauaucagcggaaucaaugccagcgucgugaacauccagaaagagaucgaccggcugaacgagguggccaagaaucugaacgagagccugaucgaccugcaagaacuggggaaguacgagcaguacaucaaguggcccugguacaucuggcugggcuuuaucgccggacugauugccaucgugauggucacaaucaugcuguguugcaugaccagcugcuguagcugccugaagggcuguuguagcuguggcagcugcugcaaguucgacgaggacgauucugagcccgugcugaagggcgugaaacugcacuacaccugauaauaggcuggagccucgguggccuagcuucuugccccuugggccuccccccagccccuccuccccuuccugcacccguacccccguggucuuugaauaaagucugagugggcggcaaaaaaaaaaaaaaaaaaaaaaaaaaaaaaaaaaaaaaaaaaaaaaaaaaaaaaaaaaaaaaaaaaaaaaaaaaaaaaaaaaaaaaaaaaaaaaaaaaaaucuag

SEQ ID NO: 26579 - RNA, 4100 nt, Artificial Sequence
  SARS-CoV-2/Wuhan/WIV05/2019__EPI_ISL_402128 spike protein mRNA gc mod (1-1273)
gggaaauaagagagaaaagaagaguaagaagaaauauaagaccccggcgccgccaccauguucguguuccuggugcugcugccucugguguccagccagugugugaaccugaccaccagaacacagcugccuccagccuacaccaacagcuuuaccagaggcguguacuaccccgacaagguguucagauccagcgugcugcacucuacccaggaccuguuccugccuuucuucagcaacgugaccugguuccacgccauccacguguccggcaccaauggcaccaagagauucgacaaccccgugcugcccuucaacgacgggguguacuuugccagcaccgagaaguccaacaucaucagaggcuggaucuucggcaccacacuggacagcaagacccagagccugcugaucgugaacaacgccaccaacguggucaucaaagugugcgaguuccaguucugcaacgaccccuuccugggcgucuacuaccacaagaacaacaagagcuggauggaaagcgaguuccggguguacagcagcgccaacaacugcaccuucgaguacgugucccagccuuuccugauggaccuggaaggcaagcagggcaacuucaagaaccugcgcgaguucguguuuaagaacaucgacggcuacuucaagaucuacagcaagcacaccccuaucaaccucgugcgggaucugccucagggcuucucugcucuggaaccccugguggaucugcccaucggcaucaacaucacccgguuucagacacugcuggcccugcacagaagcuaccugacaccuggcgauagcagcagcggauggacagcuggugccgccgcuuacuaugugggcuaccugcagccuagaaccuuccugcugaaguacaacgagaacggcaccaucaccgacgccguggauugugcucuggauccucugagcgagacaaagugcacccugaaguccuucaccguggaaaagggcaucuaccagaccagcaacuuccgggugcagcccaccgaauccaucgugcgguuccccaauaucaccaaucugugccccuucggcgagguguucaaugccaccagauucgccucuguguacgccuggaaccggaagcggaucagcaauugcguggccgacuacuccgugcuguacaacuccgccagcuucagcaccuucaagugcuacggcguguccccuaccaagcugaacgaccugugcuucacaaacguguacgccgacagcuucgugauccggggagaugaagugcggcagauugccccuggacagacaggcaagaucgccgacuacaacuacaagcugcccgacgacuucaccggcugugugauugccuggaacagcaacaaccuggacuccaaagucggcggcaacuacaauuaccuguaccggcuguuccggaaguccaaucugaagcccuucgagcgggacaucuccaccgagaucuaucaggccggcagcaccccuuguaacggcguggaaggcuucaacugcuacuucccacugcaguccuacggcuuucagcccacaaauggcgugggcuaucagcccuacagagugguggugcugagcuucgaacugcugcaugccccugccacagugugcggcccuaagaaaagcaccaaucucgugaagaacaaaugcgugaacuucaacuucaacggccugaccggcaccggcgugcugacagagagcaacaagaaguuccugccauuccagcaguuuggccgggauaucgccgauaccacagacgccguuagagauccccagacacuggaaauccuggacaucaccccuugcagcuucggcggagugucugugaucaccccuggcaccaacaccagcaaucagguggcagugcuguaccaggacgugaacuguaccgaagugcccguggccauucacgccgaucagcugacaccuacauggcggguguacuccaccggcagcaauguguuucagaccagagccggcugucugaucggagccgagcacgugaacaauagcuacgagugcgacauccccaucggcgcuggaaucugcgccagcuaccagacacagacaaacagcccucggagagccagaagcguggccagccagagcaucauugccuacacaaugucucugggcgccgagaacagcguggccuacuccaacaacucuaucgcuauccccaccaacuucaccaucagcgugaccacagagauccugccuguguccaugaccaagaccagcguggacugcaccauguacaucugcggcgauuccaccgagugcuccaaccugcugcugcaguacggcagcuucugcacccagcugaauagagcccugacagggaucgccguggaacaggacaagaacacccaagagguguucgcccaagugaagcagaucuacaagaccccuccuaucaaggacuucggcggcuucaauuucagccagauucugcccgauccuagcaagcccagcaagcggagcuucaucgaggaccugcuguucaacaaagugacacuggccgacgccggcuucaucaagcaguauggcgauugucugggcgacauugccgccagggaucugauuugcgcccagaaguuuaacggacugacagugcugccuccucugcugaccgaugagaugaucgcccaguacacaucugcccugcuggccggcacaaucacaagcggcuggacauuuggagcaggcgccgcucugcagauccccuuugcuaugcagauggccuaccgguucaacggcaucggagugacccagaaugugcuguacgagaaccagaagcugaucgccaaccaguucaacagcgccaucggcaagauccaggacagccugagcagcacagcaagcgcccugggaaagcugcaggacguggucaaccagaaugcccaggcacugaacacccuggucaagcagcuguccuccaacuucggcgccaucagcucugugcugaacgauauccugagcagacuggacaaggucgaggccgaggugcagaucgacagacugaucacaggcagacugcagagccuccagacauacgugacccagcagcugaucagagccgccgagauuagagccucugccaaucuggccgccaccaagaugucugagugugugcugggccagagcaagagaguggacuuuugcggcaagggcuaccaccugaugagcuucccucagucugccccucacggcgugguguuucugcacgugacauaugugcccgcucaagagaagaauuucaccaccgcuccagccaucugccacgacggcaaagcccacuuuccuagagaaggcguguucguguccaacggcacccauugguucgugacacagcggaacuucuacgagccccagaucaucaccaccgacaacaccuucgugucuggcaacugcgacgucgugaucggcauugugaacaauaccguguacgacccucugcagcccgagcuggacagcuucaaagaggaacuggacaaguacuuuaagaaccacacaagccccgacguggaccugggcgauaucagcggaaucaaugccagcgucgugaacauccagaaagagaucgaccggcugaacgagguggccaagaaucugaacgagagccugaucgaccugcaagaacuggggaaguacgagcaguacaucaaguggcccugguacaucuggcugggcuuuaucgccggacugauugccaucgugauggucacaaucaugcuguguugcaugaccagcugcuguagcugccugaagggcuguuguagcuguggcagcugcugcaaguucgacgaggacgauucugagcccgugcugaagggcgugaaacugcacuacacaugauaauaggcuggagccucgguggccuagcuucuugccccuugggccuccccccagccccuccuccccuuccugcacccguacccccguggucuuugaauaaagucugagugggcggcaaaaaaaaaaaaaaaaaaaaaaaaaaaaaaaaaaaaaaaaaaaaaaaaaaaaaaaaaaaaaaaaaaaaaaaaaaaaaaaaaaaaaaaaaaaaaaaaaaaaucuag

SEQ ID NO: 26580 - RNA, 4100 nt, Artificial Sequence
  SARS-CoV-2/Wuhan/WIV05/2019__EPI_ISL_402128 spike protein mRNA gc mod (1-1273)(D614G)
gggaaauaagagagaaaagaagaguaagaagaaauauaagaccccggcgccgccaccauguucguguuccuggugcugcugccucugguguccagccagugugugaaccugaccaccagaacacagcugccuccagccuacaccaacagcuuuaccagaggcguguacuaccccgacaagguguucagauccagcgugcugcacucuacccaggaccuguuccugccuuucuucagcaacgugaccugguuccacgccauccacguguccggcaccaauggcaccaagagauucgacaaccccgugcugcccuucaacgacgggguguacuuugccagcaccgagaaguccaacaucaucagaggcuggaucuucggcaccacacuggacagcaagacccagagccugcugaucgugaacaacgccaccaacguggucaucaaagugugcgaguuccaguucugcaacgaccccuuccugggcgucuacuaccacaagaacaacaagagcuggauggaaagcgaguuccggguguacagcagcgccaacaacugcaccuucgaguacgugucccagccuuuccugauggaccuggaaggcaagcagggcaacuucaagaaccugcgcgaguucguguuuaagaacaucgacggcuacuucaagaucuacagcaagcacaccccuaucaaccucgugcgggaucugccucagggcuucucugcucuggaaccccugguggaucugcccaucggcaucaacaucacccgguuucagacacugcuggcccugcacagaagcuaccugacaccuggcgauagcagcagcggauggacagcuggugccgccgcuuacuaugugggcuaccugcagccuagaaccuuccugcugaaguacaacgagaacggcaccaucaccgacgccguggauugugcucuggauccucugagcgagacaaagugcacccugaaguccuucaccguggaaaagggcaucuaccagaccagcaacuuccgggugcagcccaccgaauccaucgugcgguuccccaauaucaccaaucugugccccuucggcgagguguucaaugccaccagauucgccucuguguacgccuggaaccggaagcggaucagcaauugcguggccgacuacuccgugcuguacaacuccgccagcuucagcaccuucaagugcuacggcguguccccuaccaagcugaacgaccugugcuucacaaacguguacgccgacagcuucgugauccggggagaugaagugcggcagauugccccuggacagacaggcaagaucgccgacuacaacuacaagcugcccgacgacuucaccggcugugugauugccuggaacagcaacaaccuggacuccaaagucggcggcaacuacaauuaccuguaccggcuguuccggaaguccaaucugaagcccuucgagcgggacaucuccaccgagaucuaucaggccggcagcaccccuuguaacggcguggaaggcuucaacugcuacuucccacugcaguccuacggcuuucagcccacaaauggcgugggcuaucagcccuacagagugguggugcugagcuucgaacugcugcaugccccugccacagugugcggcccuaagaaaagcaccaaucucgugaagaacaaaugcgugaacuucaacuucaacggccugaccggcaccggcgugcugacagagagcaacaagaaguuccugccauuccagcaguuuggccgggauaucgccgauaccacagacgccguuagagauccccagacacuggaaauccuggacaucaccccuugcagcuucggcggagugucugugaucaccccuggcaccaacaccagcaaucagguggcagugcuguaccagggcgugaacuguaccgaagugcccguggccauucacgccgaucagcugacaccuacauggcggguguacuccaccggcagcaauguguuucagaccagagccggcugucugaucggagccgagcacgugaacaauagcuacgagugcgacauccccaucggcgcuggaaucugcgccagcuaccagacacagacaaacagcccucggagagccagaagcguggccagccagagcaucauugccuacacaaugucucugggcgccgagaacagcguggccuacuccaacaacucuaucgcuauccccaccaacuucaccaucagcgugaccacagagauccugccuguguccaugaccaagaccagcguggacugcaccauguacaucugcggcgauuccaccgagugcuccaaccugcugcugcaguacggcagcuucugcacccagcugaauagagcccugacagggaucgccguggaacaggacaagaacacccaagagguguucgcccaagugaagcagaucuacaagaccccuccuaucaaggacuucggcggcuucaauuucagccagauucugcccgauccuagcaagcccagcaagcggagcuucaucgaggaccugcuguucaacaaagugacacuggccgacgccggcuucaucaagcaguauggcgauugucugggcgacauugccgccagggaucugauuugcgcccagaaguuuaacggacugacagugcugccuccucugcugaccgaugagaugaucgcccaguacacaucugcccugcuggccggcacaaucacaagcggcuggacauuuggagcaggcgccgcucugcagauccccuuugcuaugcagauggccuaccgguucaacggcaucggagugacccagaaugugcuguacgagaaccagaagcugaucgccaaccaguucaacagcgccaucggcaagauccaggacagccugagcagcacagcaagcgcccugggaaagcugcaggacguggucaaccagaaugcccaggcacugaacacccuggucaagcagcuguccuccaacuucggcgccaucagcucugugcugaacgauauccugagcagacuggacaaggucgaggccgaggugcagaucgacagacugaucacaggcagacugcagagccuccagacauacgugacccagcagcugaucagagccgccgagauuagagccucugccaaucuggccgccaccaagaugucugagugugugcugggccagagcaagagaguggacuuuugcggcaagggcuaccaccugaugagcuucccucagucugccccucacggcgugguguuucugcacgugacauaugugcccgcucaagagaagaauuucaccaccgcuccagccaucugccacgacggcaaagcccacuuuccuagagaaggcguguucguguccaacggcacccauugguucgugacacagcggaacuucuacgagccccagaucaucaccaccgacaacaccuucgugucuggcaacugcgacgucgugaucggcauugugaacaauaccguguacgacccucugcagcccgagcuggacagcuucaaagaggaacuggacaaguacuuuaagaaccacacaagccccgacguggaccugggcgauaucagcggaaucaaugccagcgucgugaacauccagaaagagaucgaccggcugaacgagguggccaagaaucugaacgagagccugaucgaccugcaagaacuggggaaguacgagcaguacaucaaguggcccugguacaucuggcugggcuuuaucgccggacugauugccaucgugauggucacaaucaugcuguguugcaugaccagcugcuguagcugccugaagggcuguuguagcuguggcagcugcugcaaguucgacgaggacgauucugagcccgugcugaagggcgugaaacugcacuacacaugauaauaggcuggagccucgguggccuagcuucuugccccuugggccuccccccagccccuccuccccuuccugcacccguacccccguggucuuugaauaaagucugagugggcggcaaaaaaaaaaaaaaaaaaaaaaaaaaaaaaaaaaaaaaaaaaaaaaaaaaaaaaaaaaaaaaaaaaaaaaaaaaaaaaaaaaaaaaaaaaaaaaaaaaaaucuag

SEQ ID NO: 26581 - RNA, 4100 nt, Artificial Sequence
  SARS-CoV-2/Wuhan/WIV05/2019__EPI_ISL_402128 spike protein mRNA gc mod (1-1273)(A222V_D614G)
gggaaauaagagagaaaagaagaguaagaagaaauauaagaccccggcgccgccaccauguucguguuccuggugcugcugccucugguguccagccagugugugaaccugaccaccagaacacagcugccuccagccuacaccaacagcuuuaccagaggcguguacuaccccgacaagguguucagauccagcgugcugcacucuacccaggaccuguuccugccuuucuucagcaacgugaccugguuccacgccauccacguguccggcaccaauggcaccaagagauucgacaaccccgugcugcccuucaacgacgggguguacuuugccagcaccgagaaguccaacaucaucagaggcuggaucuucggcaccacacuggacagcaagacccagagccugcugaucgugaacaacgccaccaacguggucaucaaagugugcgaguuccaguucugcaacgaccccuuccugggcgucuacuaccacaagaacaacaagagcuggauggaaagcgaguuccggguguacagcagcgccaacaacugcaccuucgaguacgugucccagccuuuccugauggaccuggaaggcaagcagggcaacuucaagaaccugcgcgaguucguguuuaagaacaucgacggcuacuucaagaucuacagcaagcacaccccuaucaaccucgugcgggaucugccucagggcuucucugugcuggaaccccugguggaucugcccaucggcaucaacaucacccgguuucagacacugcuggcccugcacagaagcuaccugacaccuggcgauagcagcagcggauggacagcuggugccgccgcuuacuaugugggcuaccugcagccuagaaccuuccugcugaaguacaacgagaacggcaccaucaccgacgccguggauugugcucuggauccucugagcgagacaaagugcacccugaaguccuucaccguggaaaagggcaucuaccagaccagcaacuuccgggugcagcccaccgaauccaucgugcgguuccccaauaucaccaaucugugccccuucggcgagguguucaaugccaccagauucgccucuguguacgccuggaaccggaagcggaucagcaauugcguggccgacuacuccgugcuguacaacuccgccagcuucagcaccuucaagugcuacggcguguccccuaccaagcugaacgaccugugcuucacaaacguguacgccgacagcuucgugauccggggagaugaagugcggcagauugccccuggacagacaggcaagaucgccgacuacaacuacaagcugcccgacgacuucaccggcugugugauugccuggaacagcaacaaccuggacuccaaagucggcggcaacuacaauuaccuguaccggcuguuccggaaguccaaucugaagcccuucgagcgggacaucuccaccgagaucuaucaggccggcagcaccccuuguaacggcguggaaggcuucaacugcuacuucccacugcaguccuacggcuuucagcccacaaauggcgugggcuaucagcccuacagagugguggugcugagcuucgaacugcugcaugccccugccacagugugcggcccuaagaaaagcaccaaucucgugaagaacaaaugcgugaacuucaacuucaacggccugaccggcaccggcgugcugacagagagcaacaagaaguuccugccauuccagcaguuuggccgggauaucgccgauaccacagacgccguuagagauccccagacacuggaaauccuggacaucaccccuugcagcuucggcggagugucugugaucaccccuggcaccaacaccagcaaucagguggcagugcuguaccagggcgugaacuguaccgaagugcccguggccauucacgccgaucagcugacaccuacauggcggguguacuccaccggcagcaauguguuucagaccagagccggcugucugaucggagccgagcacgugaacaauagcuacgagugcgacauccccaucggcgcuggaaucugcgccagcuaccagacacagacaaacagcccucggagagccagaagcguggccagccagagcaucauugccuacacaaugucucugggcgccgagaacagcguggccuacuccaacaacucuaucgcuauccccaccaacuucaccaucagcgugaccacagagauccugccuguguccaugaccaagaccagcguggacugcaccauguacaucugcggcgauuccaccgagugcuccaaccugcugcugcaguacggcagcuucugcacccagcugaauagagcccugacagggaucgccguggaacaggacaagaacacccaagagguguucgcccaagugaagcagaucuacaagaccccuccuaucaaggacuucggcggcuucaauuucagccagauucugcccgauccuagcaagcccagcaagcggagcuucaucgaggaccugcuguucaacaaagugacacuggccgacgccggcuucaucaagcaguauggcgauugucugggcgacauugccgccagggaucugauuugcgcccagaaguuuaacggacugacagugcugccuccucugcugaccgaugagaugaucgcccaguacacaucugcccugcuggccggcacaaucacaagcggcuggacauuuggagcaggcgccgcucugcagauccccuuugcuaugcagauggccuaccgguucaacggcaucggagugacccagaaugugcuguacgagaaccagaagcugaucgccaaccaguucaacagcgccaucggcaagauccaggacagccugagcagcacagcaagcgcccugggaaagcugcaggacguggucaaccagaaugcccaggcacugaacacccuggucaagcagcuguccuccaacuucggcgccaucagcucugugcugaacgauauccugagcagacuggacaaggucgaggccgaggugcagaucgacagacugaucacaggcagacugcagagccuccagacauacgugacccagcagcugaucagagccgccgagauuagagccucugccaaucuggccgccaccaagaugucugagugugugcugggccagagcaagagaguggacuuuugcggcaagggcuaccaccugaugagcuucccucagucugccccucacggcgugguguuucugcacgugacauaugugcccgcucaagagaagaauuucaccaccgcuccagccaucugccacgacggcaaagcccacuuuccuagagaaggcguguucguguccaacggcacccauugguucgugacacagcggaacuucuacgagccccagaucaucaccaccgacaacaccuucgugucuggcaacugcgacgucgugaucggcauugugaacaauaccguguacgacccucugcagcccgagcuggacagcuucaaagaggaacuggacaaguacuuuaagaaccacacaagccccgacguggaccugggcgauaucagcggaaucaaugccagcgucgugaacauccagaaagagaucgaccggcugaacgagguggccaagaaucugaacgagagccugaucgaccugcaagaacuggggaaguacgagcaguacaucaaguggcccugguacaucuggcugggcuuuaucgccggacugauugccaucgugauggucacaaucaugcuguguugcaugaccagcugcuguagcugccugaagggcuguuguagcuguggcagcugcugcaaguucgacgaggacgauucugagcccgugcugaagggcgugaaacugcacuacacaugauaauaggcuggagccucgguggccuagcuucuugccccuugggccuccccccagccccuccuccccuuccugcacccguacccccguggucuuugaauaaagucugagugggcggcaaaaaaaaaaaaaaaaaaaaaaaaaaaaaaaaaaaaaaaaaaaaaaaaaaaaaaaaaaaaaaaaaaaaaaaaaaaaaaaaaaaaaaaaaaaaaaaaaaaaucuag

SEQ ID NO: 26582 - RNA, 4100 nt, Artificial Sequence
  SARS-CoV-2/Wuhan/WIV05/2019__EPI_ISL_402128 spike protein mRNA gc mod (1-1273)(N439K_D614G)
gggaaauaagagagaaaagaagaguaagaagaaauauaagaccccggcgccgccaccauguucguguuccuggugcugcugccucugguguccagccagugugugaaccugaccaccagaacacagcugccuccagccuacaccaacagcuuuaccagaggcguguacuaccccgacaagguguucagauccagcgugcugcacucuacccaggaccuguuccugccuuucuucagcaacgugaccugguuccacgccauccacguguccggcaccaauggcaccaagagauucgacaaccccgugcugcccuucaacgacgggguguacuuugccagcaccgagaaguccaacaucaucagaggcuggaucuucggcaccacacuggacagcaagacccagagccugcugaucgugaacaacgccaccaacguggucaucaaagugugcgaguuccaguucugcaacgaccccuuccugggcgucuacuaccacaagaacaacaagagcuggauggaaagcgaguuccggguguacagcagcgccaacaacugcaccuucgaguacgugucccagccuuuccugauggaccuggaaggcaagcagggcaacuucaagaaccugcgcgaguucguguuuaagaacaucgacggcuacuucaagaucuacagcaagcacaccccuaucaaccucgugcgggaucugccucagggcuucucugcucuggaaccccugguggaucugcccaucggcaucaacaucacccgguuucagacacugcuggcccugcacagaagcuaccugacaccuggcgauagcagcagcggauggacagcuggugccgccgcuuacuaugugggcuaccugcagccuagaaccuuccugcugaaguacaacgagaacggcaccaucaccgacgccguggauugugcucuggauccucugagcgagacaaagugcacccugaaguccuucaccguggaaaagggcaucuaccagaccagcaacuuccgggugcagcccaccgaauccaucgugcgguuccccaauaucaccaaucugugccccuucggcgagguguucaaugccaccagauucgccucuguguacgccuggaaccggaagcggaucagcaauugcguggccgacuacuccgugcuguacaacuccgccagcuucagcaccuucaagugcuacggcguguccccuaccaagcugaacgaccugugcuucacaaacguguacgccgacagcuucgugauccggggagaugaagugcggcagauugccccuggacagacaggcaagaucgccgacuacaacuacaagcugcccgacgacuucaccggcugugugauugccuggaacagcaagaaccuggacuccaaagucggcggcaacuacaauuaccuguaccggcuguuccggaaguccaaucugaagcccuucgagcgggacaucuccaccgagaucuaucaggccggcagcaccccuuguaacggcguggaaggcuucaacugcuacuucccacugcaguccuacggcuuucagcccacaaauggcgugggcuaucagcccuacagagugguggugcugagcuucgaacugcugcaugccccugccacagugugcggcccuaagaaaagcaccaaucucgugaagaacaaaugcgugaacuucaacuucaacggccugaccggcaccggcgugcugacagagagcaacaagaaguuccugccauuccagcaguuuggccgggauaucgccgauaccacagacgccguuagagauccccagacacuggaaauccuggacaucaccccuugcagcuucggcggagugucugugaucaccccuggcaccaacaccagcaaucagguggcagugcuguaccagggcgugaacuguaccgaagugcccguggccauucacgccgaucagcugacaccuacauggcggguguacuccaccggcagcaauguguuucagaccagagccggcugucugaucggagccgagcacgugaacaauagcuacgagugcgacauccccaucggcgcuggaaucugcgccagcuaccagacacagacaaacagcccucggagagccagaagcguggccagccagagcaucauugccuacacaaugucucugggcgccgagaacagcguggccuacuccaacaacucuaucgcuauccccaccaacuucaccaucagcgugaccacagagauccugccuguguccaugaccaagaccagcguggacugcaccauguacaucugcggcgauuccaccgagugcuccaaccugcugcugcaguacggcagcuucugcacccagcugaauagagcccugacagggaucgccguggaacaggacaagaacacccaagagguguucgcccaagugaagcagaucuacaagaccccuccuaucaaggacuucggcggcuucaauuucagccagauucugcccgauccuagcaagcccagcaagcggagcuucaucgaggaccugcuguucaacaaagugacacuggccgacgccggcuucaucaagcaguauggcgauugucugggcgacauugccgccagggaucugauuugcgcccagaaguuuaacggacugacagugcugccuccucugcugaccgaugagaugaucgcccaguacacaucugcccugcuggccggcacaaucacaagcggcuggacauuuggagcaggcgccgcucugcagauccccuuugcuaugcagauggccuaccgguucaacggcaucggagugacccagaaugugcuguacgagaaccagaagcugaucgccaaccaguucaacagcgccaucggcaagauccaggacagccugagcagcacagcaagcgcccugggaaagcugcaggacguggucaaccagaaugcccaggcacugaacacccuggucaagcagcuguccuccaacuucggcgccaucagcucugugcugaacgauauccugagcagacuggacaaggucgaggccgaggugcagaucgacagacugaucacaggcagacugcagagccuccagacauacgugacccagcagcugaucagagccgccgagauuagagccucugccaaucuggccgccaccaagaugucugagugugugcugggccagagcaagagaguggacuuuugcggcaagggcuaccaccugaugagcuucccucagucugccccucacggcgugguguuucugcacgugacauaugugcccgcucaagagaagaauuucaccaccgcuccagccaucugccacgacggcaaagcccacuuuccuagagaaggcguguucguguccaacggcacccauugguucgugacacagcggaacuucuacgagccccagaucaucaccaccgacaacaccuucgugucuggcaacugcgacgucgugaucggcauugugaacaauaccguguacgacccucugcagcccgagcuggacagcuucaaagaggaacuggacaaguacuuuaagaaccacacaagccccgacguggaccugggcgauaucagcggaaucaaugccagcgucgugaacauccagaaagagaucgaccggcugaacgagguggccaagaaucugaacgagagccugaucgaccugcaagaacuggggaaguacgagcaguacaucaaguggcccugguacaucuggcugggcuuuaucgccggacugauugccaucgugauggucacaaucaugcuguguugcaugaccagcugcuguagcugccugaagggcuguuguagcuguggcagcugcugcaaguucgacgaggacgauucugagcccgugcugaagggcgugaaacugcacuacacaugauaauaggcuggagccucgguggccuagcuucuugccccuugggccuccccccagccccuccuccccuuccugcacccguacccccguggucuuugaauaaagucugagugggcggcaaaaaaaaaaaaaaaaaaaaaaaaaaaaaaaaaaaaaaaaaaaaaaaaaaaaaaaaaaaaaaaaaaaaaaaaaaaaaaaaaaaaaaaaaaaaaaaaaaaaucuag

SEQ ID NO: 26583 - RNA, 4100 nt, Artificial Sequence
  SARS-CoV-2/Wuhan/WIV05/2019__EPI_ISL_402128 spike protein mRNA gc mod (1-1273)(S477N_D614G)
gggaaauaagagagaaaagaagaguaagaagaaauauaagaccccggcgccgccaccauguucguguuccuggugcugcugccucugguguccagccagugugugaaccugaccaccagaacacagcugccuccagccuacaccaacagcuuuaccagaggcguguacuaccccgacaagguguucagauccagcgugcugcacucuacccaggaccuguuccugccuuucuucagcaacgugaccugguuccacgccauccacguguccggcaccaauggcaccaagagauucgacaaccccgugcugcccuucaacgacgggguguacuuugccagcaccgagaaguccaacaucaucagaggcuggaucuucggcaccacacuggacagcaagacccagagccugcugaucgugaacaacgccaccaacguggucaucaaagugugcgaguuccaguucugcaacgaccccuuccugggcgucuacuaccacaagaacaacaagagcuggauggaaagcgaguuccggguguacagcagcgccaacaacugcaccuucgaguacgugucccagccuuuccugauggaccuggaaggcaagcagggcaacuucaagaaccugcgcgaguucguguuuaagaacaucgacggcuacuucaagaucuacagcaagcacaccccuaucaaccucgugcgggaucugccucagggcuucucugcucuggaaccccugguggaucugcccaucggcaucaacaucacccgguuucagacacugcuggcccugcacagaagcuaccugacaccuggcgauagcagcagcggauggacagcuggugccgccgcuuacuaugugggcuaccugcagccuagaaccuuccugcugaaguacaacgagaacggcaccaucaccgacgccguggauugugcucuggauccucugagcgagacaaagugcacccugaaguccuucaccguggaaaagggcaucuaccagaccagcaacuuccgggugcagcccaccgaauccaucgugcgguuccccaauaucaccaaucugugccccuucggcgagguguucaaugccaccagauucgccucuguguacgccuggaaccggaagcggaucagcaauugcguggccgacuacuccgugcuguacaacuccgccagcuucagcaccuucaagugcuacggcguguccccuaccaagcugaacgaccugugcuucacaaacguguacgccgacagcuucgugauccggggagaugaagugcggcagauugccccuggacagacaggcaagaucgccgacuacaacuacaagcugcccgacgacuucaccggcugugugauugccuggaacagcaacaaccuggacuccaaagucggcggcaacuacaauuaccuguaccggcuguuccggaaguccaaucugaagcccuucgagcgggacaucuccaccgagaucuaucaggccggcaacaccccuuguaacggcguggaaggcuucaacugcuacuucccacugcaguccuacggcuuucagcccacaaauggcgugggcuaucagcccuacagagugguggugcugagcuucgaacugcugcaugccccugccacagugugcggcccuaagaaaagcaccaaucucgugaagaacaaaugcgugaacuucaacuucaacggccugaccggcaccggcgugcugacagagagcaacaagaaguuccugccauuccagcaguuuggccgggauaucgccgauaccacagacgccguuagagauccccagacacuggaaauccuggacaucaccccuugcagcuucggcggagugucugugaucaccccuggcaccaacaccagcaaucagguggcagugcuguaccagggcgugaacuguaccgaagugcccguggccauucacgccgaucagcugacaccuacauggcggguguacuccaccggcagcaauguguuucagaccagagccggcugucugaucggagccgagcacgugaacaauagcuacgagugcgacauccccaucggcgcuggaaucugcgccagcuaccagacacagacaaacagcccucggagagccagaagcguggccagccagagcaucauugccuacacaaugucucugggcgccgagaacagcguggccuacuccaacaacucuaucgcuauccccaccaacuucaccaucagcgugaccacagagauccugccuguguccaugaccaagaccagcguggacugcaccauguacaucugcggcgauuccaccgagugcuccaaccugcugcugcaguacggcagcuucugcacccagcugaauagagcccugacagggaucgccguggaacaggacaagaacacccaagagguguucgcccaagugaagcagaucuacaagaccccuccuaucaaggacuucggcggcuucaauuucagccagauucugcccgauccuagcaagcccagcaagcggagcuucaucgaggaccugcuguucaacaaagugacacuggccgacgccggcuucaucaagcaguauggcgauugucugggcgacauugccgccagggaucugauuugcgcccagaaguuuaacggacugacagugcugccuccucugcugaccgaugagaugaucgcccaguacacaucugcccugcuggccggcacaaucacaagcggcuggacauuuggagcaggcgccgcucugcagauccccuuugcuaugcagauggccuaccgguucaacggcaucggagugacccagaaugugcuguacgagaaccagaagcugaucgccaaccaguucaacagcgccaucggcaagauccaggacagccugagcagcacagcaagcgcccugggaaagcugcaggacguggucaaccagaaugcccaggcacugaacacccuggucaagcagcuguccuccaacuucggcgccaucagcucugugcugaacgauauccugagcagacuggacaaggucgaggccgaggugcagaucgacagacugaucacaggcagacugcagagccuccagacauacgugacccagcagcugaucagagccgccgagauuagagccucugccaaucuggccgccaccaagaugucugagugugugcugggccagagcaagagaguggacuuuugcggcaagggcuaccaccugaugagcuucccucagucugccccucacggcgugguguuucugcacgugacauaugugcccgcucaagagaagaauuucaccaccgcuccagccaucugccacgacggcaaagcccacuuuccuagagaaggcguguucguguccaacggcacccauugguucgugacacagcggaacuucuacgagccccagaucaucaccaccgacaacaccuucgugucuggcaacugcgacgucgugaucggcauugugaacaauaccguguacgacccucugcagcccgagcuggacagcuucaaagaggaacuggacaaguacuuuaagaaccacacaagccccgacguggaccugggcgauaucagcggaaucaaugccagcgucgugaacauccagaaagagaucgaccggcugaacgagguggccaagaaucugaacgagagccugaucgaccugcaagaacuggggaaguacgagcaguacaucaaguggcccugguacaucuggcugggcuuuaucgccggacugauugccaucgugauggucacaaucaugcuguguugcaugaccagcugcuguagcugccugaagggcuguuguagcuguggcagcugcugcaaguucgacgaggacgauucugagcccgugcugaagggcgugaaacugcacuacacaugauaauaggcuggagccucgguggccuagcuucuugccccuugggccuccccccagccccuccuccccuuccugcacccguacccccguggucuuugaauaaagucugagugggcggcaaaaaaaaaaaaaaaaaaaaaaaaaaaaaaaaaaaaaaaaaaaaaaaaaaaaaaaaaaaaaaaaaaaaaaaaaaaaaaaaaaaaaaaaaaaaaaaaaaaaucuag

SEQ ID NO: 26584 - RNA, 4100 nt, Artificial Sequence
  SARS-CoV-2/Wuhan/WIV05/2019__EPI_ISL_402128 spike protein mRNA gc mod (1-1273)(N501Y_D614G)
gggaaauaagagagaaaagaagaguaagaagaaauauaagaccccggcgccgccaccauguucguguuccuggugcugcugccucugguguccagccagugugugaaccugaccaccagaacacagcugccuccagccuacaccaacagcuuuaccagaggcguguacuaccccgacaagguguucagauccagcgugcugcacucuacccaggaccuguuccugccuuucuucagcaacgugaccugguuccacgccauccacguguccggcaccaauggcaccaagagauucgacaaccccgugcugcccuucaacgacgggguguacuuugccagcaccgagaaguccaacaucaucagaggcuggaucuucggcaccacacuggacagcaagacccagagccugcugaucgugaacaacgccaccaacguggucaucaaagugugcgaguuccaguucugcaacgaccccuuccugggcgucuacuaccacaagaacaacaagagcuggauggaaagcgaguuccggguguacagcagcgccaacaacugcaccuucgaguacgugucccagccuuuccugauggaccuggaaggcaagcagggcaacuucaagaaccugcgcgaguucguguuuaagaacaucgacggcuacuucaagaucuacagcaagcacaccccuaucaaccucgugcgggaucugccucagggcuucucugcucuggaaccccugguggaucugcccaucggcaucaacaucacccgguuucagacacugcuggcccugcacagaagcuaccugacaccuggcgauagcagcagcggauggacagcuggugccgccgcuuacuaugugggcuaccugcagccuagaaccuuccugcugaaguacaacgagaacggcaccaucaccgacgccguggauugugcucuggauccucugagcgagacaaagugcacccugaaguccuucaccguggaaaagggcaucuaccagaccagcaacuuccgggugcagcccaccgaauccaucgugcgguuccccaauaucaccaaucugugccccuucggcgagguguucaaugccaccagauucgccucuguguacgccuggaaccggaagcggaucagcaauugcguggccgacuacuccgugcuguacaacuccgccagcuucagcaccuucaagugcuacggcguguccccuaccaagcugaacgaccugugcuucacaaacguguacgccgacagcuucgugauccggggagaugaagugcggcagauugccccuggacagacaggcaagaucgccgacuacaacuacaagcugcccgacgacuucaccggcugugugauugccuggaacagcaacaaccuggacuccaaagucggcggcaacuacaauuaccuguaccggcuguuccggaaguccaaucugaagcccuucgagcgggacaucuccaccgagaucuaucaggccggcagcaccccuuguaacggcguggaaggcuucaacugcuacuucccacugcaguccuacggcuuucagcccacauacggcgugggcuaucagcccuacagagugguggugcugagcuucgaacugcugcaugccccugccacagugugcggcccuaagaaaagcaccaaucucgugaagaacaaaugcgugaacuucaacuucaacggccugaccggcaccggcgugcugacagagagcaacaagaaguuccugccauuccagcaguuuggccgggauaucgccgauaccacagacgccguuagagauccccagacacuggaaauccuggacaucaccccuugcagcuucggcggagugucugugaucaccccuggcaccaacaccagcaaucagguggcagugcuguaccagggcgugaacuguaccgaagugcccguggccauucacgccgaucagcugacaccuacauggcggguguacuccaccggcagcaauguguuucagaccagagccggcugucugaucggagccgagcacgugaacaauagcuacgagugcgacauccccaucggcgcuggaaucugcgccagcuaccagacacagacaaacagcccucggagagccagaagcguggccagccagagcaucauugccuacacaaugucucugggcgccgagaacagcguggccuacuccaacaacucuaucgcuauccccaccaacuucaccaucagcgugaccacagagauccugccuguguccaugaccaagaccagcguggacugcaccauguacaucugcggcgauuccaccgagugcuccaaccugcugcugcaguacggcagcuucugcacccagcugaauagagcccugacagggaucgccguggaacaggacaagaacacccaagagguguucgcccaagugaagcagaucuacaagaccccuccuaucaaggacuucggcggcuucaauuucagccagauucugcccgauccuagcaagcccagcaagcggagcuucaucgaggaccugcuguucaacaaagugacacuggccgacgccggcuucaucaagcaguauggcgauugucugggcgacauugccgccagggaucugauuugcgcccagaaguuuaacggacugacagugcugccuccucugcugaccgaugagaugaucgcccaguacacaucugcccugcuggccggcacaaucacaagcggcuggacauuuggagcaggcgccgcucugcagauccccuuugcuaugcagauggccuaccgguucaacggcaucggagugacccagaaugugcuguacgagaaccagaagcugaucgccaaccaguucaacagcgccaucggcaagauccaggacagccugagcagcacagcaagcgcccugggaaagcugcaggacguggucaaccagaaugcccaggcacugaacacccuggucaagcagcuguccuccaacuucggcgccaucagcucugugcugaacgauauccugagcagacuggacaaggucgaggccgaggugcagaucgacagacugaucacaggcagacugcagagccuccagacauacgugacccagcagcugaucagagccgccgagauuagagccucugccaaucuggccgccaccaagaugucugagugugugcugggccagagcaagagaguggacuuuugcggcaagggcuaccaccugaugagcuucccucagucugccccucacggcgugguguuucugcacgugacauaugugcccgcucaagagaagaauuucaccaccgcuccagccaucugccacgacggcaaagcccacuuuccuagagaaggcguguucguguccaacggcacccauugguucgugacacagcggaacuucuacgagccccagaucaucaccaccgacaacaccuucgugucuggcaacugcgacgucgugaucggcauugugaacaauaccguguacgacccucugcagcccgagcuggacagcuucaaagaggaacuggacaaguacuuuaagaaccacacaagccccgacguggaccugggcgauaucagcggaaucaaugccagcgucgugaacauccagaaagagaucgaccggcugaacgagguggccaagaaucugaacgagagccugaucgaccugcaagaacuggggaaguacgagcaguacaucaaguggcccugguacaucuggcugggcuuuaucgccggacugauugccaucgugauggucacaaucaugcuguguugcaugaccagcugcuguagcugccugaagggcuguuguagcuguggcagcugcugcaaguucgacgaggacgauucugagcccgugcugaagggcgugaaacugcacuacacaugauaauaggcuggagccucgguggccuagcuucuugccccuugggccuccccccagccccuccuccccuuccugcacccguacccccguggucuuugaauaaagucugagugggcggcaaaaaaaaaaaaaaaaaaaaaaaaaaaaaaaaaaaaaaaaaaaaaaaaaaaaaaaaaaaaaaaaaaaaaaaaaaaaaaaaaaaaaaaaaaaaaaaaaaaaucuag

SEQ ID NO: 26585 - RNA, 4094 nt, Artificial Sequence
  SARS-CoV-2/Wuhan/WIV05/2019__EPI_ISL_402128 spike protein mRNA gc mod (1-1273)(H69del_V70del_D614G)
gggaaauaagagagaaaagaagaguaagaagaaauauaagaccccggcgccgccaccauguucguguuccuggugcugcugccucugguguccagccagugugugaaccugaccaccagaacacagcugccuccagccuacaccaacagcuuuaccagaggcguguacuaccccgacaagguguucagauccagcgugcugcacucuacccaggaccuguuccugccuuucuucagcaacgugaccugguuccacgccaucuccggcaccaauggcaccaagagauucgacaaccccgugcugcccuucaacgacgggguguacuuugccagcaccgagaaguccaacaucaucagaggcuggaucuucggcaccacacuggacagcaagacccagagccugcugaucgugaacaacgccaccaacguggucaucaaagugugcgaguuccaguucugcaacgaccccuuccugggcgucuacuaccacaagaacaacaagagcuggauggaaagcgaguuccggguguacagcagcgccaacaacugcaccuucgaguacgugucccagccuuuccugauggaccuggaaggcaagcagggcaacuucaagaaccugcgcgaguucguguuuaagaacaucgacggcuacuucaagaucuacagcaagcacaccccuaucaaccucgugcgggaucugccucagggcuucucugcucuggaaccccugguggaucugcccaucggcaucaacaucacccgguuucagacacugcuggcccugcacagaagcuaccugacaccuggcgauagcagcagcggauggacagcuggugccgccgcuuacuaugugggcuaccugcagccuagaaccuuccugcugaaguacaacgagaacggcaccaucaccgacgccguggauugugcucuggauccucugagcgagacaaagugcacccugaaguccuucaccguggaaaagggcaucuaccagaccagcaacuuccgggugcagcccaccgaauccaucgugcgguuccccaauaucaccaaucugugccccuucggcgagguguucaaugccaccagauucgccucuguguacgccuggaaccggaagcggaucagcaauugcguggccgacuacuccgugcuguacaacuccgccagcuucagcaccuucaagugcuacggcguguccccuaccaagcugaacgaccugugcuucacaaacguguacgccgacagcuucgugauccggggagaugaagugcggcagauugccccuggacagacaggcaagaucgccgacuacaacuacaagcugcccgacgacuucaccggcugugugauugccuggaacagcaacaaccuggacuccaaagucggcggcaacuacaauuaccuguaccggcuguuccggaaguccaaucugaagcccuucgagcgggacaucuccaccgagaucuaucaggccggcagcaccccuuguaacggcguggaaggcuucaacugcuacuucccacugcaguccuacggcuuucagcccacaaauggcgugggcuaucagcccuacagagugguggugcugagcuucgaacugcugcaugccccugccacagugugcggcccuaagaaaagcaccaaucucgugaagaacaaaugcgugaacuucaacuucaacggccugaccggcaccggcgugcugacagagagcaacaagaaguuccugccauuccagcaguuuggccgggauaucgccgauaccacagacgccguuagagauccccagacacuggaaauccuggacaucaccccuugcagcuucggcggagugucugugaucaccccuggcaccaacaccagcaaucagguggcagugcuguaccagggcgugaacuguaccgaagugcccguggccauucacgccgaucagcugacaccuacauggcggguguacuccaccggcagcaauguguuucagaccagagccggcugucugaucggagccgagcacgugaacaauagcuacgagugcgacauccccaucggcgcuggaaucugcgccagcuaccagacacagacaaacagcccucggagagccagaagcguggccagccagagcaucauugccuacacaaugucucugggcgccgagaacagcguggccuacuccaacaacucuaucgcuauccccaccaacuucaccaucagcgugaccacagagauccugccuguguccaugaccaagaccagcguggacugcaccauguacaucugcggcgauuccaccgagugcuccaaccugcugcugcaguacggcagcuucugcacccagcugaauagagcccugacagggaucgccguggaacaggacaagaacacccaagagguguucgcccaagugaagcagaucuacaagaccccuccuaucaaggacuucggcggcuucaauuucagccagauucugcccgauccuagcaagcccagcaagcggagcuucaucgaggaccugcuguucaacaaagugacacuggccgacgccggcuucaucaagcaguauggcgauugucugggcgacauugccgccagggaucugauuugcgcccagaaguuuaacggacugacagugcugccuccucugcugaccgaugagaugaucgcccaguacacaucugcccugcuggccggcacaaucacaagcggcuggacauuuggagcaggcgccgcucugcagauccccuuugcuaugcagauggccuaccgguucaacggcaucggagugacccagaaugugcuguacgagaaccagaagcugaucgccaaccaguucaacagcgccaucggcaagauccaggacagccugagcagcacagcaagcgcccugggaaagcugcaggacguggucaaccagaaugcccaggcacugaacacccuggucaagcagcuguccuccaacuucggcgccaucagcucugugcugaacgauauccugagcagacuggacaaggucgaggccgaggugcagaucgacagacugaucacaggcagacugcagagccuccagacauacgugacccagcagcugaucagagccgccgagauuagagccucugccaaucuggccgccaccaagaugucugagugugugcugggccagagcaagagaguggacuuuugcggcaagggcuaccaccugaugagcuucccucagucugccccucacggcgugguguuucugcacgugacauaugugcccgcucaagagaagaauuucaccaccgcuccagccaucugccacgacggcaaagcccacuuuccuagagaaggcguguucguguccaacggcacccauugguucgugacacagcggaacuucuacgagccccagaucaucaccaccgacaacaccuucgugucuggcaacugcgacgucgugaucggcauugugaacaauaccguguacgacccucugcagcccgagcuggacagcuucaaagaggaacuggacaaguacuuuaagaaccacacaagccccgacguggaccugggcgauaucagcggaaucaaugccagcgucgugaacauccagaaagagaucgaccggcugaacgagguggccaagaaucugaacgagagccugaucgaccugcaagaacuggggaaguacgagcaguacaucaaguggcccugguacaucuggcugggcuuuaucgccggacugauugccaucgugauggucacaaucaugcuguguugcaugaccagcugcuguagcugccugaagggcuguuguagcuguggcagcugcugcaaguucgacgaggacgauucugagcccgugcugaagggcgugaaacugcacuacacaugauaauaggcuggagccucgguggccuagcuucuugccccuugggccuccccccagccccuccuccccuuccugcacccguacccccguggucuuugaauaaagucugagugggcggcaaaaaaaaaaaaaaaaaaaaaaaaaaaaaaaaaaaaaaaaaaaaaaaaaaaaaaaaaaaaaaaaaaaaaaaaaaaaaaaaaaaaaaaaaaaaaaaaaaaaucuag

SEQ ID NO: 26586 - RNA, 4100 nt, Artificial Sequence
  SARS-CoV-2/Wuhan/WIV05/2019__EPI_ISL_402128 spike protein mRNA gc mod (1-1273)(Y453F_D614G)
gggaaauaagagagaaaagaagaguaagaagaaauauaagaccccggcgccgccaccauguucguguuccuggugcugcugccucugguguccagccagugugugaaccugaccaccagaacacagcugccuccagccuacaccaacagcuuuaccagaggcguguacuaccccgacaagguguucagauccagcgugcugcacucuacccaggaccuguuccugccuuucuucagcaacgugaccugguuccacgccauccacguguccggcaccaauggcaccaagagauucgacaaccccgugcugcccuucaacgacgggguguacuuugccagcaccgagaaguccaacaucaucagaggcuggaucuucggcaccacacuggacagcaagacccagagccugcugaucgugaacaacgccaccaacguggucaucaaagugugcgaguuccaguucugcaacgaccccuuccugggcgucuacuaccacaagaacaacaagagcuggauggaaagcgaguuccggguguacagcagcgccaacaacugcaccuucgaguacgugucccagccuuuccugauggaccuggaaggcaagcagggcaacuucaagaaccugcgcgaguucguguuuaagaacaucgacggcuacuucaagaucuacagcaagcacaccccuaucaaccucgugcgggaucugccucagggcuucucugcucuggaaccccugguggaucugcccaucggcaucaacaucacccgguuucagacacugcuggcccugcacagaagcuaccugacaccuggcgauagcagcagcggauggacagcuggugccgccgcuuacuaugugggcuaccugcagccuagaaccuuccugcugaaguacaacgagaacggcaccaucaccgacgccguggauugugcucuggauccucugagcgagacaaagugcacccugaaguccuucaccguggaaaagggcaucuaccagaccagcaacuuccgggugcagcccaccgaauccaucgugcgguuccccaauaucaccaaucugugccccuucggcgagguguucaaugccaccagauucgccucuguguacgccuggaaccggaagcggaucagcaauugcguggccgacuacuccgugcuguacaacuccgccagcuucagcaccuucaagugcuacggcguguccccuaccaagcugaacgaccugugcuucacaaacguguacgccgacagcuucgugauccggggagaugaagugcggcagauugccccuggacagacaggcaagaucgccgacuacaacuacaagcugcccgacgacuucaccggcugugugauugccuggaacagcaacaaccuggacuccaaagucggcggcaacuacaauuaccuguuccggcuguuccggaaguccaaucugaagcccuucgagcgggacaucuccaccgagaucuaucaggccggcagcaccccuuguaacggcguggaaggcuucaacugcuacuucccacugcaguccuacggcuuucagcccacaaauggcgugggcuaucagcccuacagagugguggugcugagcuucgaacugcugcaugccccugccacagugugcggcccuaagaaaagcaccaaucucgugaagaacaaaugcgugaacuucaacuucaacggccugaccggcaccggcgugcugacagagagcaacaagaaguuccugccauuccagcaguuuggccgggauaucgccgauaccacagacgccguuagagauccccagacacuggaaauccuggacaucaccccuugcagcuucggcggagugucugugaucaccccuggcaccaacaccagcaaucagguggcagugcuguaccagggcgugaacuguaccgaagugcccguggccauucacgccgaucagcugacaccuacauggcggguguacuccaccggcagcaauguguuucagaccagagccggcugucugaucggagccgagcacgugaacaauagcuacgagugcgacauccccaucggcgcuggaaucugcgccagcuaccagacacagacaaacagcccucggagagccagaagcguggccagccagagcaucauugccuacacaaugucucugggcgccgagaacagcguggccuacuccaacaacucuaucgcuauccccaccaacuucaccaucagcgugaccacagagauccugccuguguccaugaccaagaccagcguggacugcaccauguacaucugcggcgauuccaccgagugcuccaaccugcugcugcaguacggcagcuucugcacccagcugaauagagcccugacagggaucgccguggaacaggacaagaacacccaagagguguucgcccaagugaagcagaucuacaagaccccuccuaucaaggacuucggcggcuucaauuucagccagauucugcccgauccuagcaagcccagcaagcggagcuucaucgaggaccugcuguucaacaaagugacacuggccgacgccggcuucaucaagcaguauggcgauugucugggcgacauugccgccagggaucugauuugcgcccagaaguuuaacggacugacagugcugccuccucugcugaccgaugagaugaucgcccaguacacaucugcccugcuggccggcacaaucacaagcggcuggacauuuggagcaggcgccgcucugcagauccccuuugcuaugcagauggccuaccgguucaacggcaucggagugacccagaaugugcuguacgagaaccagaagcugaucgccaaccaguucaacagcgccaucggcaagauccaggacagccugagcagcacagcaagcgcccugggaaagcugcaggacguggucaaccagaaugcccaggcacugaacacccuggucaagcagcuguccuccaacuucggcgccaucagcucugugcugaacgauauccugagcagacuggacaaggucgaggccgaggugcagaucgacagacugaucacaggcagacugcagagccuccagacauacgugacccagcagcugaucagagccgccgagauuagagccucugccaaucuggccgccaccaagaugucugagugugugcugggccagagcaagagaguggacuuuugcggcaagggcuaccaccugaugagcuucccucagucugccccucacggcgugguguuucugcacgugacauaugugcccgcucaagagaagaauuucaccaccgcuccagccaucugccacgacggcaaagcccacuuuccuagagaaggcguguucguguccaacggcacccauugguucgugacacagcggaacuucuacgagccccagaucaucaccaccgacaacaccuucgugucuggcaacugcgacgucgugaucggcauugugaacaauaccguguacgacccucugcagcccgagcuggacagcuucaaagaggaacuggacaaguacuuuaagaaccacacaagccccgacguggaccugggcgauaucagcggaaucaaugccagcgucgugaacauccagaaagagaucgaccggcugaacgagguggccaagaaucugaacgagagccugaucgaccugcaagaacuggggaaguacgagcaguacaucaaguggcccugguacaucuggcugggcuuuaucgccggacugauugccaucgugauggucacaaucaugcuguguugcaugaccagcugcuguagcugccugaagggcuguuguagcuguggcagcugcugcaaguucgacgaggacgauucugagcccgugcugaagggcgugaaacugcacuacacaugauaauaggcuggagccucgguggccuagcuucuugccccuugggccuccccccagccccuccuccccuuccugcacccguacccccguggucuuugaauaaagucugagugggcggcaaaaaaaaaaaaaaaaaaaaaaaaaaaaaaaaaaaaaaaaaaaaaaaaaaaaaaaaaaaaaaaaaaaaaaaaaaaaaaaaaaaaaaaaaaaaaaaaaaaaucuag

SEQ ID NO: 26587 - RNA, 4100 nt, Artificial Sequence
  SARS-CoV-2/Wuhan/WIV05/2019__EPI_ISL_402128 spike protein mRNA gc mod (1-1273)(D614G_I692V)
gggaaauaagagagaaaagaagaguaagaagaaauauaagaccccggcgccgccaccauguucguguuccuggugcugcugccucugguguccagccagugugugaaccugaccaccagaacacagcugccuccagccuacaccaacagcuuuaccagaggcguguacuaccccgacaagguguucagauccagcgugcugcacucuacccaggaccuguuccugccuuucuucagcaacgugaccugguuccacgccauccacguguccggcaccaauggcaccaagagauucgacaaccccgugcugcccuucaacgacgggguguacuuugccagcaccgagaaguccaacaucaucagaggcuggaucuucggcaccacacuggacagcaagacccagagccugcugaucgugaacaacgccaccaacguggucaucaaagugugcgaguuccaguucugcaacgaccccuuccugggcgucuacuaccacaagaacaacaagagcuggauggaaagcgaguuccggguguacagcagcgccaacaacugcaccuucgaguacgugucccagccuuuccugauggaccuggaaggcaagcagggcaacuucaagaaccugcgcgaguucguguuuaagaacaucgacggcuacuucaagaucuacagcaagcacaccccuaucaaccucgugcgggaucugccucagggcuucucugcucuggaaccccugguggaucugcccaucggcaucaacaucacccgguuucagacacugcuggcccugcacagaagcuaccugacaccuggcgauagcagcagcggauggacagcuggugccgccgcuuacuaugugggcuaccugcagccuagaaccuuccugcugaaguacaacgagaacggcaccaucaccgacgccguggauugugcucuggauccucugagcgagacaaagugcacccugaaguccuucaccguggaaaagggcaucuaccagaccagcaacuuccgggugcagcccaccgaauccaucgugcgguuccccaauaucaccaaucugugccccuucggcgagguguucaaugccaccagauucgccucuguguacgccuggaaccggaagcggaucagcaauugcguggccgacuacuccgugcuguacaacuccgccagcuucagcaccuucaagugcuacggcguguccccuaccaagcugaacgaccugugcuucacaaacguguacgccgacagcuucgugauccggggagaugaagugcggcagauugccccuggacagacaggcaagaucgccgacuacaacuacaagcugcccgacgacuucaccggcugugugauugccuggaacagcaacaaccuggacuccaaagucggcggcaacuacaauuaccuguaccggcuguuccggaaguccaaucugaagcccuucgagcgggacaucuccaccgagaucuaucaggccggcagcaccccuuguaacggcguggaaggcuucaacugcuacuucccacugcaguccuacggcuuucagcccacaaauggcgugggcuaucagcccuacagagugguggugcugagcuucgaacugcugcaugccccugccacagugugcggcccuaagaaaagcaccaaucucgugaagaacaaaugcgugaacuucaacuucaacggccugaccggcaccggcgugcugacagagagcaacaagaaguuccugccauuccagcaguuuggccgggauaucgccgauaccacagacgccguuagagauccccagacacuggaaauccuggacaucaccccuugcagcuucggcggagugucugugaucaccccuggcaccaacaccagcaaucagguggcagugcuguaccagggcgugaacuguaccgaagugcccguggccauucacgccgaucagcugacaccuacauggcggguguacuccaccggcagcaauguguuucagaccagagccggcugucugaucggagccgagcacgugaacaauagcuacgagugcgacauccccaucggcgcuggaaucugcgccagcuaccagacacagacaaacagcccucggagagccagaagcguggccagccagagcgugauugccuacacaaugucucugggcgccgagaacagcguggccuacuccaacaacucuaucgcuauccccaccaacuucaccaucagcgugaccacagagauccugccuguguccaugaccaagaccagcguggacugcaccauguacaucugcggcgauuccaccgagugcuccaaccugcugcugcaguacggcagcuucugcacccagcugaauagagcccugacagggaucgccguggaacaggacaagaacacccaagagguguucgcccaagugaagcagaucuacaagaccccuccuaucaaggacuucggcggcuucaauuucagccagauucugcccgauccuagcaagcccagcaagcggagcuucaucgaggaccugcuguucaacaaagugacacuggccgacgccggcuucaucaagcaguauggcgauugucugggcgacauugccgccagggaucugauuugcgcccagaaguuuaacggacugacagugcugccuccucugcugaccgaugagaugaucgcccaguacacaucugcccugcuggccggcacaaucacaagcggcuggacauuuggagcaggcgccgcucugcagauccccuuugcuaugcagauggccuaccgguucaacggcaucggagugacccagaaugugcuguacgagaaccagaagcugaucgccaaccaguucaacagcgccaucggcaagauccaggacagccugagcagcacagcaagcgcccugggaaagcugcaggacguggucaaccagaaugcccaggcacugaacacccuggucaagcagcuguccuccaacuucggcgccaucagcucugugcugaacgauauccugagcagacuggacaaggucgaggccgaggugcagaucgacagacugaucacaggcagacugcagagccuccagacauacgugacccagcagcugaucagagccgccgagauuagagccucugccaaucuggccgccaccaagaugucugagugugugcugggccagagcaagagaguggacuuuugcggcaagggcuaccaccugaugagcuucccucagucugccccucacggcgugguguuucugcacgugacauaugugcccgcucaagagaagaauuucaccaccgcuccagccaucugccacgacggcaaagcccacuuuccuagagaaggcguguucguguccaacggcacccauugguucgugacacagcggaacuucuacgagccccagaucaucaccaccgacaacaccuucgugucuggcaacugcgacgucgugaucggcauugugaacaauaccguguacgacccucugcagcccgagcuggacagcuucaaagaggaacuggacaaguacuuuaagaaccacacaagccccgacguggaccugggcgauaucagcggaaucaaugccagcgucgugaacauccagaaagagaucgaccggcugaacgagguggccaagaaucugaacgagagccugaucgaccugcaagaacuggggaaguacgagcaguacaucaaguggcccugguacaucuggcugggcuuuaucgccggacugauugccaucgugauggucacaaucaugcuguguugcaugaccagcugcuguagcugccugaagggcuguuguagcuguggcagcugcugcaaguucgacgaggacgauucugagcccgugcugaagggcgugaaacugcacuacacaugauaauaggcuggagccucgguggccuagcuucuugccccuugggccuccccccagccccuccuccccuuccugcacccguacccccguggucuuugaauaaagucugagugggcggcaaaaaaaaaaaaaaaaaaaaaaaaaaaaaaaaaaaaaaaaaaaaaaaaaaaaaaaaaaaaaaaaaaaaaaaaaaaaaaaaaaaaaaaaaaaaaaaaaaaaucuag

SEQ ID NO: 26588 - RNA, 4100 nt, Artificial Sequence
  SARS-CoV-2/Wuhan/WIV05/2019__EPI_ISL_402128 spike protein mRNA gc mod (1-1273)(D614G_M1229I)
gggaaauaagagagaaaagaagaguaagaagaaauauaagaccccggcgccgccaccauguucguguuccuggugcugcugccucugguguccagccagugugugaaccugaccaccagaacacagcugccuccagccuacaccaacagcuuuaccagaggcguguacuaccccgacaagguguucagauccagcgugcugcacucuacccaggaccuguuccugccuuucuucagcaacgugaccugguuccacgccauccacguguccggcaccaauggcaccaagagauucgacaaccccgugcugcccuucaacgacgggguguacuuugccagcaccgagaaguccaacaucaucagaggcuggaucuucggcaccacacuggacagcaagacccagagccugcugaucgugaacaacgccaccaacguggucaucaaagugugcgaguuccaguucugcaacgaccccuuccugggcgucuacuaccacaagaacaacaagagcuggauggaaagcgaguuccggguguacagcagcgccaacaacugcaccuucgaguacgugucccagccuuuccugauggaccuggaaggcaagcagggcaacuucaagaaccugcgcgaguucguguuuaagaacaucgacggcuacuucaagaucuacagcaagcacaccccuaucaaccucgugcgggaucugccucagggcuucucugcucuggaaccccugguggaucugcccaucggcaucaacaucacccgguuucagacacugcuggcccugcacagaagcuaccugacaccuggcgauagcagcagcggauggacagcuggugccgccgcuuacuaugugggcuaccugcagccuagaaccuuccugcugaaguacaacgagaacggcaccaucaccgacgccguggauugugcucuggauccucugagcgagacaaagugcacccugaaguccuucaccguggaaaagggcaucuaccagaccagcaacuuccgggugcagcccaccgaauccaucgugcgguuccccaauaucaccaaucugugccccuucggcgagguguucaaugccaccagauucgccucuguguacgccuggaaccggaagcggaucagcaauugcguggccgacuacuccgugcuguacaacuccgccagcuucagcaccuucaagugcuacggcguguccccuaccaagcugaacgaccugugcuucacaaacguguacgccgacagcuucgugauccggggagaugaagugcggcagauugccccuggacagacaggcaagaucgccgacuacaacuacaagcugcccgacgacuucaccggcugugugauugccuggaacagcaacaaccuggacuccaaagucggcggcaacuacaauuaccuguaccggcuguuccggaaguccaaucugaagcccuucgagcgggacaucuccaccgagaucuaucaggccggcagcaccccuuguaacggcguggaaggcuucaacugcuacuucccacugcaguccuacggcuuucagcccacaaauggcgugggcuaucagcccuacagagugguggugcugagcuucgaacugcugcaugccccugccacagugugcggcccuaagaaaagcaccaaucucgugaagaacaaaugcgugaacuucaacuucaacggccugaccggcaccggcgugcugacagagagcaacaagaaguuccugccauuccagcaguuuggccgggauaucgccgauaccacagacgccguuagagauccccagacacuggaaauccuggacaucaccccuugcagcuucggcggagugucugugaucaccccuggcaccaacaccagcaaucagguggcagugcuguaccagggcgugaacuguaccgaagugcccguggccauucacgccgaucagcugacaccuacauggcggguguacuccaccggcagcaauguguuucagaccagagccggcugucugaucggagccgagcacgugaacaauagcuacgagugcgacauccccaucggcgcuggaaucugcgccagcuaccagacacagacaaacagcccucggagagccagaagcguggccagccagagcaucauugccuacacaaugucucugggcgccgagaacagcguggccuacuccaacaacucuaucgcuauccccaccaacuucaccaucagcgugaccacagagauccugccuguguccaugaccaagaccagcguggacugcaccauguacaucugcggcgauuccaccgagugcuccaaccugcugcugcaguacggcagcuucugcacccagcugaauagagcccugacagggaucgccguggaacaggacaagaacacccaagagguguucgcccaagugaagcagaucuacaagaccccuccuaucaaggacuucggcggcuucaauuucagccagauucugcccgauccuagcaagcccagcaagcggagcuucaucgaggaccugcuguucaacaaagugacacuggccgacgccggcuucaucaagcaguauggcgauugucugggcgacauugccgccagggaucugauuugcgcccagaaguuuaacggacugacagugcugccuccucugcugaccgaugagaugaucgcccaguacacaucugcccugcuggccggcacaaucacaagcggcuggacauuuggagcaggcgccgcucugcagauccccuuugcuaugcagauggccuaccgguucaacggcaucggagugacccagaaugugcuguacgagaaccagaagcugaucgccaaccaguucaacagcgccaucggcaagauccaggacagccugagcagcacagcaagcgcccugggaaagcugcaggacguggucaaccagaaugcccaggcacugaacacccuggucaagcagcuguccuccaacuucggcgccaucagcucugugcugaacgauauccugagcagacuggacaaggucgaggccgaggugcagaucgacagacugaucacaggcagacugcagagccuccagacauacgugacccagcagcugaucagagccgccgagauuagagccucugccaaucuggccgccaccaagaugucugagugugugcugggccagagcaagagaguggacuuuugcggcaagggcuaccaccugaugagcuucccucagucugccccucacggcgugguguuucugcacgugacauaugugcccgcucaagagaagaauuucaccaccgcuccagccaucugccacgacggcaaagcccacuuuccuagagaaggcguguucguguccaacggcacccauugguucgugacacagcggaacuucuacgagccccagaucaucaccaccgacaacaccuucgugucuggcaacugcgacgucgugaucggcauugugaacaauaccguguacgacccucugcagcccgagcuggacagcuucaaagaggaacuggacaaguacuuuaagaaccacacaagccccgacguggaccugggcgauaucagcggaaucaaugccagcgucgugaacauccagaaagagaucgaccggcugaacgagguggccaagaaucugaacgagagccugaucgaccugcaagaacuggggaaguacgagcaguacaucaaguggcccugguacaucuggcugggcuuuaucgccggacugauugccaucgugaucgucacaaucaugcuguguugcaugaccagcugcuguagcugccugaagggcuguuguagcuguggcagcugcugcaaguucgacgaggacgauucugagcccgugcugaagggcgugaaacugcacuacacaugauaauaggcuggagccucgguggccuagcuucuugccccuugggccuccccccagccccuccuccccuuccugcacccguacccccguggucuuugaauaaagucugagugggcggcaaaaaaaaaaaaaaaaaaaaaaaaaaaaaaaaaaaaaaaaaaaaaaaaaaaaaaaaaaaaaaaaaaaaaaaaaaaaaaaaaaaaaaaaaaaaaaaaaaaaucuag

SEQ ID NO: 26589 - RNA, 4094 nt, Artificial Sequence
  SARS-CoV-2/Wuhan/WIV05/2019__EPI_ISL_402128 spike protein mRNA gc mod (1-1273)(H69del_V70del_A222V_Y453F_S477N_D614G_I692V)
gggaaauaagagagaaaagaagaguaagaagaaauauaagaccccggcgccgccaccauguucguguuccuggugcugcugccucugguguccagccagugugugaaccugaccaccagaacacagcugccuccagccuacaccaacagcuuuaccagaggcguguacuaccccgacaagguguucagauccagcgugcugcacucuacccaggaccuguuccugccuuucuucagcaacgugaccugguuccacgccaucuccggcaccaauggcaccaagagauucgacaaccccgugcugcccuucaacgacgggguguacuuugccagcaccgagaaguccaacaucaucagaggcuggaucuucggcaccacacuggacagcaagacccagagccugcugaucgugaacaacgccaccaacguggucaucaaagugugcgaguuccaguucugcaacgaccccuuccugggcgucuacuaccacaagaacaacaagagcuggauggaaagcgaguuccggguguacagcagcgccaacaacugcaccuucgaguacgugucccagccuuuccugauggaccuggaaggcaagcagggcaacuucaagaaccugcgcgaguucguguuuaagaacaucgacggcuacuucaagaucuacagcaagcacaccccuaucaaccucgugcgggaucugccucagggcuucucugugcuggaaccccugguggaucugcccaucggcaucaacaucacccgguuucagacacugcuggcccugcacagaagcuaccugacaccuggcgauagcagcagcggauggacagcuggugccgccgcuuacuaugugggcuaccugcagccuagaaccuuccugcugaaguacaacgagaacggcaccaucaccgacgccguggauugugcucuggauccucugagcgagacaaagugcacccugaaguccuucaccguggaaaagggcaucuaccagaccagcaacuuccgggugcagcccaccgaauccaucgugcgguuccccaauaucaccaaucugugccccuucggcgagguguucaaugccaccagauucgccucuguguacgccuggaaccggaagcggaucagcaauugcguggccgacuacuccgugcuguacaacuccgccagcuucagcaccuucaagugcuacggcguguccccuaccaagcugaacgaccugugcuucacaaacguguacgccgacagcuucgugauccggggagaugaagugcggcagauugccccuggacagacaggcaagaucgccgacuacaacuacaagcugcccgacgacuucaccggcugugugauugccuggaacagcaacaaccuggacuccaaagucggcggcaacuacaauuaccuguuccggcuguuccggaaguccaaucugaagcccuucgagcgggacaucuccaccgagaucuaucaggccggcaacaccccuuguaacggcguggaaggcuucaacugcuacuucccacugcaguccuacggcuuucagcccacaaauggcgugggcuaucagcccuacagagugguggugcugagcuucgaacugcugcaugccccugccacagugugcggcccuaagaaaagcaccaaucucgugaagaacaaaugcgugaacuucaacuucaacggccugaccggcaccggcgugcugacagagagcaacaagaaguuccugccauuccagcaguuuggccgggauaucgccgauaccacagacgccguuagagauccccagacacuggaaauccuggacaucaccccuugcagcuucggcggagugucugugaucaccccuggcaccaacaccagcaaucagguggcagugcuguaccagggcgugaacuguaccgaagugcccguggccauucacgccgaucagcugacaccuacauggcggguguacuccaccggcagcaauguguuucagaccagagccggcugucugaucggagccgagcacgugaacaauagcuacgagugcgacauccccaucggcgcuggaaucugcgccagcuaccagacacagacaaacagcccucggagagccagaagcguggccagccagagcgugauugccuacacaaugucucugggcgccgagaacagcguggccuacuccaacaacucuaucgcuauccccaccaacuucaccaucagcgugaccacagagauccugccuguguccaugaccaagaccagcguggacugcaccauguacaucugcggcgauuccaccgagugcuccaaccugcugcugcaguacggcagcuucugcacccagcugaauagagcccugacagggaucgccguggaacaggacaagaacacccaagagguguucgcccaagugaagcagaucuacaagaccccuccuaucaaggacuucggcggcuucaauuucagccagauucugcccgauccuagcaagcccagcaagcggagcuucaucgaggaccugcuguucaacaaagugacacuggccgacgccggcuucaucaagcaguauggcgauugucugggcgacauugccgccagggaucugauuugcgcccagaaguuuaacggacugacagugcugccuccucugcugaccgaugagaugaucgcccaguacacaucugcccugcuggccggcacaaucacaagcggcuggacauuuggagcaggcgccgcucugcagauccccuuugcuaugcagauggccuaccgguucaacggcaucggagugacccagaaugugcuguacgagaaccagaagcugaucgccaaccaguucaacagcgccaucggcaagauccaggacagccugagcagcacagcaagcgcccugggaaagcugcaggacguggucaaccagaaugcccaggcacugaacacccuggucaagcagcuguccuccaacuucggcgccaucagcucugugcugaacgauauccugagcagacuggacaaggucgaggccgaggugcagaucgacagacugaucacaggcagacugcagagccuccagacauacgugacccagcagcugaucagagccgccgagauuagagccucugccaaucuggccgccaccaagaugucugagugugugcugggccagagcaagagaguggacuuuugcggcaagggcuaccaccugaugagcuucccucagucugccccucacggcgugguguuucugcacgugacauaugugcccgcucaagagaagaauuucaccaccgcuccagccaucugccacgacggcaaagcccacuuuccuagagaaggcguguucguguccaacggcacccauugguucgugacacagcggaacuucuacgagccccagaucaucaccaccgacaacaccuucgugucuggcaacugcgacgucgugaucggcauugugaacaauaccguguacgacccucugcagcccgagcuggacagcuucaaagaggaacuggacaaguacuuuaagaaccacacaagccccgacguggaccugggcgauaucagcggaaucaaugccagcgucgugaacauccagaaagagaucgaccggcugaacgagguggccaagaaucugaacgagagccugaucgaccugcaagaacuggggaaguacgagcaguacaucaaguggcccugguacaucuggcugggcuuuaucgccggacugauugccaucgugauggucacaaucaugcuguguugcaugaccagcugcuguagcugccugaagggcuguuguagcuguggcagcugcugcaaguucgacgaggacgauucugagcccgugcugaagggcgugaaacugcacuacacaugauaauaggcuggagccucgguggccuagcuucuugccccuugggccuccccccagccccuccuccccuuccugcacccguacccccguggucuuugaauaaagucugagugggcggcaaaaaaaaaaaaaaaaaaaaaaaaaaaaaaaaaaaaaaaaaaaaaaaaaaaaaaaaaaaaaaaaaaaaaaaaaaaaaaaaaaaaaaaaaaaaaaaaaaaaucuag

SEQ ID NO: 26590 - RNA, 4094 nt, Artificial Sequence
  SARS-CoV-2/Wuhan/WIV05/2019__EPI_ISL_402128 spike protein mRNA gc mod (1-1273)(H69del_V70del_Y453F_D614G_I692V_M1229I)
gggaaauaagagagaaaagaagaguaagaagaaauauaagaccccggcgccgccaccauguucguguuccuggugcugcugccucugguguccagccagugugugaaccugaccaccagaacacagcugccuccagccuacaccaacagcuuuaccagaggcguguacuaccccgacaagguguucagauccagcgugcugcacucuacccaggaccuguuccugccuuucuucagcaacgugaccugguuccacgccaucuccggcaccaauggcaccaagagauucgacaaccccgugcugcccuucaacgacgggguguacuuugccagcaccgagaaguccaacaucaucagaggcuggaucuucggcaccacacuggacagcaagacccagagccugcugaucgugaacaacgccaccaacguggucaucaaagugugcgaguuccaguucugcaacgaccccuuccugggcgucuacuaccacaagaacaacaagagcuggauggaaagcgaguuccggguguacagcagcgccaacaacugcaccuucgaguacgugucccagccuuuccugauggaccuggaaggcaagcagggcaacuucaagaaccugcgcgaguucguguuuaagaacaucgacggcuacuucaagaucuacagcaagcacaccccuaucaaccucgugcgggaucugccucagggcuucucugcucuggaaccccugguggaucugcccaucggcaucaacaucacccgguuucagacacugcuggcccugcacagaagcuaccugacaccuggcgauagcagcagcggauggacagcuggugccgccgcuuacuaugugggcuaccugcagccuagaaccuuccugcugaaguacaacgagaacggcaccaucaccgacgccguggauugugcucuggauccucugagcgagacaaagugcacccugaaguccuucaccguggaaaagggcaucuaccagaccagcaacuuccgggugcagcccaccgaauccaucgugcgguuccccaauaucaccaaucugugccccuucggcgagguguucaaugccaccagauucgccucuguguacgccuggaaccggaagcggaucagcaauugcguggccgacuacuccgugcuguacaacuccgccagcuucagcaccuucaagugcuacggcguguccccuaccaagcugaacgaccugugcuucacaaacguguacgccgacagcuucgugauccggggagaugaagugcggcagauugccccuggacagacaggcaagaucgccgacuacaacuacaagcugcccgacgacuucaccggcugugugauugccuggaacagcaacaaccuggacuccaaagucggcggcaacuacaauuaccuguuccggcuguuccggaaguccaaucugaagcccuucgagcgggacaucuccaccgagaucuaucaggccggcagcaccccuuguaacggcguggaaggcuucaacugcuacuucccacugcaguccuacggcuuucagcccacaaauggcgugggcuaucagcccuacagagugguggugcugagcuucgaacugcugcaugccccugccacagugugcggcccuaagaaaagcaccaaucucgugaagaacaaaugcgugaacuucaacuucaacggccugaccggcaccggcgugcugacagagagcaacaagaaguuccugccauuccagcaguuuggccgggauaucgccgauaccacagacgccguuagagauccccagacacuggaaauccuggacaucaccccuugcagcuucggcggagugucugugaucaccccuggcaccaacaccagcaaucagguggcagugcuguaccagggcgugaacuguaccgaagugcccguggccauucacgccgaucagcugacaccuacauggcggguguacuccaccggcagcaauguguuucagaccagagccggcugucugaucggagccgagcacgugaacaauagcuacgagugcgacauccccaucggcgcuggaaucugcgccagcuaccagacacagacaaacagcccucggagagccagaagcguggccagccagagcgugauugccuacacaaugucucugggcgccgagaacagcguggccuacuccaacaacucuaucgcuauccccaccaacuucaccaucagcgugaccacagagauccugccuguguccaugaccaagaccagcguggacugcaccauguacaucugcggcgauuccaccgagugcuccaaccugcugcugcaguacggcagcuucugcacccagcugaauagagcccugacagggaucgccguggaacaggacaagaacacccaagagguguucgcccaagugaagcagaucuacaagaccccuccuaucaaggacuucggcggcuucaauuucagccagauucugcccgauccuagcaagcccagcaagcggagcuucaucgaggaccugcuguucaacaaagugacacuggccgacgccggcuucaucaagcaguauggcgauugucugggcgacauugccgccagggaucugauuugcgcccagaaguuuaacggacugacagugcugccuccucugcugaccgaugagaugaucgcccaguacacaucugcccugcuggccggcacaaucacaagcggcuggacauuuggagcaggcgccgcucugcagauccccuuugcuaugcagauggccuaccgguucaacggcaucggagugacccagaaugugcuguacgagaaccagaagcugaucgccaaccaguucaacagcgccaucggcaagauccaggacagccugagcagcacagcaagcgcccugggaaagcugcaggacguggucaaccagaaugcccaggcacugaacacccuggucaagcagcuguccuccaacuucggcgccaucagcucugugcugaacgauauccugagcagacuggacaaggucgaggccgaggugcagaucgacagacugaucacaggcagacugcagagccuccagacauacgugacccagcagcugaucagagccgccgagauuagagccucugccaaucuggccgccaccaagaugucugagugugugcugggccagagcaagagaguggacuuuugcggcaagggcuaccaccugaugagcuucccucagucugccccucacggcgugguguuucugcacgugacauaugugcccgcucaagagaagaauuucaccaccgcuccagccaucugccacgacggcaaagcccacuuuccuagagaaggcguguucguguccaacggcacccauugguucgugacacagcggaacuucuacgagccccagaucaucaccaccgacaacaccuucgugucuggcaacugcgacgucgugaucggcauugugaacaauaccguguacgacccucugcagcccgagcuggacagcuucaaagaggaacuggacaaguacuuuaagaaccacacaagccccgacguggaccugggcgauaucagcggaaucaaugccagcgucgugaacauccagaaagagaucgaccggcugaacgagguggccaagaaucugaacgagagccugaucgaccugcaagaacuggggaaguacgagcaguacaucaaguggcccugguacaucuggcugggcuuuaucgccggacugauugccaucgugaucgucacaaucaugcuguguugcaugaccagcugcuguagcugccugaagggcuguuguagcuguggcagcugcugcaaguucgacgaggacgauucugagcccgugcugaagggcgugaaacugcacuacacaugauaauaggcuggagccucgguggccuagcuucuugccccuugggccuccccccagccccuccuccccuuccugcacccguacccccguggucuuugaauaaagucugagugggcggcaaaaaaaaaaaaaaaaaaaaaaaaaaaaaaaaaaaaaaaaaaaaaaaaaaaaaaaaaaaaaaaaaaaaaaaaaaaaaaaaaaaaaaaaaaaaaaaaaaaaucuag

SEQ ID NO: 26591 - RNA, 4091 nt, Artificial Sequence
  SARS-CoV-2/Wuhan/WIV05/2019__EPI_ISL_402128 spike protein mRNA gc mod (1-1273)(H69del_V70del_Y144del_N501Y_A570D_D614G_P681H_T716I_S982 A_D1118H)
gggaaauaagagagaaaagaagaguaagaagaaauauaagaccccggcgccgccaccauguucguguuccuggugcugcugccucugguguccagccagugugugaaccugaccaccagaacacagcugccuccagccuacaccaacagcuuuaccagaggcguguacuaccccgacaagguguucagauccagcgugcugcacucuacccaggaccuguuccugccuuucuucagcaacgugaccugguuccacgccaucuccggcaccaauggcaccaagagauucgacaaccccgugcugcccuucaacgacgggguguacuuugccagcaccgagaaguccaacaucaucagaggcuggaucuucggcaccacacuggacagcaagacccagagccugcugaucgugaacaacgccaccaacguggucaucaaagugugcgaguuccaguucugcaacgaccccuuccugggcgucuaccacaagaacaacaagagcuggauggaaagcgaguuccggguguacagcagcgccaacaacugcaccuucgaguacgugucccagccuuuccugauggaccuggaaggcaagcagggcaacuucaagaaccugcgcgaguucguguuuaagaacaucgacggcuacuucaagaucuacagcaagcacaccccuaucaaccucgugcgggaucugccucagggcuucucugcucuggaaccccugguggaucugcccaucggcaucaacaucacccgguuucagacacugcuggcccugcacagaagcuaccugacaccuggcgauagcagcagcggauggacagcuggugccgccgcuuacuaugugggcuaccugcagccuagaaccuuccugcugaaguacaacgagaacggcaccaucaccgacgccguggauugugcucuggauccucugagcgagacaaagugcacccugaaguccuucaccguggaaaagggcaucuaccagaccagcaacuuccgggugcagcccaccgaauccaucgugcgguuccccaauaucaccaaucugugccccuucggcgagguguucaaugccaccagauucgccucuguguacgccuggaaccggaagcggaucagcaauugcguggccgacuacuccgugcuguacaacuccgccagcuucagcaccuucaagugcuacggcguguccccuaccaagcugaacgaccugugcuucacaaacguguacgccgacagcuucgugauccggggagaugaagugcggcagauugccccuggacagacaggcaagaucgccgacuacaacuacaagcugcccgacgacuucaccggcugugugauugccuggaacagcaacaaccuggacuccaaagucggcggcaacuacaauuaccuguaccggcuguuccggaaguccaaucugaagcccuucgagcgggacaucuccaccgagaucuaucaggccggcagcaccccuuguaacggcguggaaggcuucaacugcuacuucccacugcaguccuacggcuuucagcccacauacggcgugggcuaucagcccuacagagugguggugcugagcuucgaacugcugcaugccccugccacagugugcggcccuaagaaaagcaccaaucucgugaagaacaaaugcgugaacuucaacuucaacggccugaccggcaccggcgugcugacagagagcaacaagaaguuccugccauuccagcaguuuggccgggauaucgacgauaccacagacgccguuagagauccccagacacuggaaauccuggacaucaccccuugcagcuucggcggagugucugugaucaccccuggcaccaacaccagcaaucagguggcagugcuguaccagggcgugaacuguaccgaagugcccguggccauucacgccgaucagcugacaccuacauggcggguguacuccaccggcagcaauguguuucagaccagagccggcugucugaucggagccgagcacgugaacaauagcuacgagugcgacauccccaucggcgcuggaaucugcgccagcuaccagacacagacaaacagccaccggagagccagaagcguggccagccagagcaucauugccuacacaaugucucugggcgccgagaacagcguggccuacuccaacaacucuaucgcuauccccaucaacuucaccaucagcgugaccacagagauccugccuguguccaugaccaagaccagcguggacugcaccauguacaucugcggcgauuccaccgagugcuccaaccugcugcugcaguacggcagcuucugcacccagcugaauagagcccugacagggaucgccguggaacaggacaagaacacccaagagguguucgcccaagugaagcagaucuacaagaccccuccuaucaaggacuucggcggcuucaauuucagccagauucugcccgauccuagcaagcccagcaagcggagcuucaucgaggaccugcuguucaacaaagugacacuggccgacgccggcuucaucaagcaguauggcgauugucugggcgacauugccgccagggaucugauuugcgcccagaaguuuaacggacugacagugcugccuccucugcugaccgaugagaugaucgcccaguacacaucugcccugcuggccggcacaaucacaagcggcuggacauuuggagcaggcgccgcucugcagauccccuuugcuaugcagauggccuaccgguucaacggcaucggagugacccagaaugugcuguacgagaaccagaagcugaucgccaaccaguucaacagcgccaucggcaagauccaggacagccugagcagcacagcaagcgcccugggaaagcugcaggacguggucaaccagaaugcccaggcacugaacacccuggucaagcagcuguccuccaacuucggcgccaucagcucugugcugaacgauauccuggccagacuggacaaggucgaggccgaggugcagaucgacagacugaucacaggcagacugcagagccuccagacauacgugacccagcagcugaucagagccgccgagauuagagccucugccaaucuggccgccaccaagaugucugagugugugcugggccagagcaagagaguggacuuuugcggcaagggcuaccaccugaugagcuucccucagucugccccucacggcgugguguuucugcacgugacauaugugcccgcucaagagaagaauuucaccaccgcuccagccaucugccacgacggcaaagcccacuuuccuagagaaggcguguucguguccaacggcacccauugguucgugacacagcggaacuucuacgagccccagaucaucaccacccacaacaccuucgugucuggcaacugcgacgucgugaucggcauugugaacaauaccguguacgacccucugcagcccgagcuggacagcuucaaagaggaacuggacaaguacuuuaagaaccacacaagccccgacguggaccugggcgauaucagcggaaucaaugccagcgucgugaacauccagaaagagaucgaccggcugaacgagguggccaagaaucugaacgagagccugaucgaccugcaagaacuggggaaguacgagcaguacaucaaguggcccugguacaucuggcugggcuuuaucgccggacugauugccaucgugauggucacaaucaugcuguguugcaugaccagcugcuguagcugccugaagggcuguuguagcuguggcagcugcugcaaguucgacgaggacgauucugagcccgugcugaagggcgugaaacugcacuacacaugauaauaggcuggagccucgguggccuagcuucuugccccuugggccuccccccagccccuccuccccuuccugcacccguacccccguggucuuugaauaaagucugagugggcggcaaaaaaaaaaaaaaaaaaaaaaaaaaaaaaaaaaaaaaaaaaaaaaaaaaaaaaaaaaaaaaaaaaaaaaaaaaaaaaaaaaaaaaaaaaaaaaaaaaaaucuag

SEQ ID NO: 26592 - RNA, 4100 nt, Artificial Sequence
  SARS-CoV-2/Wuhan/WIV05/2019__EPI_ISL_402128 spike protein mRNA gc mod (1-1273)(K417N_E484K_N501Y_D614G)
gggaaauaagagagaaaagaagaguaagaagaaauauaagaccccggcgccgccaccauguucguguuccuggugcugcugccucugguguccagccagugugugaaccugaccaccagaacacagcugccuccagccuacaccaacagcuuuaccagaggcguguacuaccccgacaagguguucagauccagcgugcugcacucuacccaggaccuguuccugccuuucuucagcaacgugaccugguuccacgccauccacguguccggcaccaauggcaccaagagauucgacaaccccgugcugcccuucaacgacgggguguacuuugccagcaccgagaaguccaacaucaucagaggcuggaucuucggcaccacacuggacagcaagacccagagccugcugaucgugaacaacgccaccaacguggucaucaaagugugcgaguuccaguucugcaacgaccccuuccugggcgucuacuaccacaagaacaacaagagcuggauggaaagcgaguuccggguguacagcagcgccaacaacugcaccuucgaguacgugucccagccuuuccugauggaccuggaaggcaagcagggcaacuucaagaaccugcgcgaguucguguuuaagaacaucgacggcuacuucaagaucuacagcaagcacaccccuaucaaccucgugcgggaucugccucagggcuucucugcucuggaaccccugguggaucugcccaucggcaucaacaucacccgguuucagacacugcuggcccugcacagaagcuaccugacaccuggcgauagcagcagcggauggacagcuggugccgccgcuuacuaugugggcuaccugcagccuagaaccuuccugcugaaguacaacgagaacggcaccaucaccgacgccguggauugugcucuggauccucugagcgagacaaagugcacccugaaguccuucaccguggaaaagggcaucuaccagaccagcaacuuccgggugcagcccaccgaauccaucgugcgguuccccaauaucaccaaucugugccccuucggcgagguguucaaugccaccagauucgccucuguguacgccuggaaccggaagcggaucagcaauugcguggccgacuacuccgugcuguacaacuccgccagcuucagcaccuucaagugcuacggcguguccccuaccaagcugaacgaccugugcuucacaaacguguacgccgacagcuucgugauccggggagaugaagugcggcagauugccccuggacagacaggcaacaucgccgacuacaacuacaagcugcccgacgacuucaccggcugugugauugccuggaacagcaacaaccuggacuccaaagucggcggcaacuacaauuaccuguaccggcuguuccggaaguccaaucugaagcccuucgagcgggacaucuccaccgagaucuaucaggccggcagcaccccuuguaacggcgugaagggcuucaacugcuacuucccacugcaguccuacggcuuucagcccacauacggcgugggcuaucagcccuacagagugguggugcugagcuucgaacugcugcaugccccugccacagugugcggcccuaagaaaagcaccaaucucgugaagaacaaaugcgugaacuucaacuucaacggccugaccggcaccggcgugcugacagagagcaacaagaaguuccugccauuccagcaguuuggccgggauaucgccgauaccacagacgccguuagagauccccagacacuggaaauccuggacaucaccccuugcagcuucggcggagugucugugaucaccccuggcaccaacaccagcaaucagguggcagugcuguaccagggcgugaacuguaccgaagugcccguggccauucacgccgaucagcugacaccuacauggcggguguacuccaccggcagcaauguguuucagaccagagccggcugucugaucggagccgagcacgugaacaauagcuacgagugcgacauccccaucggcgcuggaaucugcgccagcuaccagacacagacaaacagcccucggagagccagaagcguggccagccagagcaucauugccuacacaaugucucugggcgccgagaacagcguggccuacuccaacaacucuaucgcuauccccaccaacuucaccaucagcgugaccacagagauccugccuguguccaugaccaagaccagcguggacugcaccauguacaucugcggcgauuccaccgagugcuccaaccugcugcugcaguacggcagcuucugcacccagcugaauagagcccugacagggaucgccguggaacaggacaagaacacccaagagguguucgcccaagugaagcagaucuacaagaccccuccuaucaaggacuucggcggcuucaauuucagccagauucugcccgauccuagcaagcccagcaagcggagcuucaucgaggaccugcuguucaacaaagugacacuggccgacgccggcuucaucaagcaguauggcgauugucugggcgacauugccgccagggaucugauuugcgcccagaaguuuaacggacugacagugcugccuccucugcugaccgaugagaugaucgcccaguacacaucugcccugcuggccggcacaaucacaagcggcuggacauuuggagcaggcgccgcucugcagauccccuuugcuaugcagauggccuaccgguucaacggcaucggagugacccagaaugugcuguacgagaaccagaagcugaucgccaaccaguucaacagcgccaucggcaagauccaggacagccugagcagcacagcaagcgcccugggaaagcugcaggacguggucaaccagaaugcccaggcacugaacacccuggucaagcagcuguccuccaacuucggcgccaucagcucugugcugaacgauauccugagcagacuggacaaggucgaggccgaggugcagaucgacagacugaucacaggcagacugcagagccuccagacauacgugacccagcagcugaucagagccgccgagauuagagccucugccaaucuggccgccaccaagaugucugagugugugcugggccagagcaagagaguggacuuuugcggcaagggcuaccaccugaugagcuucccucagucugccccucacggcgugguguuucugcacgugacauaugugcccgcucaagagaagaauuucaccaccgcuccagccaucugccacgacggcaaagcccacuuuccuagagaaggcguguucguguccaacggcacccauugguucgugacacagcggaacuucuacgagccccagaucaucaccaccgacaacaccuucgugucuggcaacugcgacgucgugaucggcauugugaacaauaccguguacgacccucugcagcccgagcuggacagcuucaaagaggaacuggacaaguacuuuaagaaccacacaagccccgacguggaccugggcgauaucagcggaaucaaugccagcgucgugaacauccagaaagagaucgaccggcugaacgagguggccaagaaucugaacgagagccugaucgaccugcaagaacuggggaaguacgagcaguacaucaaguggcccugguacaucuggcugggcuuuaucgccggacugauugccaucgugauggucacaaucaugcuguguugcaugaccagcugcuguagcugccugaagggcuguuguagcuguggcagcugcugcaaguucgacgaggacgauucugagcccgugcugaagggcgugaaacugcacuacacaugauaauaggcuggagccucgguggccuagcuucuugccccuugggccuccccccagccccuccuccccuuccugcacccguacccccguggucuuugaauaaagucugagugggcggcaaaaaaaaaaaaaaaaaaaaaaaaaaaaaaaaaaaaaaaaaaaaaaaaaaaaaaaaaaaaaaaaaaaaaaaaaaaaaaaaaaaaaaaaaaaaaaaaaaaaucuag

SEQ ID NO: 26593 - RNA, 4091 nt, Artificial Sequence
  SARS-CoV-2/Wuhan/WIV05/2019__EPI_ISL_402128 spike protein mRNA gc mod (1-1273)(L18F_D80A_D215G_L242del_A243del_L244del_R246I_K417N_E484 K_N501Y_D614G_A701V)
gggaaauaagagagaaaagaagaguaagaagaaauauaagaccccggcgccgccaccauguucguguuccuggugcugcugccucugguguccagccagugugugaacuucaccaccagaacacagcugccuccagccuacaccaacagcuuuaccagaggcguguacuaccccgacaagguguucagauccagcgugcugcacucuacccaggaccuguuccugccuuucuucagcaacgugaccugguuccacgccauccacguguccggcaccaauggcaccaagagauucgccaaccccgugcugcccuucaacgacgggguguacuuugccagcaccgagaaguccaacaucaucagaggcuggaucuucggcaccacacuggacagcaagacccagagccugcugaucgugaacaacgccaccaacguggucaucaaagugugcgaguuccaguucugcaacgaccccuuccugggcgucuacuaccacaagaacaacaagagcuggauggaaagcgaguuccggguguacagcagcgccaacaacugcaccuucgaguacgugucccagccuuuccugauggaccuggaaggcaagcagggcaacuucaagaaccugcgcgaguucguguuuaagaacaucgacggcuacuucaagaucuacagcaagcacaccccuaucaaccucgugcggggccugccucagggcuucucugcucuggaaccccugguggaucugcccaucggcaucaacaucacccgguuucagacacugcacaucagcuaccugacaccuggcgauagcagcagcggauggacagcuggugccgccgcuuacuaugugggcuaccugcagccuagaaccuuccugcugaaguacaacgagaacggcaccaucaccgacgccguggauugugcucuggauccucugagcgagacaaagugcacccugaaguccuucaccguggaaaagggcaucuaccagaccagcaacuuccgggugcagcccaccgaauccaucgugcgguuccccaauaucaccaaucugugccccuucggcgagguguucaaugccaccagauucgccucuguguacgccuggaaccggaagcggaucagcaauugcguggccgacuacuccgugcuguacaacuccgccagcuucagcaccuucaagugcuacggcguguccccuaccaagcugaacgaccugugcuucacaaacguguacgccgacagcuucgugauccggggagaugaagugcggcagauugccccuggacagacaggcaacaucgccgacuacaacuacaagcugcccgacgacuucaccggcugugugauugccuggaacagcaacaaccuggacuccaaagucggcggcaacuacaauuaccuguaccggcuguuccggaaguccaaucugaagcccuucgagcgggacaucuccaccgagaucuaucaggccggcagcaccccuuguaacggcgugaagggcuucaacugcuacuucccacugcaguccuacggcuuucagcccacauacggcgugggcuaucagcccuacagagugguggugcugagcuucgaacugcugcaugccccugccacagugugcggcccuaagaaaagcaccaaucucgugaagaacaaaugcgugaacuucaacuucaacggccugaccggcaccggcgugcugacagagagcaacaagaaguuccugccauuccagcaguuuggccgggauaucgccgauaccacagacgccguuagagauccccagacacuggaaauccuggacaucaccccuugcagcuucggcggagugucugugaucaccccuggcaccaacaccagcaaucagguggcagugcuguaccagggcgugaacuguaccgaagugcccguggccauucacgccgaucagcugacaccuacauggcggguguacuccaccggcagcaauguguuucagaccagagccggcugucugaucggagccgagcacgugaacaauagcuacgagugcgacauccccaucggcgcuggaaucugcgccagcuaccagacacagacaaacagcccucggagagccagaagcguggccagccagagcaucauugccuacacaaugucucugggcguggagaacagcguggccuacuccaacaacucuaucgcuauccccaccaacuucaccaucagcgugaccacagagauccugccuguguccaugaccaagaccagcguggacugcaccauguacaucugcggcgauuccaccgagugcuccaaccugcugcugcaguacggcagcuucugcacccagcugaauagagcccugacagggaucgccguggaacaggacaagaacacccaagagguguucgcccaagugaagcagaucuacaagaccccuccuaucaaggacuucggcggcuucaauuucagccagauucugcccgauccuagcaagcccagcaagcggagcuucaucgaggaccugcuguucaacaaagugacacuggccgacgccggcuucaucaagcaguauggcgauugucugggcgacauugccgccagggaucugauuugcgcccagaaguuuaacggacugacagugcugccuccucugcugaccgaugagaugaucgcccaguacacaucugcccugcuggccggcacaaucacaagcggcuggacauuuggagcaggcgccgcucugcagauccccuuugcuaugcagauggccuaccgguucaacggcaucggagugacccagaaugugcuguacgagaaccagaagcugaucgccaaccaguucaacagcgccaucggcaagauccaggacagccugagcagcacagcaagcgcccugggaaagcugcaggacguggucaaccagaaugcccaggcacugaacacccuggucaagcagcuguccuccaacuucggcgccaucagcucugugcugaacgauauccugagcagacuggacaaggucgaggccgaggugcagaucgacagacugaucacaggcagacugcagagccuccagacauacgugacccagcagcugaucagagccgccgagauuagagccucugccaaucuggccgccaccaagaugucugagugugugcugggccagagcaagagaguggacuuuugcggcaagggcuaccaccugaugagcuucccucagucugccccucacggcgugguguuucugcacgugacauaugugcccgcucaagagaagaauuucaccaccgcuccagccaucugccacgacggcaaagcccacuuuccuagagaaggcguguucguguccaacggcacccauugguucgugacacagcggaacuucuacgagccccagaucaucaccaccgacaacaccuucgugucuggcaacugcgacgucgugaucggcauugugaacaauaccguguacgacccucugcagcccgagcuggacagcuucaaagaggaacuggacaaguacuuuaagaaccacacaagccccgacguggaccugggcgauaucagcggaaucaaugccagcgucgugaacauccagaaagagaucgaccggcugaacgagguggccaagaaucugaacgagagccugaucgaccugcaagaacuggggaaguacgagcaguacaucaaguggcccugguacaucuggcugggcuuuaucgccggacugauugccaucgugauggucacaaucaugcuguguugcaugaccagcugcuguagcugccugaagggcuguuguagcuguggcagcugcugcaaguucgacgaggacgauucugagcccgugcugaagggcgugaaacugcacuacacaugauaauaggcuggagccucgguggccuagcuucuugccccuugggccuccccccagccccuccuccccuuccugcacccguacccccguggucuuugaauaaagucugagugggcggcaaaaaaaaaaaaaaaaaaaaaaaaaaaaaaaaaaaaaaaaaaaaaaaaaaaaaaaaaaaaaaaaaaaaaaaaaaaaaaaaaaaaaaaaaaaaaaaaaaaaucuag

SEQ ID NO: 26594 - RNA, 4100 nt, Artificial Sequence
  SARS-CoV-2/Wuhan/WIV05/2019__EPI_ISL_402128 spike protein mRNA gc mod (1-1273)(E484K_D614G)
gggaaauaagagagaaaagaagaguaagaagaaauauaagaccccggcgccgccaccauguucguguuccuggugcugcugccucugguguccagccagugugugaaccugaccaccagaacacagcugccuccagccuacaccaacagcuuuaccagaggcguguacuaccccgacaagguguucagauccagcgugcugcacucuacccaggaccuguuccugccuuucuucagcaacgugaccugguuccacgccauccacguguccggcaccaauggcaccaagagauucgacaaccccgugcugcccuucaacgacgggguguacuuugccagcaccgagaaguccaacaucaucagaggcuggaucuucggcaccacacuggacagcaagacccagagccugcugaucgugaacaacgccaccaacguggucaucaaagugugcgaguuccaguucugcaacgaccccuuccugggcgucuacuaccacaagaacaacaagagcuggauggaaagcgaguuccggguguacagcagcgccaacaacugcaccuucgaguacgugucccagccuuuccugauggaccuggaaggcaagcagggcaacuucaagaaccugcgcgaguucguguuuaagaacaucgacggcuacuucaagaucuacagcaagcacaccccuaucaaccucgugcgggaucugccucagggcuucucugcucuggaaccccugguggaucugcccaucggcaucaacaucacccgguuucagacacugcuggcccugcacagaagcuaccugacaccuggcgauagcagcagcggauggacagcuggugccgccgcuuacuaugugggcuaccugcagccuagaaccuuccugcugaaguacaacgagaacggcaccaucaccgacgccguggauugugcucuggauccucugagcgagacaaagugcacccugaaguccuucaccguggaaaagggcaucuaccagaccagcaacuuccgggugcagcccaccgaauccaucgugcgguuccccaauaucaccaaucugugccccuucggcgagguguucaaugccaccagauucgccucuguguacgccuggaaccggaagcggaucagcaauugcguggccgacuacuccgugcuguacaacuccgccagcuucagcaccuucaagugcuacggcguguccccuaccaagcugaacgaccugugcuucacaaacguguacgccgacagcuucgugauccggggagaugaagugcggcagauugccccuggacagacaggcaagaucgccgacuacaacuacaagcugcccgacgacuucaccggcugugugauugccuggaacagcaacaaccuggacuccaaagucggcggcaacuacaauuaccuguaccggcuguuccggaaguccaaucugaagcccuucgagcgggacaucuccaccgagaucuaucaggccggcagcaccccuuguaacggcgugaagggcuucaacugcuacuucccacugcaguccuacggcuuucagcccacaaauggcgugggcuaucagcccuacagagugguggugcugagcuucgaacugcugcaugccccugccacagugugcggcccuaagaaaagcaccaaucucgugaagaacaaaugcgugaacuucaacuucaacggccugaccggcaccggcgugcugacagagagcaacaagaaguuccugccauuccagcaguuuggccgggauaucgccgauaccacagacgccguuagagauccccagacacuggaaauccuggacaucaccccuugcagcuucggcggagugucugugaucaccccuggcaccaacaccagcaaucagguggcagugcuguaccagggcgugaacuguaccgaagugcccguggccauucacgccgaucagcugacaccuacauggcggguguacuccaccggcagcaauguguuucagaccagagccggcugucugaucggagccgagcacgugaacaauagcuacgagugcgacauccccaucggcgcuggaaucugcgccagcuaccagacacagacaaacagcccucggagagccagaagcguggccagccagagcaucauugccuacacaaugucucugggcgccgagaacagcguggccuacuccaacaacucuaucgcuauccccaccaacuucaccaucagcgugaccacagagauccugccuguguccaugaccaagaccagcguggacugcaccauguacaucugcggcgauuccaccgagugcuccaaccugcugcugcaguacggcagcuucugcacccagcugaauagagcccugacagggaucgccguggaacaggacaagaacacccaagagguguucgcccaagugaagcagaucuacaagaccccuccuaucaaggacuucggcggcuucaauuucagccagauucugcccgauccuagcaagcccagcaagcggagcuucaucgaggaccugcuguucaacaaagugacacuggccgacgccggcuucaucaagcaguauggcgauugucugggcgacauugccgccagggaucugauuugcgcccagaaguuuaacggacugacagugcugccuccucugcugaccgaugagaugaucgcccaguacacaucugcccugcuggccggcacaaucacaagcggcuggacauuuggagcaggcgccgcucugcagauccccuuugcuaugcagauggccuaccgguucaacggcaucggagugacccagaaugugcuguacgagaaccagaagcugaucgccaaccaguucaacagcgccaucggcaagauccaggacagccugagcagcacagcaagcgcccugggaaagcugcaggacguggucaaccagaaugcccaggcacugaacacccuggucaagcagcuguccuccaacuucggcgccaucagcucugugcugaacgauauccugagcagacuggacaaggucgaggccgaggugcagaucgacagacugaucacaggcagacugcagagccuccagacauacgugacccagcagcugaucagagccgccgagauuagagccucugccaaucuggccgccaccaagaugucugagugugugcugggccagagcaagagaguggacuuuugcggcaagggcuaccaccugaugagcuucccucagucugccccucacggcgugguguuucugcacgugacauaugugcccgcucaagagaagaauuucaccaccgcuccagccaucugccacgacggcaaagcccacuuuccuagagaaggcguguucguguccaacggcacccauugguucgugacacagcggaacuucuacgagccccagaucaucaccaccgacaacaccuucgugucuggcaacugcgacgucgugaucggcauugugaacaauaccguguacgacccucugcagcccgagcuggacagcuucaaagaggaacuggacaaguacuuuaagaaccacacaagccccgacguggaccugggcgauaucagcggaaucaaugccagcgucgugaacauccagaaagagaucgaccggcugaacgagguggccaagaaucugaacgagagccugaucgaccugcaagaacuggggaaguacgagcaguacaucaaguggcccugguacaucuggcugggcuuuaucgccggacugauugccaucgugauggucacaaucaugcuguguugcaugaccagcugcuguagcugccugaagggcuguuguagcuguggcagcugcugcaaguucgacgaggacgauucugagcccgugcugaagggcgugaaacugcacuacacaugauaauaggcuggagccucgguggccuagcuucuugccccuugggccuccccccagccccuccuccccuuccugcacccguacccccguggucuuugaauaaagucugagugggcggcaaaaaaaaaaaaaaaaaaaaaaaaaaaaaaaaaaaaaaaaaaaaaaaaaaaaaaaaaaaaaaaaaaaaaaaaaaaaaaaaaaaaaaaaaaaaaaaaaaaaucuag

SEQ ID NO: 26595 - RNA, 4100 nt, Artificial Sequence
  SARS-CoV-2/Wuhan/WIV05/2019__EPI_ISL_402128 spike protein mRNA gc mod (1-1273)(L18F_T20N_P26S_D138Y_R190S_K417T_E484K_N501Y_D614G_H655Y _T1027I)
gggaaauaagagagaaaagaagaguaagaagaaauauaagaccccggcgccgccaccauguucguguuccuggugcugcugccucugguguccagccagugugugaacuucaccaacagaacacagcugccuagcgccuacaccaacagcuuuaccagaggcguguacuaccccgacaagguguucagauccagcgugcugcacucuacccaggaccuguuccugccuuucuucagcaacgugaccugguuccacgccauccacguguccggcaccaauggcaccaagagauucgacaaccccgugcugcccuucaacgacgggguguacuuugccagcaccgagaaguccaacaucaucagaggcuggaucuucggcaccacacuggacagcaagacccagagccugcugaucgugaacaacgccaccaacguggucaucaaagugugcgaguuccaguucugcaacuaccccuuccugggcgucuacuaccacaagaacaacaagagcuggauggaaagcgaguuccggguguacagcagcgccaacaacugcaccuucgaguacgugucccagccuuuccugauggaccuggaaggcaagcagggcaacuucaagaaccugagcgaguucguguuuaagaacaucgacggcuacuucaagaucuacagcaagcacaccccuaucaaccucgugcgggaucugccucagggcuucucugcucuggaaccccugguggaucugcccaucggcaucaacaucacccgguuucagacacugcuggcccugcacagaagcuaccugacaccuggcgauagcagcagcggauggacagcuggugccgccgcuuacuaugugggcuaccugcagccuagaaccuuccugcugaaguacaacgagaacggcaccaucaccgacgccguggauugugcucuggauccucugagcgagacaaagugcacccugaaguccuucaccguggaaaagggcaucuaccagaccagcaacuuccgggugcagcccaccgaauccaucgugcgguuccccaauaucaccaaucugugccccuucggcgagguguucaaugccaccagauucgccucuguguacgccuggaaccggaagcggaucagcaauugcguggccgacuacuccgugcuguacaacuccgccagcuucagcaccuucaagugcuacggcguguccccuaccaagcugaacgaccugugcuucacaaacguguacgccgacagcuucgugauccggggagaugaagugcggcagauugccccuggacagacaggcaccaucgccgacuacaacuacaagcugcccgacgacuucaccggcugugugauugccuggaacagcaacaaccuggacuccaaagucggcggcaacuacaauuaccuguaccggcuguuccggaaguccaaucugaagcccuucgagcgggacaucuccaccgagaucuaucaggccggcagcaccccuuguaacggcgugaagggcuucaacugcuacuucccacugcaguccuacggcuuucagcccacauacggcgugggcuaucagcccuacagagugguggugcugagcuucgaacugcugcaugccccugccacagugugcggcccuaagaaaagcaccaaucucgugaagaacaaaugcgugaacuucaacuucaacggccugaccggcaccggcgugcugacagagagcaacaagaaguuccugccauuccagcaguuuggccgggauaucgccgauaccacagacgccguuagagauccccagacacuggaaauccuggacaucaccccuugcagcuucggcggagugucugugaucaccccuggcaccaacaccagcaaucagguggcagugcuguaccagggcgugaacuguaccgaagugcccguggccauucacgccgaucagcugacaccuacauggcggguguacuccaccggcagcaauguguuucagaccagagccggcugucugaucggagccgaguacgugaacaauagcuacgagugcgacauccccaucggcgcuggaaucugcgccagcuaccagacacagacaaacagcccucggagagccagaagcguggccagccagagcaucauugccuacacaaugucucugggcgccgagaacagcguggccuacuccaacaacucuaucgcuauccccaccaacuucaccaucagcgugaccacagagauccugccuguguccaugaccaagaccagcguggacugcaccauguacaucugcggcgauuccaccgagugcuccaaccugcugcugcaguacggcagcuucugcacccagcugaauagagcccugacagggaucgccguggaacaggacaagaacacccaagagguguucgcccaagugaagcagaucuacaagaccccuccuaucaaggacuucggcggcuucaauuucagccagauucugcccgauccuagcaagcccagcaagcggagcuucaucgaggaccugcuguucaacaaagugacacuggccgacgccggcuucaucaagcaguauggcgauugucugggcgacauugccgccagggaucugauuugcgcccagaaguuuaacggacugacagugcugccuccucugcugaccgaugagaugaucgcccaguacacaucugcccugcuggccggcacaaucacaagcggcuggacauuuggagcaggcgccgcucugcagauccccuuugcuaugcagauggccuaccgguucaacggcaucggagugacccagaaugugcuguacgagaaccagaagcugaucgccaaccaguucaacagcgccaucggcaagauccaggacagccugagcagcacagcaagcgcccugggaaagcugcaggacguggucaaccagaaugcccaggcacugaacacccuggucaagcagcuguccuccaacuucggcgccaucagcucugugcugaacgauauccugagcagacuggacaaggucgaggccgaggugcagaucgacagacugaucacaggcagacugcagagccuccagacauacgugacccagcagcugaucagagccgccgagauuagagccucugccaaucuggccgccaucaagaugucugagugugugcugggccagagcaagagaguggacuuuugcggcaagggcuaccaccugaugagcuucccucagucugccccucacggcgugguguuucugcacgugacauaugugcccgcucaagagaagaauuucaccaccgcuccagccaucugccacgacggcaaagcccacuuuccuagagaaggcguguucguguccaacggcacccauugguucgugacacagcggaacuucuacgagccccagaucaucaccaccgacaacaccuucgugucuggcaacugcgacgucgugaucggcauugugaacaauaccguguacgacccucugcagcccgagcuggacagcuucaaagaggaacuggacaaguacuuuaagaaccacacaagccccgacguggaccugggcgauaucagcggaaucaaugccagcgucgugaacauccagaaagagaucgaccggcugaacgagguggccaagaaucugaacgagagccugaucgaccugcaagaacuggggaaguacgagcaguacaucaaguggcccugguacaucuggcugggcuuuaucgccggacugauugccaucgugauggucacaaucaugcuguguugcaugaccagcugcuguagcugccugaagggcuguuguagcuguggcagcugcugcaaguucgacgaggacgauucugagcccgugcugaagggcgugaaacugcacuacacaugauaauaggcuggagccucgguggccuagcuucuugccccuugggccuccccccagccccuccuccccuuccugcacccguacccccguggucuuugaauaaagucugagugggcggcaaaaaaaaaaaaaaaaaaaaaaaaaaaaaaaaaaaaaaaaaaaaaaaaaaaaaaaaaaaaaaaaaaaaaaaaaaaaaaaaaaaaaaaaaaaaaaaaaaaaucuag

SEQ ID NO: 26596 - RNA, 4100 nt, Artificial Sequence
  SARS-CoV-2/Wuhan/WIV05/2019__EPI_ISL_402128 spike protein mRNA gc mod (1-1273)(S13I_W152C_L452R_D614G)
gggaaauaagagagaaaagaagaguaagaagaaauauaagaccccggcgccgccaccauguucguguuccuggugcugcugccucugguguccauccagugugugaaccugaccaccagaacacagcugccuccagccuacaccaacagcuuuaccagaggcguguacuaccccgacaagguguucagauccagcgugcugcacucuacccaggaccuguuccugccuuucuucagcaacgugaccugguuccacgccauccacguguccggcaccaauggcaccaagagauucgacaaccccgugcugcccuucaacgacgggguguacuuugccagcaccgagaaguccaacaucaucagaggcuggaucuucggcaccacacuggacagcaagacccagagccugcugaucgugaacaacgccaccaacguggucaucaaagugugcgaguuccaguucugcaacgaccccuuccugggcgucuacuaccacaagaacaacaagagcugcauggaaagcgaguuccggguguacagcagcgccaacaacugcaccuucgaguacgugucccagccuuuccugauggaccuggaaggcaagcagggcaacuucaagaaccugcgcgaguucguguuuaagaacaucgacggcuacuucaagaucuacagcaagcacaccccuaucaaccucgugcgggaucugccucagggcuucucugcucuggaaccccugguggaucugcccaucggcaucaacaucacccgguuucagacacugcuggcccugcacagaagcuaccugacaccuggcgauagcagcagcggauggacagcuggugccgccgcuuacuaugugggcuaccugcagccuagaaccuuccugcugaaguacaacgagaacggcaccaucaccgacgccguggauugugcucuggauccucugagcgagacaaagugcacccugaaguccuucaccguggaaaagggcaucuaccagaccagcaacuuccgggugcagcccaccgaauccaucgugcgguuccccaauaucaccaaucugugccccuucggcgagguguucaaugccaccagauucgccucuguguacgccuggaaccggaagcggaucagcaauugcguggccgacuacuccgugcuguacaacuccgccagcuucagcaccuucaagugcuacggcguguccccuaccaagcugaacgaccugugcuucacaaacguguacgccgacagcuucgugauccggggagaugaagugcggcagauugccccuggacagacaggcaagaucgccgacuacaacuacaagcugcccgacgacuucaccggcugugugauugccuggaacagcaacaaccuggacuccaaagucggcggcaacuacaauuaccgcuaccggcuguuccggaaguccaaucugaagcccuucgagcgggacaucuccaccgagaucuaucaggccggcagcaccccuuguaacggcguggaaggcuucaacugcuacuucccacugcaguccuacggcuuucagcccacaaauggcgugggcuaucagcccuacagagugguggugcugagcuucgaacugcugcaugccccugccacagugugcggcccuaagaaaagcaccaaucucgugaagaacaaaugcgugaacuucaacuucaacggccugaccggcaccggcgugcugacagagagcaacaagaaguuccugccauuccagcaguuuggccgggauaucgccgauaccacagacgccguuagagauccccagacacuggaaauccuggacaucaccccuugcagcuucggcggagugucugugaucaccccuggcaccaacaccagcaaucagguggcagugcuguaccagggcgugaacuguaccgaagugcccguggccauucacgccgaucagcugacaccuacauggcggguguacuccaccggcagcaauguguuucagaccagagccggcugucugaucggagccgagcacgugaacaauagcuacgagugcgacauccccaucggcgcuggaaucugcgccagcuaccagacacagacaaacagcccucggagagccagaagcguggccagccagagcaucauugccuacacaaugucucugggcgccgagaacagcguggccuacuccaacaacucuaucgcuauccccaccaacuucaccaucagcgugaccacagagauccugccuguguccaugaccaagaccagcguggacugcaccauguacaucugcggcgauuccaccgagugcuccaaccugcugcugcaguacggcagcuucugcacccagcugaauagagcccugacagggaucgccguggaacaggacaagaacacccaagagguguucgcccaagugaagcagaucuacaagaccccuccuaucaaggacuucggcggcuucaauuucagccagauucugcccgauccuagcaagcccagcaagcggagcuucaucgaggaccugcuguucaacaaagugacacuggccgacgccggcuucaucaagcaguauggcgauugucugggcgacauugccgccagggaucugauuugcgcccagaaguuuaacggacugacagugcugccuccucugcugaccgaugagaugaucgcccaguacacaucugcccugcuggccggcacaaucacaagcggcuggacauuuggagcaggcgccgcucugcagauccccuuugcuaugcagauggccuaccgguucaacggcaucggagugacccagaaugugcuguacgagaaccagaagcugaucgccaaccaguucaacagcgccaucggcaagauccaggacagccugagcagcacagcaagcgcccugggaaagcugcaggacguggucaaccagaaugcccaggcacugaacacccuggucaagcagcuguccuccaacuucggcgccaucagcucugugcugaacgauauccugagcagacuggacaaggucgaggccgaggugcagaucgacagacugaucacaggcagacugcagagccuccagacauacgugacccagcagcugaucagagccgccgagauuagagccucugccaaucuggccgccaccaagaugucugagugugugcugggccagagcaagagaguggacuuuugcggcaagggcuaccaccugaugagcuucccucagucugccccucacggcgugguguuucugcacgugacauaugugcccgcucaagagaagaauuucaccaccgcuccagccaucugccacgacggcaaagcccacuuuccuagagaaggcguguucguguccaacggcacccauugguucgugacacagcggaacuucuacgagccccagaucaucaccaccgacaacaccuucgugucuggcaacugcgacgucgugaucggcauugugaacaauaccguguacgacccucugcagcccgagcuggacagcuucaaagaggaacuggacaaguacuuuaagaaccacacaagccccgacguggaccugggcgauaucagcggaaucaaugccagcgucgugaacauccagaaagagaucgaccggcugaacgagguggccaagaaucugaacgagagccugaucgaccugcaagaacuggggaaguacgagcaguacaucaaguggcccugguacaucuggcugggcuuuaucgccggacugauugccaucgugauggucacaaucaugcuguguugcaugaccagcugcuguagcugccugaagggcuguuguagcuguggcagcugcugcaaguucgacgaggacgauucugagcccgugcugaagggcgugaaacugcacuacacaugauaauaggcuggagccucgguggccuagcuucuugccccuugggccuccccccagccccuccuccccuuccugcacccguacccccguggucuuugaauaaagucugagugggcggcaaaaaaaaaaaaaaaaaaaaaaaaaaaaaaaaaaaaaaaaaaaaaaaaaaaaaaaaaaaaaaaaaaaaaaaaaaaaaaaaaaaaaaaaaaaaaaaaaaaaucuag

SEQ ID NO: 26597 - RNA, 4100 nt, Artificial Sequence
  SARS-CoV-2/Wuhan/WIV05/2019__EPI_ISL_402128 spike protein mRNA gc (1-1273)(K986P_V987P)
gggaaauaagagagaaaagaagaguaagaagaaauauaagaccccggcgccgccaccauguucguguuccugguccuccugccccuggugagcucccagugcgugaaccucaccacccgcacgcagcugccgcccgccuacaccaacagcuucacccggggcgucuacuaccccgacaagguguuccgcuccagcgugcugcacuccacccaggaccucuuccugcccuucuucagcaacgucacgugguuccacgccauccacguguccgggaccaacggcaccaagcgguucgacaacccggugcugcccuucaacgacggggucuacuucgcgagcaccgagaaguccaacaucauccgcggcuggaucuucgggacgacccucgacagcaagacccagucccugcugaucgugaacaacgccaccaacguggucaucaaggugugcgaguuccaguucugcaacgaccccuuccucggcguguacuaccacaagaacaacaagagcuggauggaguccgaguuccgggucuacagcuccgccaacaacugcacguucgaguacgugagccagcccuuccugauggaccuggagggcaagcaggggaacuucaagaaccuccgcgaguucguguucaagaacaucgacggcuacuucaagaucuacuccaagcacaccccgaucaaccugguccgggaccugccccagggguucagcgcccucgagccccugguggaccugcccaucggcaucaacaucacccgcuuccagacccuccuggcccugcaccgguccuaccucacgccgggggacagcagcuccggcuggaccgcgggcgccgccgccuacuacgugggguaccugcagccccgcaccuuccugcucaaguacaacgagaacggcaccaucacggacgcggucgacugcgcccuggacccccugagcgagaccaagugcacccucaaguccuucaccguggagaaggggaucuaccagacgagcaacuuccgggugcagcccaccgaguccaucguccgcuucccgaacaucaccaaccugugccccuucggcgagguguucaacgccacccgguucgccagcgucuacgccuggaaccgcaagcggaucuccaacugcguggcggacuacagcgugcuguacaacuccgccagcuucuccacguucaagugcuacggcgucagccccaccaagcucaacgaccugugcuucaccaacguguacgccgacuccuucgugauccgcggggacgagguccggcagaucgcccccggccagaccgggaagaucgccgacuacaacuacaagcugccggacgacuucacgggcugcgugaucgcguggaacagcaacaaccucgacuccaaggucgggggcaacuacaacuaccuguaccgccuguuccgcaagagcaaccucaagcccuucgagcgggacaucuccaccgagaucuaccaggccggcagcacccccugcaacgggguggagggcuucaacugcuacuucccccugcaguccuacggguuccagccgaccaacggcgugggguaccagcccuaccggguggucgugcugagcuucgagcuccugcacgcccccgccacggugugcggccccaagaaguccaccaaccuggucaagaacaagugcgugaacuucaacuucaacggccucaccgggaccggcgugcugaccgagagcaacaagaaguuccugccguuccagcaguucgggcgcgacaucgccgacacgaccgacgcgguccgcgacccccagacccuggagauccucgacaucacccccugcagcuucggcgggguguccgugaucacgccgggcaccaacaccagcaaccaggucgccgugcuguaccaggacgugaacugcaccgagguccccguggccauccacgccgaccagcugacgcccaccuggcggguguacuccaccggcagcaacgucuuccagacccgcgccgggugccucaucggcgcggagcacgugaacaacuccuacgagugcgacauccccaucggggccggcaucugcgccagcuaccagacgcagaccaacuccccgcggcgcgcccggagcguggcgucccagagcaucaucgccuacaccaugucccugggcgccgagaacagcgucgccuacuccaacaacagcaucgccauccccaccaacuucacgaucuccgugaccaccgagauccugcccgugagcaugaccaagacgagcgucgacugcaccauguacaucugcggggacuccaccgagugcagcaaccuccugcugcaguacggcuccuucugcacccagcucaaccgcgcgcugacggggaucgccguggagcaggacaagaacacccaggagguguucgcccaggucaagcagaucuacaagacgcccccgaucaaggacuucggcggguucaacuucagccagauccugcccgaccccuccaagcccagcaagcgguccuucaucgaggaccuccuguucaacaaggugacccuggccgacgccggcuucaucaagcaguacggcgacugccucggggacaucgcggcccgcgaccugaucugcgcccagaaguucaacggccugaccgugcucccgccccugcugaccgacgagaugaucgcccaguacaccagcgcccuccuggcggggaccaucacguccggcuggaccuucggggccggcgccgcccugcagauccccuucgcgaugcagauggccuaccgguucaacggcaucggggucacccagaacgugcucuacgagaaccagaagcugaucgccaaccaguucaacagcgccaucggcaagauccaggacucccugagcuccaccgccagcgcgcucgggaagcugcaggacguggucaaccagaacgcccaggcccugaacacgcucgugaagcagcuguccagcaacuucggcgccaucuccagcgugcugaacgacauccucucccgccuggacccgcccgaggccgaggugcagaucgaccggcugaucaccgggcgccuccagagccugcagaccuacgugacccagcagcugauccgggcggccgagauccgcgccagcgccaaccucgccgcgaccaagauguccgagugcguccugggccagagcaagcggguggacuucugcggcaagggguaccaccugauguccuucccccagagcgccccgcacggcguggucuuccuccacgugacguacguccccgcccaggagaagaacuucaccaccgcccccgcgaucugccacgacgggaaggcccacuucccccgcgagggcguguucguguccaacgggacccacugguucgucacgcagcggaacuucuacgagccgcagaucaucaccaccgacaacaccuucgugagcggcaacugcgacguggucaucggcaucgugaacaacacgguguacgacccccugcagcccgagcuggacuccuucaaggaggagcucgacaaguacuucaagaaccacaccagccccgacgucgaccugggggacaucuccggcaucaacgccagcguggugaacauccagaaggagaucgaccgccugaacgaggucgccaagaaccucaacgagucccugaucgaccugcaggagcucgggaaguacgagcaguacaucaaguggccgugguacaucuggcugggcuucaucgccggccugaucgcgaucgugauggugaccaucaugcucugcugcaugaccagcugcugcuccugccugaaggggugcugcagcugcggcuccugcugcaaguucgacgaggacgacagcgagcccguccugaagggggugaagcuccacuacacgugauaauaggcuggagccucgguggccuagcuucuugccccuugggccuccccccagccccuccuccccuuccugcacccguacccccguggucuuugaauaaagucugagugggcggcaaaaaaaaaaaaaaaaaaaaaaaaaaaaaaaaaaaaaaaaaaaaaaaaaaaaaaaaaaaaaaaaaaaaaaaaaaaaaaaaaaaaaaaaaaaaaaaaaaaaucuag

SEQ ID NO: 26598 - RNA, 4100 nt, Artificial Sequence
  SARS-CoV-2/Wuhan/WIV05/2019__EPI_ISL_402128 spike protein mRNA gc (1-1273)(K986P_V987P_ D614G)
gggaaauaagagagaaaagaagaguaagaagaaauauaagaccccggcgccgccaccauguucguguuccugguccuccugccccuggugagcucccagugcgugaaccucaccacccgcacgcagcugccgcccgccuacaccaacagcuucacccggggcgucuacuaccccgacaagguguuccgcuccagcgugcugcacuccacccaggaccucuuccugcccuucuucagcaacgucacgugguuccacgccauccacguguccgggaccaacggcaccaagcgguucgacaacccggugcugcccuucaacgacggggucuacuucgcgagcaccgagaaguccaacaucauccgcggcuggaucuucgggacgacccucgacagcaagacccagucccugcugaucgugaacaacgccaccaacguggucaucaaggugugcgaguuccaguucugcaacgaccccuuccucggcguguacuaccacaagaacaacaagagcuggauggaguccgaguuccgggucuacagcuccgccaacaacugcacguucgaguacgugagccagcccuuccugauggaccuggagggcaagcaggggaacuucaagaaccuccgcgaguucguguucaagaacaucgacggcuacuucaagaucuacuccaagcacaccccgaucaaccugguccgggaccugccccagggguucagcgcccucgagccccugguggaccugcccaucggcaucaacaucacccgcuuccagacccuccuggcccugcaccgguccuaccucacgccgggggacagcagcuccggcuggaccgcgggcgccgccgccuacuacgugggguaccugcagccccgcaccuuccugcucaaguacaacgagaacggcaccaucacggacgcggucgacugcgcccuggacccccugagcgagaccaagugcacccucaaguccuucaccguggagaaggggaucuaccagacgagcaacuuccgggugcagcccaccgaguccaucguccgcuucccgaacaucaccaaccugugccccuucggcgagguguucaacgccacccgguucgccagcgucuacgccuggaaccgcaagcggaucuccaacugcguggcggacuacagcgugcuguacaacuccgccagcuucuccacguucaagugcuacggcgucagccccaccaagcucaacgaccugugcuucaccaacguguacgccgacuccuucgugauccgcggggacgagguccggcagaucgcccccggccagaccgggaagaucgccgacuacaacuacaagcugccggacgacuucacgggcugcgugaucgcguggaacagcaacaaccucgacuccaaggucgggggcaacuacaacuaccuguaccgccuguuccgcaagagcaaccucaagcccuucgagcgggacaucuccaccgagaucuaccaggccggcagcacccccugcaacgggguggagggcuucaacugcuacuucccccugcaguccuacggguuccagccgaccaacggcgugggguaccagcccuaccggguggucgugcugagcuucgagcuccugcacgcccccgccacggugugcggccccaagaaguccaccaaccuggucaagaacaagugcgugaacuucaacuucaacggccucaccgggaccggcgugcugaccgagagcaacaagaaguuccugccguuccagcaguucgggcgcgacaucgccgacacgaccgacgcgguccgcgacccccagacccuggagauccucgacaucacccccugcagcuucggcgggguguccgugaucacgccgggcaccaacaccagcaaccaggucgccgugcuguaccagggcgugaacugcaccgagguccccguggccauccacgccgaccagcugacgcccaccuggcggguguacuccaccggcagcaacgucuuccagacccgcgccgggugccucaucggcgcggagcacgugaacaacuccuacgagugcgacauccccaucggggccggcaucugcgccagcuaccagacgcagaccaacuccccgcggcgcgcccggagcguggcgucccagagcaucaucgccuacaccaugucccugggcgccgagaacagcgucgccuacuccaacaacagcaucgccauccccaccaacuucacgaucuccgugaccaccgagauccugcccgugagcaugaccaagacgagcgucgacugcaccauguacaucugcggggacuccaccgagugcagcaaccuccugcugcaguacggcuccuucugcacccagcucaaccgcgcgcugacggggaucgccguggagcaggacaagaacacccaggagguguucgcccaggucaagcagaucuacaagacgcccccgaucaaggacuucggcggguucaacuucagccagauccugcccgaccccuccaagcccagcaagcgguccuucaucgaggaccuccuguucaacaaggugacccuggccgacgccggcuucaucaagcaguacggcgacugccucggggacaucgcggcccgcgaccugaucugcgcccagaaguucaacggccugaccgugcucccgccccugcugaccgacgagaugaucgcccaguacaccagcgcccuccuggcggggaccaucacguccggcuggaccuucggggccggcgccgcccugcagauccccuucgcgaugcagauggccuaccgguucaacggcaucggggucacccagaacgugcucuacgagaaccagaagcugaucgccaaccaguucaacagcgccaucggcaagauccaggacucccugagcuccaccgccagcgcgcucgggaagcugcaggacguggucaaccagaacgcccaggcccugaacacgcucgugaagcagcuguccagcaacuucggcgccaucuccagcgugcugaacgacauccucucccgccuggacccgcccgaggccgaggugcagaucgaccggcugaucaccgggcgccuccagagccugcagaccuacgugacccagcagcugauccgggcggccgagauccgcgccagcgccaaccucgccgcgaccaagauguccgagugcguccugggccagagcaagcggguggacuucugcggcaagggguaccaccugauguccuucccccagagcgccccgcacggcguggucuuccuccacgugacguacguccccgcccaggagaagaacuucaccaccgcccccgcgaucugccacgacgggaaggcccacuucccccgcgagggcguguucguguccaacgggacccacugguucgucacgcagcggaacuucuacgagccgcagaucaucaccaccgacaacaccuucgugagcggcaacugcgacguggucaucggcaucgugaacaacacgguguacgacccccugcagcccgagcuggacuccuucaaggaggagcucgacaaguacuucaagaaccacaccagccccgacgucgaccugggggacaucuccggcaucaacgccagcguggugaacauccagaaggagaucgaccgccugaacgaggucgccaagaaccucaacgagucccugaucgaccugcaggagcucgggaaguacgagcaguacaucaaguggccgugguacaucuggcugggcuucaucgccggccugaucgcgaucgugauggugaccaucaugcucugcugcaugaccagcugcugcuccugccugaaggggugcugcagcugcggcuccugcugcaaguucgacgaggacgacagcgagcccguccugaagggggugaagcuccacuacacgugauaauaggcuggagccucgguggccuagcuucuugccccuugggccuccccccagccccuccuccccuuccugcacccguacccccguggucuuugaauaaagucugagugggcggcaaaaaaaaaaaaaaaaaaaaaaaaaaaaaaaaaaaaaaaaaaaaaaaaaaaaaaaaaaaaaaaaaaaaaaaaaaaaaaaaaaaaaaaaaaaaaaaaaaaaucuag

SEQ ID NO: 26599 - RNA, 4100 nt, Artificial Sequence
  SARS-CoV-2/Wuhan/WIV05/2019__EPI_ISL_402128 spike protein mRNA gc (1-1273)(K986P_V987P_A222V_D614G)
gggaaauaagagagaaaagaagaguaagaagaaauauaagaccccggcgccgccaccauguucguguuccugguccuccugccccuggugagcucccagugcgugaaccucaccacccgcacgcagcugccgcccgccuacaccaacagcuucacccggggcgucuacuaccccgacaagguguuccgcuccagcgugcugcacuccacccaggaccucuuccugcccuucuucagcaacgucacgugguuccacgccauccacguguccgggaccaacggcaccaagcgguucgacaacccggugcugcccuucaacgacggggucuacuucgcgagcaccgagaaguccaacaucauccgcggcuggaucuucgggacgacccucgacagcaagacccagucccugcugaucgugaacaacgccaccaacguggucaucaaggugugcgaguuccaguucugcaacgaccccuuccucggcguguacuaccacaagaacaacaagagcuggauggaguccgaguuccgggucuacagcuccgccaacaacugcacguucgaguacgugagccagcccuuccugauggaccuggagggcaagcaggggaacuucaagaaccuccgcgaguucguguucaagaacaucgacggcuacuucaagaucuacuccaagcacaccccgaucaaccugguccgggaccugccccagggguucagcguccucgagccccugguggaccugcccaucggcaucaacaucacccgcuuccagacccuccuggcccugcaccgguccuaccucacgccgggggacagcagcuccggcuggaccgcgggcgccgccgccuacuacgugggguaccugcagccccgcaccuuccugcucaaguacaacgagaacggcaccaucacggacgcggucgacugcgcccuggacccccugagcgagaccaagugcacccucaaguccuucaccguggagaaggggaucuaccagacgagcaacuuccgggugcagcccaccgaguccaucguccgcuucccgaacaucaccaaccugugccccuucggcgagguguucaacgccacccgguucgccagcgucuacgccuggaaccgcaagcggaucuccaacugcguggcggacuacagcgugcuguacaacuccgccagcuucuccacguucaagugcuacggcgucagccccaccaagcucaacgaccugugcuucaccaacguguacgccgacuccuucgugauccgcggggacgagguccggcagaucgcccccggccagaccgggaagaucgccgacuacaacuacaagcugccggacgacuucacgggcugcgugaucgcguggaacagcaacaaccucgacuccaaggucgggggcaacuacaacuaccuguaccgccuguuccgcaagagcaaccucaagcccuucgagcgggacaucuccaccgagaucuaccaggccggcagcacccccugcaacgggguggagggcuucaacugcuacuucccccugcaguccuacggguuccagccgaccaacggcgugggguaccagcccuaccggguggucgugcugagcuucgagcuccugcacgcccccgccacggugugcggccccaagaaguccaccaaccuggucaagaacaagugcgugaacuucaacuucaacggccucaccgggaccggcgugcugaccgagagcaacaagaaguuccugccguuccagcaguucgggcgcgacaucgccgacacgaccgacgcgguccgcgacccccagacccuggagauccucgacaucacccccugcagcuucggcgggguguccgugaucacgccgggcaccaacaccagcaaccaggucgccgugcuguaccagggcgugaacugcaccgagguccccguggccauccacgccgaccagcugacgcccaccuggcggguguacuccaccggcagcaacgucuuccagacccgcgccgggugccucaucggcgcggagcacgugaacaacuccuacgagugcgacauccccaucggggccggcaucugcgccagcuaccagacgcagaccaacuccccgcggcgcgcccggagcguggcgucccagagcaucaucgccuacaccaugucccugggcgccgagaacagcgucgccuacuccaacaacagcaucgccauccccaccaacuucacgaucuccgugaccaccgagauccugcccgugagcaugaccaagacgagcgucgacugcaccauguacaucugcggggacuccaccgagugcagcaaccuccugcugcaguacggcuccuucugcacccagcucaaccgcgcgcugacggggaucgccguggagcaggacaagaacacccaggagguguucgcccaggucaagcagaucuacaagacgcccccgaucaaggacuucggcggguucaacuucagccagauccugcccgaccccuccaagcccagcaagcgguccuucaucgaggaccuccuguucaacaaggugacccuggccgacgccggcuucaucaagcaguacggcgacugccucggggacaucgcggcccgcgaccugaucugcgcccagaaguucaacggccugaccgugcucccgccccugcugaccgacgagaugaucgcccaguacaccagcgcccuccuggcggggaccaucacguccggcuggaccuucggggccggcgccgcccugcagauccccuucgcgaugcagauggccuaccgguucaacggcaucggggucacccagaacgugcucuacgagaaccagaagcugaucgccaaccaguucaacagcgccaucggcaagauccaggacucccugagcuccaccgccagcgcgcucgggaagcugcaggacguggucaaccagaacgcccaggcccugaacacgcucgugaagcagcuguccagcaacuucggcgccaucuccagcgugcugaacgacauccucucccgccuggacccgcccgaggccgaggugcagaucgaccggcugaucaccgggcgccuccagagccugcagaccuacgugacccagcagcugauccgggcggccgagauccgcgccagcgccaaccucgccgcgaccaagauguccgagugcguccugggccagagcaagcggguggacuucugcggcaagggguaccaccugauguccuucccccagagcgccccgcacggcguggucuuccuccacgugacguacguccccgcccaggagaagaacuucaccaccgcccccgcgaucugccacgacgggaaggcccacuucccccgcgagggcguguucguguccaacgggacccacugguucgucacgcagcggaacuucuacgagccgcagaucaucaccaccgacaacaccuucgugagcggcaacugcgacguggucaucggcaucgugaacaacacgguguacgacccccugcagcccgagcuggacuccuucaaggaggagcucgacaaguacuucaagaaccacaccagccccgacgucgaccugggggacaucuccggcaucaacgccagcguggugaacauccagaaggagaucgaccgccugaacgaggucgccaagaaccucaacgagucccugaucgaccugcaggagcucgggaaguacgagcaguacaucaaguggccgugguacaucuggcugggcuucaucgccggccugaucgcgaucgugauggugaccaucaugcucugcugcaugaccagcugcugcuccugccugaaggggugcugcagcugcggcuccugcugcaaguucgacgaggacgacagcgagcccguccugaagggggugaagcuccacuacacgugauaauaggcuggagccucgguggccuagcuucuugccccuugggccuccccccagccccuccuccccuuccugcacccguacccccguggucuuugaauaaagucugagugggcggcaaaaaaaaaaaaaaaaaaaaaaaaaaaaaaaaaaaaaaaaaaaaaaaaaaaaaaaaaaaaaaaaaaaaaaaaaaaaaaaaaaaaaaaaaaaaaaaaaaaaucuag

SEQ ID NO: 26600 - RNA, 4100 nt, Artificial Sequence
  SARS-CoV-2/Wuhan/WIV05/2019__EPI_ISL_402128 spike protein mRNA gc (1-1273)(K986P_V987P_N439K_D614G)
gggaaauaagagagaaaagaagaguaagaagaaauauaagaccccggcgccgccaccauguucguguuccugguccuccugccccuggugagcucccagugcgugaaccucaccacccgcacgcagcugccgcccgccuacaccaacagcuucacccggggcgucuacuaccccgacaagguguuccgcuccagcgugcugcacuccacccaggaccucuuccugcccuucuucagcaacgucacgugguuccacgccauccacguguccgggaccaacggcaccaagcgguucgacaacccggugcugcccuucaacgacggggucuacuucgcgagcaccgagaaguccaacaucauccgcggcuggaucuucgggacgacccucgacagcaagacccagucccugcugaucgugaacaacgccaccaacguggucaucaaggugugcgaguuccaguucugcaacgaccccuuccucggcguguacuaccacaagaacaacaagagcuggauggaguccgaguuccgggucuacagcuccgccaacaacugcacguucgaguacgugagccagcccuuccugauggaccuggagggcaagcaggggaacuucaagaaccuccgcgaguucguguucaagaacaucgacggcuacuucaagaucuacuccaagcacaccccgaucaaccugguccgggaccugccccagggguucagcgcccucgagccccugguggaccugcccaucggcaucaacaucacccgcuuccagacccuccuggcccugcaccgguccuaccucacgccgggggacagcagcuccggcuggaccgcgggcgccgccgccuacuacgugggguaccugcagccccgcaccuuccugcucaaguacaacgagaacggcaccaucacggacgcggucgacugcgcccuggacccccugagcgagaccaagugcacccucaaguccuucaccguggagaaggggaucuaccagacgagcaacuuccgggugcagcccaccgaguccaucguccgcuucccgaacaucaccaaccugugccccuucggcgagguguucaacgccacccgguucgccagcgucuacgccuggaaccgcaagcggaucuccaacugcguggcggacuacagcgugcuguacaacuccgccagcuucuccacguucaagugcuacggcgucagccccaccaagcucaacgaccugugcuucaccaacguguacgccgacuccuucgugauccgcggggacgagguccggcagaucgcccccggccagaccgggaagaucgccgacuacaacuacaagcugccggacgacuucacgggcugcgugaucgcguggaacagcaagaaccucgacuccaaggucgggggcaacuacaacuaccuguaccgccuguuccgcaagagcaaccucaagcccuucgagcgggacaucuccaccgagaucuaccaggccggcagcacccccugcaacgggguggagggcuucaacugcuacuucccccugcaguccuacggguuccagccgaccaacggcgugggguaccagcccuaccggguggucgugcugagcuucgagcuccugcacgcccccgccacggugugcggccccaagaaguccaccaaccuggucaagaacaagugcgugaacuucaacuucaacggccucaccgggaccggcgugcugaccgagagcaacaagaaguuccugccguuccagcaguucgggcgcgacaucgccgacacgaccgacgcgguccgcgacccccagacccuggagauccucgacaucacccccugcagcuucggcgggguguccgugaucacgccgggcaccaacaccagcaaccaggucgccgugcuguaccagggcgugaacugcaccgagguccccguggccauccacgccgaccagcugacgcccaccuggcggguguacuccaccggcagcaacgucuuccagacccgcgccgggugccucaucggcgcggagcacgugaacaacuccuacgagugcgacauccccaucggggccggcaucugcgccagcuaccagacgcagaccaacuccccgcggcgcgcccggagcguggcgucccagagcaucaucgccuacaccaugucccugggcgccgagaacagcgucgccuacuccaacaacagcaucgccauccccaccaacuucacgaucuccgugaccaccgagauccugcccgugagcaugaccaagacgagcgucgacugcaccauguacaucugcggggacuccaccgagugcagcaaccuccugcugcaguacggcuccuucugcacccagcucaaccgcgcgcugacggggaucgccguggagcaggacaagaacacccaggagguguucgcccaggucaagcagaucuacaagacgcccccgaucaaggacuucggcggguucaacuucagccagauccugcccgaccccuccaagcccagcaagcgguccuucaucgaggaccuccuguucaacaaggugacccuggccgacgccggcuucaucaagcaguacggcgacugccucggggacaucgcggcccgcgaccugaucugcgcccagaaguucaacggccugaccgugcucccgccccugcugaccgacgagaugaucgcccaguacaccagcgcccuccuggcggggaccaucacguccggcuggaccuucggggccggcgccgcccugcagauccccuucgcgaugcagauggccuaccgguucaacggcaucggggucacccagaacgugcucuacgagaaccagaagcugaucgccaaccaguucaacagcgccaucggcaagauccaggacucccugagcuccaccgccagcgcgcucgggaagcugcaggacguggucaaccagaacgcccaggcccugaacacgcucgugaagcagcuguccagcaacuucggcgccaucuccagcgugcugaacgacauccucucccgccuggacccgcccgaggccgaggugcagaucgaccggcugaucaccgggcgccuccagagccugcagaccuacgugacccagcagcugauccgggcggccgagauccgcgccagcgccaaccucgccgcgaccaagauguccgagugcguccugggccagagcaagcggguggacuucugcggcaagggguaccaccugauguccuucccccagagcgccccgcacggcguggucuuccuccacgugacguacguccccgcccaggagaagaacuucaccaccgcccccgcgaucugccacgacgggaaggcccacuucccccgcgagggcguguucguguccaacgggacccacugguucgucacgcagcggaacuucuacgagccgcagaucaucaccaccgacaacaccuucgugagcggcaacugcgacguggucaucggcaucgugaacaacacgguguacgacccccugcagcccgagcuggacuccuucaaggaggagcucgacaaguacuucaagaaccacaccagccccgacgucgaccugggggacaucuccggcaucaacgccagcguggugaacauccagaaggagaucgaccgccugaacgaggucgccaagaaccucaacgagucccugaucgaccugcaggagcucgggaaguacgagcaguacaucaaguggccgugguacaucuggcugggcuucaucgccggccugaucgcgaucgugauggugaccaucaugcucugcugcaugaccagcugcugcuccugccugaaggggugcugcagcugcggcuccugcugcaaguucgacgaggacgacagcgagcccguccugaagggggugaagcuccacuacacgugauaauaggcuggagccucgguggccuagcuucuugccccuugggccuccccccagccccuccuccccuuccugcacccguacccccguggucuuugaauaaagucugagugggcggcaaaaaaaaaaaaaaaaaaaaaaaaaaaaaaaaaaaaaaaaaaaaaaaaaaaaaaaaaaaaaaaaaaaaaaaaaaaaaaaaaaaaaaaaaaaaaaaaaaaaucuag

SEQ ID NO: 26601 - RNA, 4100 nt, Artificial Sequence
  SARS-CoV-2/Wuhan/WIV05/2019__EPI_ISL_402128 spike protein mRNA gc (1-1273)(K986P_V987P_S477N_D614G)
gggaaauaagagagaaaagaagaguaagaagaaauauaagaccccggcgccgccaccauguucguguuccugguccuccugccccuggugagcucccagugcgugaaccucaccacccgcacgcagcugccgcccgccuacaccaacagcuucacccggggcgucuacuaccccgacaagguguuccgcuccagcgugcugcacuccacccaggaccucuuccugcccuucuucagcaacgucacgugguuccacgccauccacguguccgggaccaacggcaccaagcgguucgacaacccggugcugcccuucaacgacggggucuacuucgcgagcaccgagaaguccaacaucauccgcggcuggaucuucgggacgacccucgacagcaagacccagucccugcugaucgugaacaacgccaccaacguggucaucaaggugugcgaguuccaguucugcaacgaccccuuccucggcguguacuaccacaagaacaacaagagcuggauggaguccgaguuccgggucuacagcuccgccaacaacugcacguucgaguacgugagccagcccuuccugauggaccuggagggcaagcaggggaacuucaagaaccuccgcgaguucguguucaagaacaucgacggcuacuucaagaucuacuccaagcacaccccgaucaaccugguccgggaccugccccagggguucagcgcccucgagccccugguggaccugcccaucggcaucaacaucacccgcuuccagacccuccuggcccugcaccgguccuaccucacgccgggggacagcagcuccggcuggaccgcgggcgccgccgccuacuacgugggguaccugcagccccgcaccuuccugcucaaguacaacgagaacggcaccaucacggacgcggucgacugcgcccuggacccccugagcgagaccaagugcacccucaaguccuucaccguggagaaggggaucuaccagacgagcaacuuccgggugcagcccaccgaguccaucguccgcuucccgaacaucaccaaccugugccccuucggcgagguguucaacgccacccgguucgccagcgucuacgccuggaaccgcaagcggaucuccaacugcguggcggacuacagcgugcuguacaacuccgccagcuucuccacguucaagugcuacggcgucagccccaccaagcucaacgaccugugcuucaccaacguguacgccgacuccuucgugauccgcggggacgagguccggcagaucgcccccggccagaccgggaagaucgccgacuacaacuacaagcugccggacgacuucacgggcugcgugaucgcguggaacagcaacaaccucgacuccaaggucgggggcaacuacaacuaccuguaccgccuguuccgcaagagcaaccucaagcccuucgagcgggacaucuccaccgagaucuaccaggccggcaacacccccugcaacgggguggagggcuucaacugcuacuucccccugcaguccuacggguuccagccgaccaacggcgugggguaccagcccuaccggguggucgugcugagcuucgagcuccugcacgcccccgccacggugugcggccccaagaaguccaccaaccuggucaagaacaagugcgugaacuucaacuucaacggccucaccgggaccggcgugcugaccgagagcaacaagaaguuccugccguuccagcaguucgggcgcgacaucgccgacacgaccgacgcgguccgcgacccccagacccuggagauccucgacaucacccccugcagcuucggcgggguguccgugaucacgccgggcaccaacaccagcaaccaggucgccgugcuguaccagggcgugaacugcaccgagguccccguggccauccacgccgaccagcugacgcccaccuggcggguguacuccaccggcagcaacgucuuccagacccgcgccgggugccucaucggcgcggagcacgugaacaacuccuacgagugcgacauccccaucggggccggcaucugcgccagcuaccagacgcagaccaacuccccgcggcgcgcccggagcguggcgucccagagcaucaucgccuacaccaugucccugggcgccgagaacagcgucgccuacuccaacaacagcaucgccauccccaccaacuucacgaucuccgugaccaccgagauccugcccgugagcaugaccaagacgagcgucgacugcaccauguacaucugcggggacuccaccgagugcagcaaccuccugcugcaguacggcuccuucugcacccagcucaaccgcgcgcugacggggaucgccguggagcaggacaagaacacccaggagguguucgcccaggucaagcagaucuacaagacgcccccgaucaaggacuucggcggguucaacuucagccagauccugcccgaccccuccaagcccagcaagcgguccuucaucgaggaccuccuguucaacaaggugacccuggccgacgccggcuucaucaagcaguacggcgacugccucggggacaucgcggcccgcgaccugaucugcgcccagaaguucaacggccugaccgugcucccgccccugcugaccgacgagaugaucgcccaguacaccagcgcccuccuggcggggaccaucacguccggcuggaccuucggggccggcgccgcccugcagauccccuucgcgaugcagauggccuaccgguucaacggcaucggggucacccagaacgugcucuacgagaaccagaagcugaucgccaaccaguucaacagcgccaucggcaagauccaggacucccugagcuccaccgccagcgcgcucgggaagcugcaggacguggucaaccagaacgcccaggcccugaacacgcucgugaagcagcuguccagcaacuucggcgccaucuccagcgugcugaacgacauccucucccgccuggacccgcccgaggccgaggugcagaucgaccggcugaucaccgggcgccuccagagccugcagaccuacgugacccagcagcugauccgggcggccgagauccgcgccagcgccaaccucgccgcgaccaagauguccgagugcguccugggccagagcaagcggguggacuucugcggcaagggguaccaccugauguccuucccccagagcgccccgcacggcguggucuuccuccacgugacguacguccccgcccaggagaagaacuucaccaccgcccccgcgaucugccacgacgggaaggcccacuucccccgcgagggcguguucguguccaacgggacccacugguucgucacgcagcggaacuucuacgagccgcagaucaucaccaccgacaacaccuucgugagcggcaacugcgacguggucaucggcaucgugaacaacacgguguacgacccccugcagcccgagcuggacuccuucaaggaggagcucgacaaguacuucaagaaccacaccagccccgacgucgaccugggggacaucuccggcaucaacgccagcguggugaacauccagaaggagaucgaccgccugaacgaggucgccaagaaccucaacgagucccugaucgaccugcaggagcucgggaaguacgagcaguacaucaaguggccgugguacaucuggcugggcuucaucgccggccugaucgcgaucgugauggugaccaucaugcucugcugcaugaccagcugcugcuccugccugaaggggugcugcagcugcggcuccugcugcaaguucgacgaggacgacagcgagcccguccugaagggggugaagcuccacuacacgugauaauaggcuggagccucgguggccuagcuucuugccccuugggccuccccccagccccuccuccccuuccugcacccguacccccguggucuuugaauaaagucugagugggcggcaaaaaaaaaaaaaaaaaaaaaaaaaaaaaaaaaaaaaaaaaaaaaaaaaaaaaaaaaaaaaaaaaaaaaaaaaaaaaaaaaaaaaaaaaaaaaaaaaaaaucuag

SEQ ID NO: 26602 - RNA, 4100 nt, Artificial Sequence
  SARS-CoV-2/Wuhan/WIV05/2019__EPI_ISL_402128 spike protein mRNA gc (1-1273)(K986P_V987P_N501Y_D614G)
gggaaauaagagagaaaagaagaguaagaagaaauauaagaccccggcgccgccaccauguucguguuccugguccuccugccccuggugagcucccagugcgugaaccucaccacccgcacgcagcugccgcccgccuacaccaacagcuucacccggggcgucuacuaccccgacaagguguuccgcuccagcgugcugcacuccacccaggaccucuuccugcccuucuucagcaacgucacgugguuccacgccauccacguguccgggaccaacggcaccaagcgguucgacaacccggugcugcccuucaacgacggggucuacuucgcgagcaccgagaaguccaacaucauccgcggcuggaucuucgggacgacccucgacagcaagacccagucccugcugaucgugaacaacgccaccaacguggucaucaaggugugcgaguuccaguucugcaacgaccccuuccucggcguguacuaccacaagaacaacaagagcuggauggaguccgaguuccgggucuacagcuccgccaacaacugcacguucgaguacgugagccagcccuuccugauggaccuggagggcaagcaggggaacuucaagaaccuccgcgaguucguguucaagaacaucgacggcuacuucaagaucuacuccaagcacaccccgaucaaccugguccgggaccugccccagggguucagcgcccucgagccccugguggaccugcccaucggcaucaacaucacccgcuuccagacccuccuggcccugcaccgguccuaccucacgccgggggacagcagcuccggcuggaccgcgggcgccgccgccuacuacgugggguaccugcagccccgcaccuuccugcucaaguacaacgagaacggcaccaucacggacgcggucgacugcgcccuggacccccugagcgagaccaagugcacccucaaguccuucaccguggagaaggggaucuaccagacgagcaacuuccgggugcagcccaccgaguccaucguccgcuucccgaacaucaccaaccugugccccuucggcgagguguucaacgccacccgguucgccagcgucuacgccuggaaccgcaagcggaucuccaacugcguggcggacuacagcgugcuguacaacuccgccagcuucuccacguucaagugcuacggcgucagccccaccaagcucaacgaccugugcuucaccaacguguacgccgacuccuucgugauccgcggggacgagguccggcagaucgcccccggccagaccgggaagaucgccgacuacaacuacaagcugccggacgacuucacgggcugcgugaucgcguggaacagcaacaaccucgacuccaaggucgggggcaacuacaacuaccuguaccgccuguuccgcaagagcaaccucaagcccuucgagcgggacaucuccaccgagaucuaccaggccggcagcacccccugcaacgggguggagggcuucaacugcuacuucccccugcaguccuacggguuccagccgaccuacggcgugggguaccagcccuaccggguggucgugcugagcuucgagcuccugcacgcccccgccacggugugcggccccaagaaguccaccaaccuggucaagaacaagugcgugaacuucaacuucaacggccucaccgggaccggcgugcugaccgagagcaacaagaaguuccugccguuccagcaguucgggcgcgacaucgccgacacgaccgacgcgguccgcgacccccagacccuggagauccucgacaucacccccugcagcuucggcgggguguccgugaucacgccgggcaccaacaccagcaaccaggucgccgugcuguaccagggcgugaacugcaccgagguccccguggccauccacgccgaccagcugacgcccaccuggcggguguacuccaccggcagcaacgucuuccagacccgcgccgggugccucaucggcgcggagcacgugaacaacuccuacgagugcgacauccccaucggggccggcaucugcgccagcuaccagacgcagaccaacuccccgcggcgcgcccggagcguggcgucccagagcaucaucgccuacaccaugucccugggcgccgagaacagcgucgccuacuccaacaacagcaucgccauccccaccaacuucacgaucuccgugaccaccgagauccugcccgugagcaugaccaagacgagcgucgacugcaccauguacaucugcggggacuccaccgagugcagcaaccuccugcugcaguacggcuccuucugcacccagcucaaccgcgcgcugacggggaucgccguggagcaggacaagaacacccaggagguguucgcccaggucaagcagaucuacaagacgcccccgaucaaggacuucggcggguucaacuucagccagauccugcccgaccccuccaagcccagcaagcgguccuucaucgaggaccuccuguucaacaaggugacccuggccgacgccggcuucaucaagcaguacggcgacugccucggggacaucgcggcccgcgaccugaucugcgcccagaaguucaacggccugaccgugcucccgccccugcugaccgacgagaugaucgcccaguacaccagcgcccuccuggcggggaccaucacguccggcuggaccuucggggccggcgccgcccugcagauccccuucgcgaugcagauggccuaccgguucaacggcaucggggucacccagaacgugcucuacgagaaccagaagcugaucgccaaccaguucaacagcgccaucggcaagauccaggacucccugagcuccaccgccagcgcgcucgggaagcugcaggacguggucaaccagaacgcccaggcccugaacacgcucgugaagcagcuguccagcaacuucggcgccaucuccagcgugcugaacgacauccucucccgccuggacccgcccgaggccgaggugcagaucgaccggcugaucaccgggcgccuccagagccugcagaccuacgugacccagcagcugauccgggcggccgagauccgcgccagcgccaaccucgccgcgaccaagauguccgagugcguccugggccagagcaagcggguggacuucugcggcaagggguaccaccugauguccuucccccagagcgccccgcacggcguggucuuccuccacgugacguacguccccgcccaggagaagaacuucaccaccgcccccgcgaucugccacgacgggaaggcccacuucccccgcgagggcguguucguguccaacgggacccacugguucgucacgcagcggaacuucuacgagccgcagaucaucaccaccgacaacaccuucgugagcggcaacugcgacguggucaucggcaucgugaacaacacgguguacgacccccugcagcccgagcuggacuccuucaaggaggagcucgacaaguacuucaagaaccacaccagccccgacgucgaccugggggacaucuccggcaucaacgccagcguggugaacauccagaaggagaucgaccgccugaacgaggucgccaagaaccucaacgagucccugaucgaccugcaggagcucgggaaguacgagcaguacaucaaguggccgugguacaucuggcugggcuucaucgccggccugaucgcgaucgugauggugaccaucaugcucugcugcaugaccagcugcugcuccugccugaaggggugcugcagcugcggcuccugcugcaaguucgacgaggacgacagcgagcccguccugaagggggugaagcuccacuacacgugauaauaggcuggagccucgguggccuagcuucuugccccuugggccuccccccagccccuccuccccuuccugcacccguacccccguggucuuugaauaaagucugagugggcggcaaaaaaaaaaaaaaaaaaaaaaaaaaaaaaaaaaaaaaaaaaaaaaaaaaaaaaaaaaaaaaaaaaaaaaaaaaaaaaaaaaaaaaaaaaaaaaaaaaaaucuag

SEQ ID NO: 26603 - RNA, 4094 nt, Artificial Sequence
  SARS-CoV-2/Wuhan/WIV05/2019__EPI_ISL_402128 spike protein mRNA gc (1-1273)(K986P_V987P_H69del_V70del_D614G)
gggaaauaagagagaaaagaagaguaagaagaaauauaagaccccggcgccgccaccauguucguguuccugguccuccugccccuggugagcucccagugcgugaaccucaccacccgcacgcagcugccgcccgccuacaccaacagcuucacccggggcgucuacuaccccgacaagguguuccgcuccagcgugcugcacuccacccaggaccucuuccugcccuucuucagcaacgucacgugguuccacgccaucuccgggaccaacggcaccaagcgguucgacaacccggugcugcccuucaacgacggggucuacuucgcgagcaccgagaaguccaacaucauccgcggcuggaucuucgggacgacccucgacagcaagacccagucccugcugaucgugaacaacgccaccaacguggucaucaaggugugcgaguuccaguucugcaacgaccccuuccucggcguguacuaccacaagaacaacaagagcuggauggaguccgaguuccgggucuacagcuccgccaacaacugcacguucgaguacgugagccagcccuuccugauggaccuggagggcaagcaggggaacuucaagaaccuccgcgaguucguguucaagaacaucgacggcuacuucaagaucuacuccaagcacaccccgaucaaccugguccgggaccugccccagggguucagcgcccucgagccccugguggaccugcccaucggcaucaacaucacccgcuuccagacccuccuggcccugcaccgguccuaccucacgccgggggacagcagcuccggcuggaccgcgggcgccgccgccuacuacgugggguaccugcagccccgcaccuuccugcucaaguacaacgagaacggcaccaucacggacgcggucgacugcgcccuggacccccugagcgagaccaagugcacccucaaguccuucaccguggagaaggggaucuaccagacgagcaacuuccgggugcagcccaccgaguccaucguccgcuucccgaacaucaccaaccugugccccuucggcgagguguucaacgccacccgguucgccagcgucuacgccuggaaccgcaagcggaucuccaacugcguggcggacuacagcgugcuguacaacuccgccagcuucuccacguucaagugcuacggcgucagccccaccaagcucaacgaccugugcuucaccaacguguacgccgacuccuucgugauccgcggggacgagguccggcagaucgcccccggccagaccgggaagaucgccgacuacaacuacaagcugccggacgacuucacgggcugcgugaucgcguggaacagcaacaaccucgacuccaaggucgggggcaacuacaacuaccuguaccgccuguuccgcaagagcaaccucaagcccuucgagcgggacaucuccaccgagaucuaccaggccggcagcacccccugcaacgggguggagggcuucaacugcuacuucccccugcaguccuacggguuccagccgaccaacggcgugggguaccagcccuaccggguggucgugcugagcuucgagcuccugcacgcccccgccacggugugcggccccaagaaguccaccaaccuggucaagaacaagugcgugaacuucaacuucaacggccucaccgggaccggcgugcugaccgagagcaacaagaaguuccugccguuccagcaguucgggcgcgacaucgccgacacgaccgacgcgguccgcgacccccagacccuggagauccucgacaucacccccugcagcuucggcgggguguccgugaucacgccgggcaccaacaccagcaaccaggucgccgugcuguaccagggcgugaacugcaccgagguccccguggccauccacgccgaccagcugacgcccaccuggcggguguacuccaccggcagcaacgucuuccagacccgcgccgggugccucaucggcgcggagcacgugaacaacuccuacgagugcgacauccccaucggggccggcaucugcgccagcuaccagacgcagaccaacuccccgcggcgcgcccggagcguggcgucccagagcaucaucgccuacaccaugucccugggcgccgagaacagcgucgccuacuccaacaacagcaucgccauccccaccaacuucacgaucuccgugaccaccgagauccugcccgugagcaugaccaagacgagcgucgacugcaccauguacaucugcggggacuccaccgagugcagcaaccuccugcugcaguacggcuccuucugcacccagcucaaccgcgcgcugacggggaucgccguggagcaggacaagaacacccaggagguguucgcccaggucaagcagaucuacaagacgcccccgaucaaggacuucggcggguucaacuucagccagauccugcccgaccccuccaagcccagcaagcgguccuucaucgaggaccuccuguucaacaaggugacccuggccgacgccggcuucaucaagcaguacggcgacugccucggggacaucgcggcccgcgaccugaucugcgcccagaaguucaacggccugaccgugcucccgccccugcugaccgacgagaugaucgcccaguacaccagcgcccuccuggcggggaccaucacguccggcuggaccuucggggccggcgccgcccugcagauccccuucgcgaugcagauggccuaccgguucaacggcaucggggucacccagaacgugcucuacgagaaccagaagcugaucgccaaccaguucaacagcgccaucggcaagauccaggacucccugagcuccaccgccagcgcgcucgggaagcugcaggacguggucaaccagaacgcccaggcccugaacacgcucgugaagcagcuguccagcaacuucggcgccaucuccagcgugcugaacgacauccucucccgccuggacccgcccgaggccgaggugcagaucgaccggcugaucaccgggcgccuccagagccugcagaccuacgugacccagcagcugauccgggcggccgagauccgcgccagcgccaaccucgccgcgaccaagauguccgagugcguccugggccagagcaagcggguggacuucugcggcaagggguaccaccugauguccuucccccagagcgccccgcacggcguggucuuccuccacgugacguacguccccgcccaggagaagaacuucaccaccgcccccgcgaucugccacgacgggaaggcccacuucccccgcgagggcguguucguguccaacgggacccacugguucgucacgcagcggaacuucuacgagccgcagaucaucaccaccgacaacaccuucgugagcggcaacugcgacguggucaucggcaucgugaacaacacgguguacgacccccugcagcccgagcuggacuccuucaaggaggagcucgacaaguacuucaagaaccacaccagccccgacgucgaccugggggacaucuccggcaucaacgccagcguggugaacauccagaaggagaucgaccgccugaacgaggucgccaagaaccucaacgagucccugaucgaccugcaggagcucgggaaguacgagcaguacaucaaguggccgugguacaucuggcugggcuucaucgccggccugaucgcgaucgugauggugaccaucaugcucugcugcaugaccagcugcugcuccugccugaaggggugcugcagcugcggcuccugcugcaaguucgacgaggacgacagcgagcccguccugaagggggugaagcuccacuacacgugauaauaggcuggagccucgguggccuagcuucuugccccuugggccuccccccagccccuccuccccuuccugcacccguacccccguggucuuugaauaaagucugagugggcggcaaaaaaaaaaaaaaaaaaaaaaaaaaaaaaaaaaaaaaaaaaaaaaaaaaaaaaaaaaaaaaaaaaaaaaaaaaaaaaaaaaaaaaaaaaaaaaaaaaaaucuag

SEQ ID NO: 26604 - RNA, 4100 nt, Artificial Sequence
  SARS-CoV-2/Wuhan/WIV05/2019__EPI_ISL_402128 spike protein mRNA gc (1-1273)(K986P_V987P_Y453F_D614G)
gggaaauaagagagaaaagaagaguaagaagaaauauaagaccccggcgccgccaccauguucguguuccugguccuccugccccuggugagcucccagugcgugaaccucaccacccgcacgcagcugccgcccgccuacaccaacagcuucacccggggcgucuacuaccccgacaagguguuccgcuccagcgugcugcacuccacccaggaccucuuccugcccuucuucagcaacgucacgugguuccacgccauccacguguccgggaccaacggcaccaagcgguucgacaacccggugcugcccuucaacgacggggucuacuucgcgagcaccgagaaguccaacaucauccgcggcuggaucuucgggacgacccucgacagcaagacccagucccugcugaucgugaacaacgccaccaacguggucaucaaggugugcgaguuccaguucugcaacgaccccuuccucggcguguacuaccacaagaacaacaagagcuggauggaguccgaguuccgggucuacagcuccgccaacaacugcacguucgaguacgugagccagcccuuccugauggaccuggagggcaagcaggggaacuucaagaaccuccgcgaguucguguucaagaacaucgacggcuacuucaagaucuacuccaagcacaccccgaucaaccugguccgggaccugccccagggguucagcgcccucgagccccugguggaccugcccaucggcaucaacaucacccgcuuccagacccuccuggcccugcaccgguccuaccucacgccgggggacagcagcuccggcuggaccgcgggcgccgccgccuacuacgugggguaccugcagccccgcaccuuccugcucaaguacaacgagaacggcaccaucacggacgcggucgacugcgcccuggacccccugagcgagaccaagugcacccucaaguccuucaccguggagaaggggaucuaccagacgagcaacuuccgggugcagcccaccgaguccaucguccgcuucccgaacaucaccaaccugugccccuucggcgagguguucaacgccacccgguucgccagcgucuacgccuggaaccgcaagcggaucuccaacugcguggcggacuacagcgugcuguacaacuccgccagcuucuccacguucaagugcuacggcgucagccccaccaagcucaacgaccugugcuucaccaacguguacgccgacuccuucgugauccgcggggacgagguccggcagaucgcccccggccagaccgggaagaucgccgacuacaacuacaagcugccggacgacuucacgggcugcgugaucgcguggaacagcaacaaccucgacuccaaggucgggggcaacuacaacuaccuguuccgccuguuccgcaagagcaaccucaagcccuucgagcgggacaucuccaccgagaucuaccaggccggcagcacccccugcaacgggguggagggcuucaacugcuacuucccccugcaguccuacggguuccagccgaccaacggcgugggguaccagcccuaccggguggucgugcugagcuucgagcuccugcacgcccccgccacggugugcggccccaagaaguccaccaaccuggucaagaacaagugcgugaacuucaacuucaacggccucaccgggaccggcgugcugaccgagagcaacaagaaguuccugccguuccagcaguucgggcgcgacaucgccgacacgaccgacgcgguccgcgacccccagacccuggagauccucgacaucacccccugcagcuucggcgggguguccgugaucacgccgggcaccaacaccagcaaccaggucgccgugcuguaccagggcgugaacugcaccgagguccccguggccauccacgccgaccagcugacgcccaccuggcggguguacuccaccggcagcaacgucuuccagacccgcgccgggugccucaucggcgcggagcacgugaacaacuccuacgagugcgacauccccaucggggccggcaucugcgccagcuaccagacgcagaccaacuccccgcggcgcgcccggagcguggcgucccagagcaucaucgccuacaccaugucccugggcgccgagaacagcgucgccuacuccaacaacagcaucgccauccccaccaacuucacgaucuccgugaccaccgagauccugcccgugagcaugaccaagacgagcgucgacugcaccauguacaucugcggggacuccaccgagugcagcaaccuccugcugcaguacggcuccuucugcacccagcucaaccgcgcgcugacggggaucgccguggagcaggacaagaacacccaggagguguucgcccaggucaagcagaucuacaagacgcccccgaucaaggacuucggcggguucaacuucagccagauccugcccgaccccuccaagcccagcaagcgguccuucaucgaggaccuccuguucaacaaggugacccuggccgacgccggcuucaucaagcaguacggcgacugccucggggacaucgcggcccgcgaccugaucugcgcccagaaguucaacggccugaccgugcucccgccccugcugaccgacgagaugaucgcccaguacaccagcgcccuccuggcggggaccaucacguccggcuggaccuucggggccggcgccgcccugcagauccccuucgcgaugcagauggccuaccgguucaacggcaucggggucacccagaacgugcucuacgagaaccagaagcugaucgccaaccaguucaacagcgccaucggcaagauccaggacucccugagcuccaccgccagcgcgcucgggaagcugcaggacguggucaaccagaacgcccaggcccugaacacgcucgugaagcagcuguccagcaacuucggcgccaucuccagcgugcugaacgacauccucucccgccuggacccgcccgaggccgaggugcagaucgaccggcugaucaccgggcgccuccagagccugcagaccuacgugacccagcagcugauccgggcggccgagauccgcgccagcgccaaccucgccgcgaccaagauguccgagugcguccugggccagagcaagcggguggacuucugcggcaagggguaccaccugauguccuucccccagagcgccccgcacggcguggucuuccuccacgugacguacguccccgcccaggagaagaacuucaccaccgcccccgcgaucugccacgacgggaaggcccacuucccccgcgagggcguguucguguccaacgggacccacugguucgucacgcagcggaacuucuacgagccgcagaucaucaccaccgacaacaccuucgugagcggcaacugcgacguggucaucggcaucgugaacaacacgguguacgacccccugcagcccgagcuggacuccuucaaggaggagcucgacaaguacuucaagaaccacaccagccccgacgucgaccugggggacaucuccggcaucaacgccagcguggugaacauccagaaggagaucgaccgccugaacgaggucgccaagaaccucaacgagucccugaucgaccugcaggagcucgggaaguacgagcaguacaucaaguggccgugguacaucuggcugggcuucaucgccggccugaucgcgaucgugauggugaccaucaugcucugcugcaugaccagcugcugcuccugccugaaggggugcugcagcugcggcuccugcugcaaguucgacgaggacgacagcgagcccguccugaagggggugaagcuccacuacacgugauaauaggcuggagccucgguggccuagcuucuugccccuugggccuccccccagccccuccuccccuuccugcacccguacccccguggucuuugaauaaagucugagugggcggcaaaaaaaaaaaaaaaaaaaaaaaaaaaaaaaaaaaaaaaaaaaaaaaaaaaaaaaaaaaaaaaaaaaaaaaaaaaaaaaaaaaaaaaaaaaaaaaaaaaaucuag

SEQ ID NO: 26605 - RNA, 4100 nt, Artificial Sequence
  SARS-CoV-2/Wuhan/WIV05/2019__EPI_ISL_402128 spike protein mRNA gc (1-1273)(K986P_V987P_D614G_I692V)
gggaaauaagagagaaaagaagaguaagaagaaauauaagaccccggcgccgccaccauguucguguuccugguccuccugccccuggugagcucccagugcgugaaccucaccacccgcacgcagcugccgcccgccuacaccaacagcuucacccggggcgucuacuaccccgacaagguguuccgcuccagcgugcugcacuccacccaggaccucuuccugcccuucuucagcaacgucacgugguuccacgccauccacguguccgggaccaacggcaccaagcgguucgacaacccggugcugcccuucaacgacggggucuacuucgcgagcaccgagaaguccaacaucauccgcggcuggaucuucgggacgacccucgacagcaagacccagucccugcugaucgugaacaacgccaccaacguggucaucaaggugugcgaguuccaguucugcaacgaccccuuccucggcguguacuaccacaagaacaacaagagcuggauggaguccgaguuccgggucuacagcuccgccaacaacugcacguucgaguacgugagccagcccuuccugauggaccuggagggcaagcaggggaacuucaagaaccuccgcgaguucguguucaagaacaucgacggcuacuucaagaucuacuccaagcacaccccgaucaaccugguccgggaccugccccagggguucagcgcccucgagccccugguggaccugcccaucggcaucaacaucacccgcuuccagacccuccuggcccugcaccgguccuaccucacgccgggggacagcagcuccggcuggaccgcgggcgccgccgccuacuacgugggguaccugcagccccgcaccuuccugcucaaguacaacgagaacggcaccaucacggacgcggucgacugcgcccuggacccccugagcgagaccaagugcacccucaaguccuucaccguggagaaggggaucuaccagacgagcaacuuccgggugcagcccaccgaguccaucguccgcuucccgaacaucaccaaccugugccccuucggcgagguguucaacgccacccgguucgccagcgucuacgccuggaaccgcaagcggaucuccaacugcguggcggacuacagcgugcuguacaacuccgccagcuucuccacguucaagugcuacggcgucagccccaccaagcucaacgaccugugcuucaccaacguguacgccgacuccuucgugauccgcggggacgagguccggcagaucgcccccggccagaccgggaagaucgccgacuacaacuacaagcugccggacgacuucacgggcugcgugaucgcguggaacagcaacaaccucgacuccaaggucgggggcaacuacaacuaccuguaccgccuguuccgcaagagcaaccucaagcccuucgagcgggacaucuccaccgagaucuaccaggccggcagcacccccugcaacgggguggagggcuucaacugcuacuucccccugcaguccuacggguuccagccgaccaacggcgugggguaccagcccuaccggguggucgugcugagcuucgagcuccugcacgcccccgccacggugugcggccccaagaaguccaccaaccuggucaagaacaagugcgugaacuucaacuucaacggccucaccgggaccggcgugcugaccgagagcaacaagaaguuccugccguuccagcaguucgggcgcgacaucgccgacacgaccgacgcgguccgcgacccccagacccuggagauccucgacaucacccccugcagcuucggcgggguguccgugaucacgccgggcaccaacaccagcaaccaggucgccgugcuguaccagggcgugaacugcaccgagguccccguggccauccacgccgaccagcugacgcccaccuggcggguguacuccaccggcagcaacgucuuccagacccgcgccgggugccucaucggcgcggagcacgugaacaacuccuacgagugcgacauccccaucggggccggcaucugcgccagcuaccagacgcagaccaacuccccgcggcgcgcccggagcguggcgucccagagcgucaucgccuacaccaugucccugggcgccgagaacagcgucgccuacuccaacaacagcaucgccauccccaccaacuucacgaucuccgugaccaccgagauccugcccgugagcaugaccaagacgagcgucgacugcaccauguacaucugcggggacuccaccgagugcagcaaccuccugcugcaguacggcuccuucugcacccagcucaaccgcgcgcugacggggaucgccguggagcaggacaagaacacccaggagguguucgcccaggucaagcagaucuacaagacgcccccgaucaaggacuucggcggguucaacuucagccagauccugcccgaccccuccaagcccagcaagcgguccuucaucgaggaccuccuguucaacaaggugacccuggccgacgccggcuucaucaagcaguacggcgacugccucggggacaucgcggcccgcgaccugaucugcgcccagaaguucaacggccugaccgugcucccgccccugcugaccgacgagaugaucgcccaguacaccagcgcccuccuggcggggaccaucacguccggcuggaccuucggggccggcgccgcccugcagauccccuucgcgaugcagauggccuaccgguucaacggcaucggggucacccagaacgugcucuacgagaaccagaagcugaucgccaaccaguucaacagcgccaucggcaagauccaggacucccugagcuccaccgccagcgcgcucgggaagcugcaggacguggucaaccagaacgcccaggcccugaacacgcucgugaagcagcuguccagcaacuucggcgccaucuccagcgugcugaacgacauccucucccgccuggacccgcccgaggccgaggugcagaucgaccggcugaucaccgggcgccuccagagccugcagaccuacgugacccagcagcugauccgggcggccgagauccgcgccagcgccaaccucgccgcgaccaagauguccgagugcguccugggccagagcaagcggguggacuucugcggcaagggguaccaccugauguccuucccccagagcgccccgcacggcguggucuuccuccacgugacguacguccccgcccaggagaagaacuucaccaccgcccccgcgaucugccacgacgggaaggcccacuucccccgcgagggcguguucguguccaacgggacccacugguucgucacgcagcggaacuucuacgagccgcagaucaucaccaccgacaacaccuucgugagcggcaacugcgacguggucaucggcaucgugaacaacacgguguacgacccccugcagcccgagcuggacuccuucaaggaggagcucgacaaguacuucaagaaccacaccagccccgacgucgaccugggggacaucuccggcaucaacgccagcguggugaacauccagaaggagaucgaccgccugaacgaggucgccaagaaccucaacgagucccugaucgaccugcaggagcucgggaaguacgagcaguacaucaaguggccgugguacaucuggcugggcuucaucgccggccugaucgcgaucgugauggugaccaucaugcucugcugcaugaccagcugcugcuccugccugaaggggugcugcagcugcggcuccugcugcaaguucgacgaggacgacagcgagcccguccugaagggggugaagcuccacuacacgugauaauaggcuggagccucgguggccuagcuucuugccccuugggccuccccccagccccuccuccccuuccugcacccguacccccguggucuuugaauaaagucugagugggcggcaaaaaaaaaaaaaaaaaaaaaaaaaaaaaaaaaaaaaaaaaaaaaaaaaaaaaaaaaaaaaaaaaaaaaaaaaaaaaaaaaaaaaaaaaaaaaaaaaaaaucuag

SEQ ID NO: 26606 - RNA, 4100 nt, Artificial Sequence
  SARS-CoV-2/Wuhan/WIV05/2019__EPI_ISL_402128 spike protein mRNA gc (1-1273)(K986P_V987P_D614G_M1229I)
gggaaauaagagagaaaagaagaguaagaagaaauauaagaccccggcgccgccaccauguucguguuccugguccuccugccccuggugagcucccagugcgugaaccucaccacccgcacgcagcugccgcccgccuacaccaacagcuucacccggggcgucuacuaccccgacaagguguuccgcuccagcgugcugcacuccacccaggaccucuuccugcccuucuucagcaacgucacgugguuccacgccauccacguguccgggaccaacggcaccaagcgguucgacaacccggugcugcccuucaacgacggggucuacuucgcgagcaccgagaaguccaacaucauccgcggcuggaucuucgggacgacccucgacagcaagacccagucccugcugaucgugaacaacgccaccaacguggucaucaaggugugcgaguuccaguucugcaacgaccccuuccucggcguguacuaccacaagaacaacaagagcuggauggaguccgaguuccgggucuacagcuccgccaacaacugcacguucgaguacgugagccagcccuuccugauggaccuggagggcaagcaggggaacuucaagaaccuccgcgaguucguguucaagaacaucgacggcuacuucaagaucuacuccaagcacaccccgaucaaccugguccgggaccugccccagggguucagcgcccucgagccccugguggaccugcccaucggcaucaacaucacccgcuuccagacccuccuggcccugcaccgguccuaccucacgccgggggacagcagcuccggcuggaccgcgggcgccgccgccuacuacgugggguaccugcagccccgcaccuuccugcucaaguacaacgagaacggcaccaucacggacgcggucgacugcgcccuggacccccugagcgagaccaagugcacccucaaguccuucaccguggagaaggggaucuaccagacgagcaacuuccgggugcagcccaccgaguccaucguccgcuucccgaacaucaccaaccugugccccuucggcgagguguucaacgccacccgguucgccagcgucuacgccuggaaccgcaagcggaucuccaacugcguggcggacuacagcgugcuguacaacuccgccagcuucuccacguucaagugcuacggcgucagccccaccaagcucaacgaccugugcuucaccaacguguacgccgacuccuucgugauccgcggggacgagguccggcagaucgcccccggccagaccgggaagaucgccgacuacaacuacaagcugccggacgacuucacgggcugcgugaucgcguggaacagcaacaaccucgacuccaaggucgggggcaacuacaacuaccuguaccgccuguuccgcaagagcaaccucaagcccuucgagcgggacaucuccaccgagaucuaccaggccggcagcacccccugcaacgggguggagggcuucaacugcuacuucccccugcaguccuacggguuccagccgaccaacggcgugggguaccagcccuaccggguggucgugcugagcuucgagcuccugcacgcccccgccacggugugcggccccaagaaguccaccaaccuggucaagaacaagugcgugaacuucaacuucaacggccucaccgggaccggcgugcugaccgagagcaacaagaaguuccugccguuccagcaguucgggcgcgacaucgccgacacgaccgacgcgguccgcgacccccagacccuggagauccucgacaucacccccugcagcuucggcgggguguccgugaucacgccgggcaccaacaccagcaaccaggucgccgugcuguaccagggcgugaacugcaccgagguccccguggccauccacgccgaccagcugacgcccaccuggcggguguacuccaccggcagcaacgucuuccagacccgcgccgggugccucaucggcgcggagcacgugaacaacuccuacgagugcgacauccccaucggggccggcaucugcgccagcuaccagacgcagaccaacuccccgcggcgcgcccggagcguggcgucccagagcaucaucgccuacaccaugucccugggcgccgagaacagcgucgccuacuccaacaacagcaucgccauccccaccaacuucacgaucuccgugaccaccgagauccugcccgugagcaugaccaagacgagcgucgacugcaccauguacaucugcggggacuccaccgagugcagcaaccuccugcugcaguacggcuccuucugcacccagcucaaccgcgcgcugacggggaucgccguggagcaggacaagaacacccaggagguguucgcccaggucaagcagaucuacaagacgcccccgaucaaggacuucggcggguucaacuucagccagauccugcccgaccccuccaagcccagcaagcgguccuucaucgaggaccuccuguucaacaaggugacccuggccgacgccggcuucaucaagcaguacggcgacugccucggggacaucgcggcccgcgaccugaucugcgcccagaaguucaacggccugaccgugcucccgccccugcugaccgacgagaugaucgcccaguacaccagcgcccuccuggcggggaccaucacguccggcuggaccuucggggccggcgccgcccugcagauccccuucgcgaugcagauggccuaccgguucaacggcaucggggucacccagaacgugcucuacgagaaccagaagcugaucgccaaccaguucaacagcgccaucggcaagauccaggacucccugagcuccaccgccagcgcgcucgggaagcugcaggacguggucaaccagaacgcccaggcccugaacacgcucgugaagcagcuguccagcaacuucggcgccaucuccagcgugcugaacgacauccucucccgccuggacccgcccgaggccgaggugcagaucgaccggcugaucaccgggcgccuccagagccugcagaccuacgugacccagcagcugauccgggcggccgagauccgcgccagcgccaaccucgccgcgaccaagauguccgagugcguccugggccagagcaagcggguggacuucugcggcaagggguaccaccugauguccuucccccagagcgccccgcacggcguggucuuccuccacgugacguacguccccgcccaggagaagaacuucaccaccgcccccgcgaucugccacgacgggaaggcccacuucccccgcgagggcguguucguguccaacgggacccacugguucgucacgcagcggaacuucuacgagccgcagaucaucaccaccgacaacaccuucgugagcggcaacugcgacguggucaucggcaucgugaacaacacgguguacgacccccugcagcccgagcuggacuccuucaaggaggagcucgacaaguacuucaagaaccacaccagccccgacgucgaccugggggacaucuccggcaucaacgccagcguggugaacauccagaaggagaucgaccgccugaacgaggucgccaagaaccucaacgagucccugaucgaccugcaggagcucgggaaguacgagcaguacaucaaguggccgugguacaucuggcugggcuucaucgccggccugaucgcgaucgugaucgugaccaucaugcucugcugcaugaccagcugcugcuccugccugaaggggugcugcagcugcggcuccugcugcaaguucgacgaggacgacagcgagcccguccugaagggggugaagcuccacuacacgugauaauaggcuggagccucgguggccuagcuucuugccccuugggccuccccccagccccuccuccccuuccugcacccguacccccguggucuuugaauaaagucugagugggcggcaaaaaaaaaaaaaaaaaaaaaaaaaaaaaaaaaaaaaaaaaaaaaaaaaaaaaaaaaaaaaaaaaaaaaaaaaaaaaaaaaaaaaaaaaaaaaaaaaaaaucuag

SEQ ID NO: 26607 - RNA, 4094 nt, Artificial Sequence
  SARS-CoV-2/Wuhan/WIV05/2019__EPI_ISL_402128 spike protein mRNA gc (1-1273)(K986P_V987P_H69del_V70del_A222V_Y453F_S477N_D614G_I692V)
gggaaauaagagagaaaagaagaguaagaagaaauauaagaccccggcgccgccaccauguucguguuccugguccuccugccccuggugagcucccagugcgugaaccucaccacccgcacgcagcugccgcccgccuacaccaacagcuucacccggggcgucuacuaccccgacaagguguuccgcuccagcgugcugcacuccacccaggaccucuuccugcccuucuucagcaacgucacgugguuccacgccaucuccgggaccaacggcaccaagcgguucgacaacccggugcugcccuucaacgacggggucuacuucgcgagcaccgagaaguccaacaucauccgcggcuggaucuucgggacgacccucgacagcaagacccagucccugcugaucgugaacaacgccaccaacguggucaucaaggugugcgaguuccaguucugcaacgaccccuuccucggcguguacuaccacaagaacaacaagagcuggauggaguccgaguuccgggucuacagcuccgccaacaacugcacguucgaguacgugagccagcccuuccugauggaccuggagggcaagcaggggaacuucaagaaccuccgcgaguucguguucaagaacaucgacggcuacuucaagaucuacuccaagcacaccccgaucaaccugguccgggaccugccccagggguucagcguccucgagccccugguggaccugcccaucggcaucaacaucacccgcuuccagacccuccuggcccugcaccgguccuaccucacgccgggggacagcagcuccggcuggaccgcgggcgccgccgccuacuacgugggguaccugcagccccgcaccuuccugcucaaguacaacgagaacggcaccaucacggacgcggucgacugcgcccuggacccccugagcgagaccaagugcacccucaaguccuucaccguggagaaggggaucuaccagacgagcaacuuccgggugcagcccaccgaguccaucguccgcuucccgaacaucaccaaccugugccccuucggcgagguguucaacgccacccgguucgccagcgucuacgccuggaaccgcaagcggaucuccaacugcguggcggacuacagcgugcuguacaacuccgccagcuucuccacguucaagugcuacggcgucagccccaccaagcucaacgaccugugcuucaccaacguguacgccgacuccuucgugauccgcggggacgagguccggcagaucgcccccggccagaccgggaagaucgccgacuacaacuacaagcugccggacgacuucacgggcugcgugaucgcguggaacagcaacaaccucgacuccaaggucgggggcaacuacaacuaccuguuccgccuguuccgcaagagcaaccucaagcccuucgagcgggacaucuccaccgagaucuaccaggccggcaacacccccugcaacgggguggagggcuucaacugcuacuucccccugcaguccuacggguuccagccgaccaacggcgugggguaccagcccuaccggguggucgugcugagcuucgagcuccugcacgcccccgccacggugugcggccccaagaaguccaccaaccuggucaagaacaagugcgugaacuucaacuucaacggccucaccgggaccggcgugcugaccgagagcaacaagaaguuccugccguuccagcaguucgggcgcgacaucgccgacacgaccgacgcgguccgcgacccccagacccuggagauccucgacaucacccccugcagcuucggcgggguguccgugaucacgccgggcaccaacaccagcaaccaggucgccgugcuguaccagggcgugaacugcaccgagguccccguggccauccacgccgaccagcugacgcccaccuggcggguguacuccaccggcagcaacgucuuccagacccgcgccgggugccucaucggcgcggagcacgugaacaacuccuacgagugcgacauccccaucggggccggcaucugcgccagcuaccagacgcagaccaacuccccgcggcgcgcccggagcguggcgucccagagcgucaucgccuacaccaugucccugggcgccgagaacagcgucgccuacuccaacaacagcaucgccauccccaccaacuucacgaucuccgugaccaccgagauccugcccgugagcaugaccaagacgagcgucgacugcaccauguacaucugcggggacuccaccgagugcagcaaccuccugcugcaguacggcuccuucugcacccagcucaaccgcgcgcugacggggaucgccguggagcaggacaagaacacccaggagguguucgcccaggucaagcagaucuacaagacgcccccgaucaaggacuucggcggguucaacuucagccagauccugcccgaccccuccaagcccagcaagcgguccuucaucgaggaccuccuguucaacaaggugacccuggccgacgccggcuucaucaagcaguacggcgacugccucggggacaucgcggcccgcgaccugaucugcgcccagaaguucaacggccugaccgugcucccgccccugcugaccgacgagaugaucgcccaguacaccagcgcccuccuggcggggaccaucacguccggcuggaccuucggggccggcgccgcccugcagauccccuucgcgaugcagauggccuaccgguucaacggcaucggggucacccagaacgugcucuacgagaaccagaagcugaucgccaaccaguucaacagcgccaucggcaagauccaggacucccugagcuccaccgccagcgcgcucgggaagcugcaggacguggucaaccagaacgcccaggcccugaacacgcucgugaagcagcuguccagcaacuucggcgccaucuccagcgugcugaacgacauccucucccgccuggacccgcccgaggccgaggugcagaucgaccggcugaucaccgggcgccuccagagccugcagaccuacgugacccagcagcugauccgggcggccgagauccgcgccagcgccaaccucgccgcgaccaagauguccgagugcguccugggccagagcaagcggguggacuucugcggcaagggguaccaccugauguccuucccccagagcgccccgcacggcguggucuuccuccacgugacguacguccccgcccaggagaagaacuucaccaccgcccccgcgaucugccacgacgggaaggcccacuucccccgcgagggcguguucguguccaacgggacccacugguucgucacgcagcggaacuucuacgagccgcagaucaucaccaccgacaacaccuucgugagcggcaacugcgacguggucaucggcaucgugaacaacacgguguacgacccccugcagcccgagcuggacuccuucaaggaggagcucgacaaguacuucaagaaccacaccagccccgacgucgaccugggggacaucuccggcaucaacgccagcguggugaacauccagaaggagaucgaccgccugaacgaggucgccaagaaccucaacgagucccugaucgaccugcaggagcucgggaaguacgagcaguacaucaaguggccgugguacaucuggcugggcuucaucgccggccugaucgcgaucgugauggugaccaucaugcucugcugcaugaccagcugcugcuccugccugaaggggugcugcagcugcggcuccugcugcaaguucgacgaggacgacagcgagcccguccugaagggggugaagcuccacuacacgugauaauaggcuggagccucgguggccuagcuucuugccccuugggccuccccccagccccuccuccccuuccugcacccguacccccguggucuuugaauaaagucugagugggcggcaaaaaaaaaaaaaaaaaaaaaaaaaaaaaaaaaaaaaaaaaaaaaaaaaaaaaaaaaaaaaaaaaaaaaaaaaaaaaaaaaaaaaaaaaaaaaaaaaaaaucuag

SEQ ID NO: 26608 - RNA, 4094 nt, Artificial Sequence
  SARS-CoV-2/Wuhan/WIV05/2019__EPI_ISL_402128 spike protein mRNA gc (1-1273)(K986P_V987P_H69del_V70del_Y453F_D614G_I692V_M1229I)
gggaaauaagagagaaaagaagaguaagaagaaauauaagaccccggcgccgccaccauguucguguuccugguccuccugccccuggugagcucccagugcgugaaccucaccacccgcacgcagcugccgcccgccuacaccaacagcuucacccggggcgucuacuaccccgacaagguguuccgcuccagcgugcugcacuccacccaggaccucuuccugcccuucuucagcaacgucacgugguuccacgccaucuccgggaccaacggcaccaagcgguucgacaacccggugcugcccuucaacgacggggucuacuucgcgagcaccgagaaguccaacaucauccgcggcuggaucuucgggacgacccucgacagcaagacccagucccugcugaucgugaacaacgccaccaacguggucaucaaggugugcgaguuccaguucugcaacgaccccuuccucggcguguacuaccacaagaacaacaagagcuggauggaguccgaguuccgggucuacagcuccgccaacaacugcacguucgaguacgugagccagcccuuccugauggaccuggagggcaagcaggggaacuucaagaaccuccgcgaguucguguucaagaacaucgacggcuacuucaagaucuacuccaagcacaccccgaucaaccugguccgggaccugccccagggguucagcgcccucgagccccugguggaccugcccaucggcaucaacaucacccgcuuccagacccuccuggcccugcaccgguccuaccucacgccgggggacagcagcuccggcuggaccgcgggcgccgccgccuacuacgugggguaccugcagccccgcaccuuccugcucaaguacaacgagaacggcaccaucacggacgcggucgacugcgcccuggacccccugagcgagaccaagugcacccucaaguccuucaccguggagaaggggaucuaccagacgagcaacuuccgggugcagcccaccgaguccaucguccgcuucccgaacaucaccaaccugugccccuucggcgagguguucaacgccacccgguucgccagcgucuacgccuggaaccgcaagcggaucuccaacugcguggcggacuacagcgugcuguacaacuccgccagcuucuccacguucaagugcuacggcgucagccccaccaagcucaacgaccugugcuucaccaacguguacgccgacuccuucgugauccgcggggacgagguccggcagaucgcccccggccagaccgggaagaucgccgacuacaacuacaagcugccggacgacuucacgggcugcgugaucgcguggaacagcaacaaccucgacuccaaggucgggggcaacuacaacuaccuguuccgccuguuccgcaagagcaaccucaagcccuucgagcgggacaucuccaccgagaucuaccaggccggcagcacccccugcaacgggguggagggcuucaacugcuacuucccccugcaguccuacggguuccagccgaccaacggcgugggguaccagcccuaccggguggucgugcugagcuucgagcuccugcacgcccccgccacggugugcggccccaagaaguccaccaaccuggucaagaacaagugcgugaacuucaacuucaacggccucaccgggaccggcgugcugaccgagagcaacaagaaguuccugccguuccagcaguucgggcgcgacaucgccgacacgaccgacgcgguccgcgacccccagacccuggagauccucgacaucacccccugcagcuucggcgggguguccgugaucacgccgggcaccaacaccagcaaccaggucgccgugcuguaccagggcgugaacugcaccgagguccccguggccauccacgccgaccagcugacgcccaccuggcggguguacuccaccggcagcaacgucuuccagacccgcgccgggugccucaucggcgcggagcacgugaacaacuccuacgagugcgacauccccaucggggccggcaucugcgccagcuaccagacgcagaccaacuccccgcggcgcgcccggagcguggcgucccagagcgugaucgccuacaccaugucccugggcgccgagaacagcgucgccuacuccaacaacagcaucgccauccccaccaacuucacgaucuccgugaccaccgagauccugcccgugagcaugaccaagacgagcgucgacugcaccauguacaucugcggggacuccaccgagugcagcaaccuccugcugcaguacggcuccuucugcacccagcucaaccgcgcgcugacggggaucgccguggagcaggacaagaacacccaggagguguucgcccaggucaagcagaucuacaagacgcccccgaucaaggacuucggcggguucaacuucagccagauccugcccgaccccuccaagcccagcaagcgguccuucaucgaggaccuccuguucaacaaggugacccuggccgacgccggcuucaucaagcaguacggcgacugccucggggacaucgcggcccgcgaccugaucugcgcccagaaguucaacggccugaccgugcucccgccccugcugaccgacgagaugaucgcccaguacaccagcgcccuccuggcggggaccaucacguccggcuggaccuucggggccggcgccgcccugcagauccccuucgcgaugcagauggccuaccgguucaacggcaucggggucacccagaacgugcucuacgagaaccagaagcugaucgccaaccaguucaacagcgccaucggcaagauccaggacucccugagcuccaccgccagcgcgcucgggaagcugcaggacguggucaaccagaacgcccaggcccugaacacgcucgugaagcagcuguccagcaacuucggcgccaucuccagcgugcugaacgacauccucucccgccuggacccgcccgaggccgaggugcagaucgaccggcugaucaccgggcgccuccagagccugcagaccuacgugacccagcagcugauccgggcggccgagauccgcgccagcgccaaccucgccgcgaccaagauguccgagugcguccugggccagagcaagcggguggacuucugcggcaagggguaccaccugauguccuucccccagagcgccccgcacggcguggucuuccuccacgugacguacguccccgcccaggagaagaacuucaccaccgcccccgcgaucugccacgacgggaaggcccacuucccccgcgagggcguguucguguccaacgggacccacugguucgucacgcagcggaacuucuacgagccgcagaucaucaccaccgacaacaccuucgugagcggcaacugcgacguggucaucggcaucgugaacaacacgguguacgacccccugcagcccgagcuggacuccuucaaggaggagcucgacaaguacuucaagaaccacaccagccccgacgucgaccugggggacaucuccggcaucaacgccagcguggugaacauccagaaggagaucgaccgccugaacgaggucgccaagaaccucaacgagucccugaucgaccugcaggagcucgggaaguacgagcaguacaucaaguggccgugguacaucuggcugggcuucaucgccggccugaucgcgaucgugaucgugaccaucaugcucugcugcaugaccagcugcugcuccugccugaaggggugcugcagcugcggcuccugcugcaaguucgacgaggacgacagcgagcccguccugaagggggugaagcuccacuacacgugauaauaggcuggagccucgguggccuagcuucuugccccuugggccuccccccagccccuccuccccuuccugcacccguacccccguggucuuugaauaaagucugagugggcggcaaaaaaaaaaaaaaaaaaaaaaaaaaaaaaaaaaaaaaaaaaaaaaaaaaaaaaaaaaaaaaaaaaaaaaaaaaaaaaaaaaaaaaaaaaaaaaaaaaaaucuag

SEQ ID NO: 26609 - RNA, 4091 nt, Artificial Sequence
  SARS-CoV-2/Wuhan/WIV05/2019__EPI_ISL_402128 spike protein mRNA gc (1-1273)(K986P_V987P_K986P_V987P_H69del_V70del_Y144del_N501Y_A570 D_D614G_P681H_T716I_S982A_D1118H)
gggaaauaagagagaaaagaagaguaagaagaaauauaagaccccggcgccgccaccauguucguguuccugguccuccugccccuggugagcucccagugcgugaaccucaccacccgcacgcagcugccgcccgccuacaccaacagcuucacccggggcgucuacuaccccgacaagguguuccgcuccagcgugcugcacuccacccaggaccucuuccugcccuucuucagcaacgucacgugguuccacgccaucuccgggaccaacggcaccaagcgguucgacaacccggugcugcccuucaacgacggggucuacuucgcgagcaccgagaaguccaacaucauccgcggcuggaucuucgggacgacccucgacagcaagacccagucccugcugaucgugaacaacgccaccaacguggucaucaaggugugcgaguuccaguucugcaacgaccccuuccucggcguguaccacaagaacaacaagagcuggauggaguccgaguuccgggucuacagcuccgccaacaacugcacguucgaguacgugagccagcccuuccugauggaccuggagggcaagcaggggaacuucaagaaccuccgcgaguucguguucaagaacaucgacggcuacuucaagaucuacuccaagcacaccccgaucaaccugguccgggaccugccccagggguucagcgcccucgagccccugguggaccugcccaucggcaucaacaucacccgcuuccagacccuccuggcccugcaccgguccuaccucacgccgggggacagcagcuccggcuggaccgcgggcgccgccgccuacuacgugggguaccugcagccccgcaccuuccugcucaaguacaacgagaacggcaccaucacggacgcggucgacugcgcccuggacccccugagcgagaccaagugcacccucaaguccuucaccguggagaaggggaucuaccagacgagcaacuuccgggugcagcccaccgaguccaucguccgcuucccgaacaucaccaaccugugccccuucggcgagguguucaacgccacccgguucgccagcgucuacgccuggaaccgcaagcggaucuccaacugcguggcggacuacagcgugcuguacaacuccgccagcuucuccacguucaagugcuacggcgucagccccaccaagcucaacgaccugugcuucaccaacguguacgccgacuccuucgugauccgcggggacgagguccggcagaucgcccccggccagaccgggaagaucgccgacuacaacuacaagcugccggacgacuucacgggcugcgugaucgcguggaacagcaacaaccucgacuccaaggucgggggcaacuacaacuaccuguaccgccuguuccgcaagagcaaccucaagcccuucgagcgggacaucuccaccgagaucuaccaggccggcagcacccccugcaacgggguggagggcuucaacugcuacuucccccugcaguccuacggguuccagccgaccuacggcgugggguaccagcccuaccggguggucgugcugagcuucgagcuccugcacgcccccgccacggugugcggccccaagaaguccaccaaccuggucaagaacaagugcgugaacuucaacuucaacggccucaccgggaccggcgugcugaccgagagcaacaagaaguuccugccguuccagcaguucgggcgcgacaucgacgacacgaccgacgcgguccgcgacccccagacccuggagauccucgacaucacccccugcagcuucggcgggguguccgugaucacgccgggcaccaacaccagcaaccaggucgccgugcuguaccagggcgugaacugcaccgagguccccguggccauccacgccgaccagcugacgcccaccuggcggguguacuccaccggcagcaacgucuuccagacccgcgccgggugccucaucggcgcggagcacgugaacaacuccuacgagugcgacauccccaucggggccggcaucugcgccagcuaccagacgcagaccaacucccaccggcgcgcccggagcguggcgucccagagcaucaucgccuacaccaugucccugggcgccgagaacagcgucgccuacuccaacaacagcaucgccauccccaucaacuucacgaucuccgugaccaccgagauccugcccgugagcaugaccaagacgagcgucgacugcaccauguacaucugcggggacuccaccgagugcagcaaccuccugcugcaguacggcuccuucugcacccagcucaaccgcgcgcugacggggaucgccguggagcaggacaagaacacccaggagguguucgcccaggucaagcagaucuacaagacgcccccgaucaaggacuucggcggguucaacuucagccagauccugcccgaccccuccaagcccagcaagcgguccuucaucgaggaccuccuguucaacaaggugacccuggccgacgccggcuucaucaagcaguacggcgacugccucggggacaucgcggcccgcgaccugaucugcgcccagaaguucaacggccugaccgugcucccgccccugcugaccgacgagaugaucgcccaguacaccagcgcccuccuggcggggaccaucacguccggcuggaccuucggggccggcgccgcccugcagauccccuucgcgaugcagauggccuaccgguucaacggcaucggggucacccagaacgugcucuacgagaaccagaagcugaucgccaaccaguucaacagcgccaucggcaagauccaggacucccugagcuccaccgccagcgcgcucgggaagcugcaggacguggucaaccagaacgcccaggcccugaacacgcucgugaagcagcuguccagcaacuucggcgccaucuccagcgugcugaacgacauccucgcccgccuggacccgcccgaggccgaggugcagaucgaccggcugaucaccgggcgccuccagagccugcagaccuacgugacccagcagcugauccgggcggccgagauccgcgccagcgccaaccucgccgcgaccaagauguccgagugcguccugggccagagcaagcggguggacuucugcggcaagggguaccaccugauguccuucccccagagcgccccgcacggcguggucuuccuccacgugacguacguccccgcccaggagaagaacuucaccaccgcccccgcgaucugccacgacgggaaggcccacuucccccgcgagggcguguucguguccaacgggacccacugguucgucacgcagcggaacuucuacgagccgcagaucaucaccacccacaacaccuucgugagcggcaacugcgacguggucaucggcaucgugaacaacacgguguacgacccccugcagcccgagcuggacuccuucaaggaggagcucgacaaguacuucaagaaccacaccagccccgacgucgaccugggggacaucuccggcaucaacgccagcguggugaacauccagaaggagaucgaccgccugaacgaggucgccaagaaccucaacgagucccugaucgaccugcaggagcucgggaaguacgagcaguacaucaaguggccgugguacaucuggcugggcuucaucgccggccugaucgcgaucgugauggugaccaucaugcucugcugcaugaccagcugcugcuccugccugaaggggugcugcagcugcggcuccugcugcaaguucgacgaggacgacagcgagcccguccugaagggggugaagcuccacuacacgugauaauaggcuggagccucgguggccuagcuucuugccccuugggccuccccccagccccuccuccccuuccugcacccguacccccguggucuuugaauaaagucugagugggcggcaaaaaaaaaaaaaaaaaaaaaaaaaaaaaaaaaaaaaaaaaaaaaaaaaaaaaaaaaaaaaaaaaaaaaaaaaaaaaaaaaaaaaaaaaaaaaaaaaaaaucuag

SEQ ID NO: 26610 - RNA, 4100 nt, Artificial Sequence
  SARS-CoV-2/Wuhan/WIV05/2019__EPI_ISL_402128 spike protein mRNA gc (1-1273)(K986P_V987P_K986P_V987P_K417N_E484K_N501Y_D614G)
gggaaauaagagagaaaagaagaguaagaagaaauauaagaccccggcgccgccaccauguucguguuccugguccuccugccccuggugagcucccagugcgugaaccucaccacccgcacgcagcugccgcccgccuacaccaacagcuucacccggggcgucuacuaccccgacaagguguuccgcuccagcgugcugcacuccacccaggaccucuuccugcccuucuucagcaacgucacgugguuccacgccauccacguguccgggaccaacggcaccaagcgguucgacaacccggugcugcccuucaacgacggggucuacuucgcgagcaccgagaaguccaacaucauccgcggcuggaucuucgggacgacccucgacagcaagacccagucccugcugaucgugaacaacgccaccaacguggucaucaaggugugcgaguuccaguucugcaacgaccccuuccucggcguguacuaccacaagaacaacaagagcuggauggaguccgaguuccgggucuacagcuccgccaacaacugcacguucgaguacgugagccagcccuuccugauggaccuggagggcaagcaggggaacuucaagaaccuccgcgaguucguguucaagaacaucgacggcuacuucaagaucuacuccaagcacaccccgaucaaccugguccgggaccugccccagggguucagcgcccucgagccccugguggaccugcccaucggcaucaacaucacccgcuuccagacccuccuggcccugcaccgguccuaccucacgccgggggacagcagcuccggcuggaccgcgggcgccgccgccuacuacgugggguaccugcagccccgcaccuuccugcucaaguacaacgagaacggcaccaucacggacgcggucgacugcgcccuggacccccugagcgagaccaagugcacccucaaguccuucaccguggagaaggggaucuaccagacgagcaacuuccgggugcagcccaccgaguccaucguccgcuucccgaacaucaccaaccugugccccuucggcgagguguucaacgccacccgguucgccagcgucuacgccuggaaccgcaagcggaucuccaacugcguggcggacuacagcgugcuguacaacuccgccagcuucuccacguucaagugcuacggcgucagccccaccaagcucaacgaccugugcuucaccaacguguacgccgacuccuucgugauccgcggggacgagguccggcagaucgcccccggccagaccgggaacaucgccgacuacaacuacaagcugccggacgacuucacgggcugcgugaucgcguggaacagcaacaaccucgacuccaaggucgggggcaacuacaacuaccuguaccgccuguuccgcaagagcaaccucaagcccuucgagcgggacaucuccaccgagaucuaccaggccggcagcacccccugcaacggggugaagggcuucaacugcuacuucccccugcaguccuacggguuccagccgaccuacggcgugggguaccagcccuaccggguggucgugcugagcuucgagcuccugcacgcccccgccacggugugcggccccaagaaguccaccaaccuggucaagaacaagugcgugaacuucaacuucaacggccucaccgggaccggcgugcugaccgagagcaacaagaaguuccugccguuccagcaguucgggcgcgacaucgccgacacgaccgacgcgguccgcgacccccagacccuggagauccucgacaucacccccugcagcuucggcgggguguccgugaucacgccgggcaccaacaccagcaaccaggucgccgugcuguaccagggcgugaacugcaccgagguccccguggccauccacgccgaccagcugacgcccaccuggcggguguacuccaccggcagcaacgucuuccagacccgcgccgggugccucaucggcgcggagcacgugaacaacuccuacgagugcgacauccccaucggggccggcaucugcgccagcuaccagacgcagaccaacuccccgcggcgcgcccggagcguggcgucccagagcaucaucgccuacaccaugucccugggcgccgagaacagcgucgccuacuccaacaacagcaucgccauccccaccaacuucacgaucuccgugaccaccgagauccugcccgugagcaugaccaagacgagcgucgacugcaccauguacaucugcggggacuccaccgagugcagcaaccuccugcugcaguacggcuccuucugcacccagcucaaccgcgcgcugacggggaucgccguggagcaggacaagaacacccaggagguguucgcccaggucaagcagaucuacaagacgcccccgaucaaggacuucggcggguucaacuucagccagauccugcccgaccccuccaagcccagcaagcgguccuucaucgaggaccuccuguucaacaaggugacccuggccgacgccggcuucaucaagcaguacggcgacugccucggggacaucgcggcccgcgaccugaucugcgcccagaaguucaacggccugaccgugcucccgccccugcugaccgacgagaugaucgcccaguacaccagcgcccuccuggcggggaccaucacguccggcuggaccuucggggccggcgccgcccugcagauccccuucgcgaugcagauggccuaccgguucaacggcaucggggucacccagaacgugcucuacgagaaccagaagcugaucgccaaccaguucaacagcgccaucggcaagauccaggacucccugagcuccaccgccagcgcgcucgggaagcugcaggacguggucaaccagaacgcccaggcccugaacacgcucgugaagcagcuguccagcaacuucggcgccaucuccagcgugcugaacgacauccucucccgccuggacccgcccgaggccgaggugcagaucgaccggcugaucaccgggcgccuccagagccugcagaccuacgugacccagcagcugauccgggcggccgagauccgcgccagcgccaaccucgccgcgaccaagauguccgagugcguccugggccagagcaagcggguggacuucugcggcaagggguaccaccugauguccuucccccagagcgccccgcacggcguggucuuccuccacgugacguacguccccgcccaggagaagaacuucaccaccgcccccgcgaucugccacgacgggaaggcccacuucccccgcgagggcguguucguguccaacgggacccacugguucgucacgcagcggaacuucuacgagccgcagaucaucaccaccgacaacaccuucgugagcggcaacugcgacguggucaucggcaucgugaacaacacgguguacgacccccugcagcccgagcuggacuccuucaaggaggagcucgacaaguacuucaagaaccacaccagccccgacgucgaccugggggacaucuccggcaucaacgccagcguggugaacauccagaaggagaucgaccgccugaacgaggucgccaagaaccucaacgagucccugaucgaccugcaggagcucgggaaguacgagcaguacaucaaguggccgugguacaucuggcugggcuucaucgccggccugaucgcgaucgugauggugaccaucaugcucugcugcaugaccagcugcugcuccugccugaaggggugcugcagcugcggcuccugcugcaaguucgacgaggacgacagcgagcccguccugaagggggugaagcuccacuacacgugauaauaggcuggagccucgguggccuagcuucuugccccuugggccuccccccagccccuccuccccuuccugcacccguacccccguggucuuugaauaaagucugagugggcggcaaaaaaaaaaaaaaaaaaaaaaaaaaaaaaaaaaaaaaaaaaaaaaaaaaaaaaaaaaaaaaaaaaaaaaaaaaaaaaaaaaaaaaaaaaaaaaaaaaaaucuag

SEQ ID NO: 26611 - RNA, 4091 nt, Artificial Sequence
  SARS-CoV-2/Wuhan/WIV05/2019__EPI_ISL_402128 spike protein mRNA gc (1-1273)(K986P_V987P_K986P_V987P_L18F_D80A_D215G_L242del_A243del_ L244del_R246I_K417N_E484K_N501Y_D614G_A701V)
gggaaauaagagagaaaagaagaguaagaagaaauauaagaccccggcgccgccaccauguucguguuccugguccuccugccccuggugagcucccagugcgugaacuucaccacccgcacgcagcugccgcccgccuacaccaacagcuucacccggggcgucuacuaccccgacaagguguuccgcuccagcgugcugcacuccacccaggaccucuuccugcccuucuucagcaacgucacgugguuccacgccauccacguguccgggaccaacggcaccaagcgguucgccaacccggugcugcccuucaacgacggggucuacuucgcgagcaccgagaaguccaacaucauccgcggcuggaucuucgggacgacccucgacagcaagacccagucccugcugaucgugaacaacgccaccaacguggucaucaaggugugcgaguuccaguucugcaacgaccccuuccucggcguguacuaccacaagaacaacaagagcuggauggaguccgaguuccgggucuacagcuccgccaacaacugcacguucgaguacgugagccagcccuuccugauggaccuggagggcaagcaggggaacuucaagaaccuccgcgaguucguguucaagaacaucgacggcuacuucaagaucuacuccaagcacaccccgaucaaccugguccggggccugccccagggguucagcgcccucgagccccugguggaccugcccaucggcaucaacaucacccgcuuccagacccuccacaucuccuaccucacgccgggggacagcagcuccggcuggaccgcgggcgccgccgccuacuacgugggguaccugcagccccgcaccuuccugcucaaguacaacgagaacggcaccaucacggacgcggucgacugcgcccuggacccccugagcgagaccaagugcacccucaaguccuucaccguggagaaggggaucuaccagacgagcaacuuccgggugcagcccaccgaguccaucguccgcuucccgaacaucaccaaccugugccccuucggcgagguguucaacgccacccgguucgccagcgucuacgccuggaaccgcaagcggaucuccaacugcguggcggacuacagcgugcuguacaacuccgccagcuucuccacguucaagugcuacggcgucagccccaccaagcucaacgaccugugcuucaccaacguguacgccgacuccuucgugauccgcggggacgagguccggcagaucgcccccggccagaccgggaacaucgccgacuacaacuacaagcugccggacgacuucacgggcugcgugaucgcguggaacagcaacaaccucgacuccaaggucgggggcaacuacaacuaccuguaccgccuguuccgcaagagcaaccucaagcccuucgagcgggacaucuccaccgagaucuaccaggccggcagcacccccugcaacggggugaagggcuucaacugcuacuucccccugcaguccuacggguuccagccgaccuacggcgugggguaccagcccuaccggguggucgugcugagcuucgagcuccugcacgcccccgccacggugugcggccccaagaaguccaccaaccuggucaagaacaagugcgugaacuucaacuucaacggccucaccgggaccggcgugcugaccgagagcaacaagaaguuccugccguuccagcaguucgggcgcgacaucgccgacacgaccgacgcgguccgcgacccccagacccuggagauccucgacaucacccccugcagcuucggcgggguguccgugaucacgccgggcaccaacaccagcaaccaggucgccgugcuguaccagggcgugaacugcaccgagguccccguggccauccacgccgaccagcugacgcccaccuggcggguguacuccaccggcagcaacgucuuccagacccgcgccgggugccucaucggcgcggagcacgugaacaacuccuacgagugcgacauccccaucggggccggcaucugcgccagcuaccagacgcagaccaacuccccgcggcgcgcccggagcguggcgucccagagcaucaucgccuacaccaugucccugggcguggagaacagcgucgccuacuccaacaacagcaucgccauccccaccaacuucacgaucuccgugaccaccgagauccugcccgugagcaugaccaagacgagcgucgacugcaccauguacaucugcggggacuccaccgagugcagcaaccuccugcugcaguacggcuccuucugcacccagcucaaccgcgcgcugacggggaucgccguggagcaggacaagaacacccaggagguguucgcccaggucaagcagaucuacaagacgcccccgaucaaggacuucggcggguucaacuucagccagauccugcccgaccccuccaagcccagcaagcgguccuucaucgaggaccuccuguucaacaaggugacccuggccgacgccggcuucaucaagcaguacggcgacugccucggggacaucgcggcccgcgaccugaucugcgcccagaaguucaacggccugaccgugcucccgccccugcugaccgacgagaugaucgcccaguacaccagcgcccuccuggcggggaccaucacguccggcuggaccuucggggccggcgccgcccugcagauccccuucgcgaugcagauggccuaccgguucaacggcaucggggucacccagaacgugcucuacgagaaccagaagcugaucgccaaccaguucaacagcgccaucggcaagauccaggacucccugagcuccaccgccagcgcgcucgggaagcugcaggacguggucaaccagaacgcccaggcccugaacacgcucgugaagcagcuguccagcaacuucggcgccaucuccagcgugcugaacgacauccucucccgccuggacccgcccgaggccgaggugcagaucgaccggcugaucaccgggcgccuccagagccugcagaccuacgugacccagcagcugauccgggcggccgagauccgcgccagcgccaaccucgccgcgaccaagauguccgagugcguccugggccagagcaagcggguggacuucugcggcaagggguaccaccugauguccuucccccagagcgccccgcacggcguggucuuccuccacgugacguacguccccgcccaggagaagaacuucaccaccgcccccgcgaucugccacgacgggaaggcccacuucccccgcgagggcguguucguguccaacgggacccacugguucgucacgcagcggaacuucuacgagccgcagaucaucaccaccgacaacaccuucgugagcggcaacugcgacguggucaucggcaucgugaacaacacgguguacgacccccugcagcccgagcuggacuccuucaaggaggagcucgacaaguacuucaagaaccacaccagccccgacgucgaccugggggacaucuccggcaucaacgccagcguggugaacauccagaaggagaucgaccgccugaacgaggucgccaagaaccucaacgagucccugaucgaccugcaggagcucgggaaguacgagcaguacaucaaguggccgugguacaucuggcugggcuucaucgccggccugaucgcgaucgugauggugaccaucaugcucugcugcaugaccagcugcugcuccugccugaaggggugcugcagcugcggcuccugcugcaaguucgacgaggacgacagcgagcccguccugaagggggugaagcuccacuacacgugauaauaggcuggagccucgguggccuagcuucuugccccuugggccuccccccagccccuccuccccuuccugcacccguacccccguggucuuugaauaaagucugagugggcggcaaaaaaaaaaaaaaaaaaaaaaaaaaaaaaaaaaaaaaaaaaaaaaaaaaaaaaaaaaaaaaaaaaaaaaaaaaaaaaaaaaaaaaaaaaaaaaaaaaaaucuag

SEQ ID NO: 26612 - RNA, 4100 nt, Artificial Sequence
  SARS-CoV-2/Wuhan/WIV05/2019__EPI_ISL_402128 spike protein mRNA gc (1-1273)(K986P_V987P_K986P_V987P_E484K_D614G)
gggaaauaagagagaaaagaagaguaagaagaaauauaagaccccggcgccgccaccauguucguguuccugguccuccugccccuggugagcucccagugcgugaaccucaccacccgcacgcagcugccgcccgccuacaccaacagcuucacccggggcgucuacuaccccgacaagguguuccgcuccagcgugcugcacuccacccaggaccucuuccugcccuucuucagcaacgucacgugguuccacgccauccacguguccgggaccaacggcaccaagcgguucgacaacccggugcugcccuucaacgacggggucuacuucgcgagcaccgagaaguccaacaucauccgcggcuggaucuucgggacgacccucgacagcaagacccagucccugcugaucgugaacaacgccaccaacguggucaucaaggugugcgaguuccaguucugcaacgaccccuuccucggcguguacuaccacaagaacaacaagagcuggauggaguccgaguuccgggucuacagcuccgccaacaacugcacguucgaguacgugagccagcccuuccugauggaccuggagggcaagcaggggaacuucaagaaccuccgcgaguucguguucaagaacaucgacggcuacuucaagaucuacuccaagcacaccccgaucaaccugguccgggaccugccccagggguucagcgcccucgagccccugguggaccugcccaucggcaucaacaucacccgcuuccagacccuccuggcccugcaccgguccuaccucacgccgggggacagcagcuccggcuggaccgcgggcgccgccgccuacuacgugggguaccugcagccccgcaccuuccugcucaaguacaacgagaacggcaccaucacggacgcggucgacugcgcccuggacccccugagcgagaccaagugcacccucaaguccuucaccguggagaaggggaucuaccagacgagcaacuuccgggugcagcccaccgaguccaucguccgcuucccgaacaucaccaaccugugccccuucggcgagguguucaacgccacccgguucgccagcgucuacgccuggaaccgcaagcggaucuccaacugcguggcggacuacagcgugcuguacaacuccgccagcuucuccacguucaagugcuacggcgucagccccaccaagcucaacgaccugugcuucaccaacguguacgccgacuccuucgugauccgcggggacgagguccggcagaucgcccccggccagaccgggaagaucgccgacuacaacuacaagcugccggacgacuucacgggcugcgugaucgcguggaacagcaacaaccucgacuccaaggucgggggcaacuacaacuaccuguaccgccuguuccgcaagagcaaccucaagcccuucgagcgggacaucuccaccgagaucuaccaggccggcagcacccccugcaacggggugaagggcuucaacugcuacuucccccugcaguccuacggguuccagccgaccaacggcgugggguaccagcccuaccggguggucgugcugagcuucgagcuccugcacgcccccgccacggugugcggccccaagaaguccaccaaccuggucaagaacaagugcgugaacuucaacuucaacggccucaccgggaccggcgugcugaccgagagcaacaagaaguuccugccguuccagcaguucgggcgcgacaucgccgacacgaccgacgcgguccgcgacccccagacccuggagauccucgacaucacccccugcagcuucggcgggguguccgugaucacgccgggcaccaacaccagcaaccaggucgccgugcuguaccagggcgugaacugcaccgagguccccguggccauccacgccgaccagcugacgcccaccuggcggguguacuccaccggcagcaacgucuuccagacccgcgccgggugccucaucggcgcggagcacgugaacaacuccuacgagugcgacauccccaucggggccggcaucugcgccagcuaccagacgcagaccaacuccccgcggcgcgcccggagcguggcgucccagagcaucaucgccuacaccaugucccugggcgccgagaacagcgucgccuacuccaacaacagcaucgccauccccaccaacuucacgaucuccgugaccaccgagauccugcccgugagcaugaccaagacgagcgucgacugcaccauguacaucugcggggacuccaccgagugcagcaaccuccugcugcaguacggcuccuucugcacccagcucaaccgcgcgcugacggggaucgccguggagcaggacaagaacacccaggagguguucgcccaggucaagcagaucuacaagacgcccccgaucaaggacuucggcggguucaacuucagccagauccugcccgaccccuccaagcccagcaagcgguccuucaucgaggaccuccuguucaacaaggugacccuggccgacgccggcuucaucaagcaguacggcgacugccucggggacaucgcggcccgcgaccugaucugcgcccagaaguucaacggccugaccgugcucccgccccugcugaccgacgagaugaucgcccaguacaccagcgcccuccuggcggggaccaucacguccggcuggaccuucggggccggcgccgcccugcagauccccuucgcgaugcagauggccuaccgguucaacggcaucggggucacccagaacgugcucuacgagaaccagaagcugaucgccaaccaguucaacagcgccaucggcaagauccaggacucccugagcuccaccgccagcgcgcucgggaagcugcaggacguggucaaccagaacgcccaggcccugaacacgcucgugaagcagcuguccagcaacuucggcgccaucuccagcgugcugaacgacauccucucccgccuggacccgcccgaggccgaggugcagaucgaccggcugaucaccgggcgccuccagagccugcagaccuacgugacccagcagcugauccgggcggccgagauccgcgccagcgccaaccucgccgcgaccaagauguccgagugcguccugggccagagcaagcggguggacuucugcggcaagggguaccaccugauguccuucccccagagcgccccgcacggcguggucuuccuccacgugacguacguccccgcccaggagaagaacuucaccaccgcccccgcgaucugccacgacgggaaggcccacuucccccgcgagggcguguucguguccaacgggacccacugguucgucacgcagcggaacuucuacgagccgcagaucaucaccaccgacaacaccuucgugagcggcaacugcgacguggucaucggcaucgugaacaacacgguguacgacccccugcagcccgagcuggacuccuucaaggaggagcucgacaaguacuucaagaaccacaccagccccgacgucgaccugggggacaucuccggcaucaacgccagcguggugaacauccagaaggagaucgaccgccugaacgaggucgccaagaaccucaacgagucccugaucgaccugcaggagcucgggaaguacgagcaguacaucaaguggccgugguacaucuggcugggcuucaucgccggccugaucgcgaucgugauggugaccaucaugcucugcugcaugaccagcugcugcuccugccugaaggggugcugcagcugcggcuccugcugcaaguucgacgaggacgacagcgagcccguccugaagggggugaagcuccacuacacgugauaauaggcuggagccucgguggccuagcuucuugccccuugggccuccccccagccccuccuccccuuccugcacccguacccccguggucuuugaauaaagucugagugggcggcaaaaaaaaaaaaaaaaaaaaaaaaaaaaaaaaaaaaaaaaaaaaaaaaaaaaaaaaaaaaaaaaaaaaaaaaaaaaaaaaaaaaaaaaaaaaaaaaaaaaucuag

SEQ ID NO: 26613 - RNA, 4100 nt, Artificial Sequence
  SARS-CoV-2/Wuhan/WIV05/2019__EPI_ISL_402128 spike protein mRNA gc (1-1273)(K986P_V987P_K986P_V987P_L18F_T20N_P26S_D138Y_R190S_K417T _E484K_N501Y_D614G_H655Y_T1027I)
gggaaauaagagagaaaagaagaguaagaagaaauauaagaccccggcgccgccaccauguucguguuccugguccuccugccccuggugagcucccagugcgugaacuucaccaaccgcacgcagcugccgagcgccuacaccaacagcuucacccggggcgucuacuaccccgacaagguguuccgcuccagcgugcugcacuccacccaggaccucuuccugcccuucuucagcaacgucacgugguuccacgccauccacguguccgggaccaacggcaccaagcgguucgacaacccggugcugcccuucaacgacggggucuacuucgcgagcaccgagaaguccaacaucauccgcggcuggaucuucgggacgacccucgacagcaagacccagucccugcugaucgugaacaacgccaccaacguggucaucaaggugugcgaguuccaguucugcaacuaccccuuccucggcguguacuaccacaagaacaacaagagcuggauggaguccgaguuccgggucuacagcuccgccaacaacugcacguucgaguacgugagccagcccuuccugauggaccuggagggcaagcaggggaacuucaagaaccucagcgaguucguguucaagaacaucgacggcuacuucaagaucuacuccaagcacaccccgaucaaccugguccgggaccugccccagggguucagcgcccucgagccccugguggaccugcccaucggcaucaacaucacccgcuuccagacccuccuggcccugcaccgguccuaccucacgccgggggacagcagcuccggcuggaccgcgggcgccgccgccuacuacgugggguaccugcagccccgcaccuuccugcucaaguacaacgagaacggcaccaucacggacgcggucgacugcgcccuggacccccugagcgagaccaagugcacccucaaguccuucaccguggagaaggggaucuaccagacgagcaacuuccgggugcagcccaccgaguccaucguccgcuucccgaacaucaccaaccugugccccuucggcgagguguucaacgccacccgguucgccagcgucuacgccuggaaccgcaagcggaucuccaacugcguggcggacuacagcgugcuguacaacuccgccagcuucuccacguucaagugcuacggcgucagccccaccaagcucaacgaccugugcuucaccaacguguacgccgacuccuucgugauccgcggggacgagguccggcagaucgcccccggccagaccgggaccaucgccgacuacaacuacaagcugccggacgacuucacgggcugcgugaucgcguggaacagcaacaaccucgacuccaaggucgggggcaacuacaacuaccuguaccgccuguuccgcaagagcaaccucaagcccuucgagcgggacaucuccaccgagaucuaccaggccggcagcacccccugcaacggggugaagggcuucaacugcuacuucccccugcaguccuacggguuccagccgaccuacggcgugggguaccagcccuaccggguggucgugcugagcuucgagcuccugcacgcccccgccacggugugcggccccaagaaguccaccaaccuggucaagaacaagugcgugaacuucaacuucaacggccucaccgggaccggcgugcugaccgagagcaacaagaaguuccugccguuccagcaguucgggcgcgacaucgccgacacgaccgacgcgguccgcgacccccagacccuggagauccucgacaucacccccugcagcuucggcgggguguccgugaucacgccgggcaccaacaccagcaaccaggucgccgugcuguaccagggcgugaacugcaccgagguccccguggccauccacgccgaccagcugacgcccaccuggcggguguacuccaccggcagcaacgucuuccagacccgcgccgggugccucaucggcgcggaguacgugaacaacuccuacgagugcgacauccccaucggggccggcaucugcgccagcuaccagacgcagaccaacuccccgcggcgcgcccggagcguggcgucccagagcaucaucgccuacaccaugucccugggcgccgagaacagcgucgccuacuccaacaacagcaucgccauccccaccaacuucacgaucuccgugaccaccgagauccugcccgugagcaugaccaagacgagcgucgacugcaccauguacaucugcggggacuccaccgagugcagcaaccuccugcugcaguacggcuccuucugcacccagcucaaccgcgcgcugacggggaucgccguggagcaggacaagaacacccaggagguguucgcccaggucaagcagaucuacaagacgcccccgaucaaggacuucggcggguucaacuucagccagauccugcccgaccccuccaagcccagcaagcgguccuucaucgaggaccuccuguucaacaaggugacccuggccgacgccggcuucaucaagcaguacggcgacugccucggggacaucgcggcccgcgaccugaucugcgcccagaaguucaacggccugaccgugcucccgccccugcugaccgacgagaugaucgcccaguacaccagcgcccuccuggcggggaccaucacguccggcuggaccuucggggccggcgccgcccugcagauccccuucgcgaugcagauggccuaccgguucaacggcaucggggucacccagaacgugcucuacgagaaccagaagcugaucgccaaccaguucaacagcgccaucggcaagauccaggacucccugagcuccaccgccagcgcgcucgggaagcugcaggacguggucaaccagaacgcccaggcccugaacacgcucgugaagcagcuguccagcaacuucggcgccaucuccagcgugcugaacgacauccucucccgccuggacccgcccgaggccgaggugcagaucgaccggcugaucaccgggcgccuccagagccugcagaccuacgugacccagcagcugauccgggcggccgagauccgcgccagcgccaaccucgccgcgaucaagauguccgagugcguccugggccagagcaagcggguggacuucugcggcaagggguaccaccugauguccuucccccagagcgccccgcacggcguggucuuccuccacgugacguacguccccgcccaggagaagaacuucaccaccgcccccgcgaucugccacgacgggaaggcccacuucccccgcgagggcguguucguguccaacgggacccacugguucgucacgcagcggaacuucuacgagccgcagaucaucaccaccgacaacaccuucgugagcggcaacugcgacguggucaucggcaucgugaacaacacgguguacgacccccugcagcccgagcuggacuccuucaaggaggagcucgacaaguacuucaagaaccacaccagccccgacgucgaccugggggacaucuccggcaucaacgccagcguggugaacauccagaaggagaucgaccgccugaacgaggucgccaagaaccucaacgagucccugaucgaccugcaggagcucgggaaguacgagcaguacaucaaguggccgugguacaucuggcugggcuucaucgccggccugaucgcgaucgugauggugaccaucaugcucugcugcaugaccagcugcugcuccugccugaaggggugcugcagcugcggcuccugcugcaaguucgacgaggacgacagcgagcccguccugaagggggugaagcuccacuacacgugauaauaggcuggagccucgguggccuagcuucuugccccuugggccuccccccagccccuccuccccuuccugcacccguacccccguggucuuugaauaaagucugagugggcggcaaaaaaaaaaaaaaaaaaaaaaaaaaaaaaaaaaaaaaaaaaaaaaaaaaaaaaaaaaaaaaaaaaaaaaaaaaaaaaaaaaaaaaaaaaaaaaaaaaaaucuag

SEQ ID NO: 26614 - RNA, 4100 nt, Artificial Sequence
  SARS-CoV-2/Wuhan/WIV05/2019__EPI_ISL_402128 spike protein mRNA gc (1-1273)(K986P_V987P_K986P_V987P_S13I_W152C_L452R_D614G)
gggaaauaagagagaaaagaagaguaagaagaaauauaagaccccggcgccgccaccauguucguguuccugguccuccugccccuggugagcauccagugcgugaaccucaccacccgcacgcagcugccgcccgccuacaccaacagcuucacccggggcgucuacuaccccgacaagguguuccgcuccagcgugcugcacuccacccaggaccucuuccugcccuucuucagcaacgucacgugguuccacgccauccacguguccgggaccaacggcaccaagcgguucgacaacccggugcugcccuucaacgacggggucuacuucgcgagcaccgagaaguccaacaucauccgcggcuggaucuucgggacgacccucgacagcaagacccagucccugcugaucgugaacaacgccaccaacguggucaucaaggugugcgaguuccaguucugcaacgaccccuuccucggcguguacuaccacaagaacaacaagagcugcauggaguccgaguuccgggucuacagcuccgccaacaacugcacguucgaguacgugagccagcccuuccugauggaccuggagggcaagcaggggaacuucaagaaccuccgcgaguucguguucaagaacaucgacggcuacuucaagaucuacuccaagcacaccccgaucaaccugguccgggaccugccccagggguucagcgcccucgagccccugguggaccugcccaucggcaucaacaucacccgcuuccagacccuccuggcccugcaccgguccuaccucacgccgggggacagcagcuccggcuggaccgcgggcgccgccgccuacuacgugggguaccugcagccccgcaccuuccugcucaaguacaacgagaacggcaccaucacggacgcggucgacugcgcccuggacccccugagcgagaccaagugcacccucaaguccuucaccguggagaaggggaucuaccagacgagcaacuuccgggugcagcccaccgaguccaucguccgcuucccgaacaucaccaaccugugccccuucggcgagguguucaacgccacccgguucgccagcgucuacgccuggaaccgcaagcggaucuccaacugcguggcggacuacagcgugcuguacaacuccgccagcuucuccacguucaagugcuacggcgucagccccaccaagcucaacgaccugugcuucaccaacguguacgccgacuccuucgugauccgcggggacgagguccggcagaucgcccccggccagaccgggaagaucgccgacuacaacuacaagcugccggacgacuucacgggcugcgugaucgcguggaacagcaacaaccucgacuccaaggucgggggcaacuacaacuaccgcuaccgccuguuccgcaagagcaaccucaagcccuucgagcgggacaucuccaccgagaucuaccaggccggcagcacccccugcaacgggguggagggcuucaacugcuacuucccccugcaguccuacggguuccagccgaccaacggcgugggguaccagcccuaccggguggucgugcugagcuucgagcuccugcacgcccccgccacggugugcggccccaagaaguccaccaaccuggucaagaacaagugcgugaacuucaacuucaacggccucaccgggaccggcgugcugaccgagagcaacaagaaguuccugccguuccagcaguucgggcgcgacaucgccgacacgaccgacgcgguccgcgacccccagacccuggagauccucgacaucacccccugcagcuucggcgggguguccgugaucacgccgggcaccaacaccagcaaccaggucgccgugcuguaccagggcgugaacugcaccgagguccccguggccauccacgccgaccagcugacgcccaccuggcggguguacuccaccggcagcaacgucuuccagacccgcgccgggugccucaucggcgcggagcacgugaacaacuccuacgagugcgacauccccaucggggccggcaucugcgccagcuaccagacgcagaccaacuccccgcggcgcgcccggagcguggcgucccagagcaucaucgccuacaccaugucccugggcgccgagaacagcgucgccuacuccaacaacagcaucgccauccccaccaacuucacgaucuccgugaccaccgagauccugcccgugagcaugaccaagacgagcgucgacugcaccauguacaucugcggggacuccaccgagugcagcaaccuccugcugcaguacggcuccuucugcacccagcucaaccgcgcgcugacggggaucgccguggagcaggacaagaacacccaggagguguucgcccaggucaagcagaucuacaagacgcccccgaucaaggacuucggcggguucaacuucagccagauccugcccgaccccuccaagcccagcaagcgguccuucaucgaggaccuccuguucaacaaggugacccuggccgacgccggcuucaucaagcaguacggcgacugccucggggacaucgcggcccgcgaccugaucugcgcccagaaguucaacggccugaccgugcucccgccccugcugaccgacgagaugaucgcccaguacaccagcgcccuccuggcggggaccaucacguccggcuggaccuucggggccggcgccgcccugcagauccccuucgcgaugcagauggccuaccgguucaacggcaucggggucacccagaacgugcucuacgagaaccagaagcugaucgccaaccaguucaacagcgccaucggcaagauccaggacucccugagcuccaccgccagcgcgcucgggaagcugcaggacguggucaaccagaacgcccaggcccugaacacgcucgugaagcagcuguccagcaacuucggcgccaucuccagcgugcugaacgacauccucucccgccuggacccgcccgaggccgaggugcagaucgaccggcugaucaccgggcgccuccagagccugcagaccuacgugacccagcagcugauccgggcggccgagauccgcgccagcgccaaccucgccgcgaccaagauguccgagugcguccugggccagagcaagcggguggacuucugcggcaagggguaccaccugauguccuucccccagagcgccccgcacggcguggucuuccuccacgugacguacguccccgcccaggagaagaacuucaccaccgcccccgcgaucugccacgacgggaaggcccacuucccccgcgagggcguguucguguccaacgggacccacugguucgucacgcagcggaacuucuacgagccgcagaucaucaccaccgacaacaccuucgugagcggcaacugcgacguggucaucggcaucgugaacaacacgguguacgacccccugcagcccgagcuggacuccuucaaggaggagcucgacaaguacuucaagaaccacaccagccccgacgucgaccugggggacaucuccggcaucaacgccagcguggugaacauccagaaggagaucgaccgccugaacgaggucgccaagaaccucaacgagucccugaucgaccugcaggagcucgggaaguacgagcaguacaucaaguggccgugguacaucuggcugggcuucaucgccggccugaucgcgaucgugauggugaccaucaugcucugcugcaugaccagcugcugcuccugccugaaggggugcugcagcugcggcuccugcugcaaguucgacgaggacgacagcgagcccguccugaagggggugaagcuccacuacacgugauaauaggcuggagccucgguggccuagcuucuugccccuugggccuccccccagccccuccuccccuuccugcacccguacccccguggucuuugaauaaagucugagugggcggcaaaaaaaaaaaaaaaaaaaaaaaaaaaaaaaaaaaaaaaaaaaaaaaaaaaaaaaaaaaaaaaaaaaaaaaaaaaaaaaaaaaaaaaaaaaaaaaaaaaaucuag

SEQ ID NO: 26615 - RNA, 4100 nt, Artificial Sequence
  SARS-CoV-2/Wuhan/WIV05/2019__EPI_ISL_402128 spike protein mRNA gc (1-1273)(K986P_V987P)
gggaaauaagagagaaaagaagaguaagaagaaauauaagaccccggcgccgccaccauguucguguuccugguccuccugccccuggugagcucccagugcgugaaccucaccacccgcacgcagcugccgcccgccuacaccaacagcuucacccggggcgucuacuaccccgacaagguguuccgcuccagcgugcugcacuccacccaggaccucuuccugcccuucuucagcaacgucacgugguuccacgccauccacguguccgggaccaacggcaccaagcgguucgacaacccggugcugcccuucaacgacggggucuacuucgcgagcaccgagaaguccaacaucauccgcggcuggaucuucgggacgacccucgacagcaagacccagucccugcugaucgugaacaacgccaccaacguggucaucaaggugugcgaguuccaguucugcaacgaccccuuccucggcguguacuaccacaagaacaacaagagcuggauggaguccgaguuccgggucuacagcuccgccaacaacugcacguucgaguacgugagccagcccuuccugauggaccuggagggcaagcaggggaacuucaagaaccuccgcgaguucguguucaagaacaucgacggcuacuucaagaucuacuccaagcacaccccgaucaaccugguccgggaccugccccagggguucagcgcccucgagccccugguggaccugcccaucggcaucaacaucacccgcuuccagacccuccuggcccugcaccgguccuaccucacgccgggggacagcagcuccggcuggaccgcgggcgccgccgccuacuacgugggguaccugcagccccgcaccuuccugcucaaguacaacgagaacggcaccaucacggacgcggucgacugcgcccuggacccccugagcgagaccaagugcacccucaaguccuucaccguggagaaggggaucuaccagacgagcaacuuccgggugcagcccaccgaguccaucguccgcuucccgaacaucaccaaccugugccccuucggcgagguguucaacgccacccgguucgccagcgucuacgccuggaaccgcaagcggaucuccaacugcguggcggacuacagcgugcuguacaacuccgccagcuucuccacguucaagugcuacggcgucagccccaccaagcucaacgaccugugcuucaccaacguguacgccgacuccuucgugauccgcggggacgagguccggcagaucgcccccggccagaccgggaagaucgccgacuacaacuacaagcugccggacgacuucacgggcugcgugaucgcguggaacagcaacaaccucgacuccaaggucgggggcaacuacaacuaccuguaccgccuguuccgcaagagcaaccucaagcccuucgagcgggacaucuccaccgagaucuaccaggccggcagcacccccugcaacgggguggagggcuucaacugcuacuucccccugcaguccuacggguuccagccgaccaacggcgugggguaccagcccuaccggguggucgugcugagcuucgagcuccugcacgcccccgccacggugugcggccccaagaaguccaccaaccuggucaagaacaagugcgugaacuucaacuucaacggccucaccgggaccggcgugcugaccgagagcaacaagaaguuccugccguuccagcaguucgggcgcgacaucgccgacacgaccgacgcgguccgcgacccccagacccuggagauccucgacaucacccccugcagcuucggcgggguguccgugaucacgccgggcaccaacaccagcaaccaggucgccgugcuguaccaggacgugaacugcaccgagguccccguggccauccacgccgaccagcugacgcccaccuggcggguguacuccaccggcagcaacgucuuccagacccgcgccgggugccucaucggcgcggagcacgugaacaacuccuacgagugcgacauccccaucggggccggcaucugcgccagcuaccagacgcagaccaacuccccgcggcgcgcccggagcguggcgucccagagcaucaucgccuacaccaugucccugggcgccgagaacagcgucgccuacuccaacaacagcaucgccauccccaccaacuucacgaucuccgugaccaccgagauccugcccgugagcaugaccaagacgagcgucgacugcaccauguacaucugcggggacuccaccgagugcagcaaccuccugcugcaguacggcuccuucugcacccagcucaaccgcgcgcugacggggaucgccguggagcaggacaagaacacccaggagguguucgcccaggucaagcagaucuacaagacgcccccgaucaaggacuucggcggguucaacuucagccagauccugcccgaccccuccaagcccagcaagcgguccuucaucgaggaccuccuguucaacaaggugacccuggccgacgccggcuucaucaagcaguacggcgacugccucggggacaucgcggcccgcgaccugaucugcgcccagaaguucaacggccugaccgugcucccgccccugcugaccgacgagaugaucgcccaguacaccagcgcccuccuggcggggaccaucacguccggcuggaccuucggggccggcgccgcccugcagauccccuucgcgaugcagauggccuaccgguucaacggcaucggggucacccagaacgugcucuacgagaaccagaagcugaucgccaaccaguucaacagcgccaucggcaagauccaggacucccugagcuccaccgccagcgcgcucgggaagcugcaggacguggucaaccagaacgcccaggcccugaacacgcucgugaagcagcuguccagcaacuucggcgccaucuccagcgugcugaacgacauccucucccgccuggacccgcccgaggccgagguccagaucgaccggcugaucaccgggcgccuccagagccugcagaccuacgugacccagcagcugauccgggcggccgagauccgcgccagcgccaaccucgccgcgaccaagauguccgagugcgugcugggccagagcaagcgggucgacuucugcggcaagggguaccaccugauguccuucccccagagcgcgccccacggcgugguguuccuccacgucacguacgugcccgcccaggagaagaacuucaccaccgccccggccaucugccacgacgggaaggcccacuucccccgcgagggcgucuucguguccaacgggacccacugguucgugacgcagcggaacuucuacgagccccagaucaucaccaccgacaacaccuucgucagcggcaacugcgacguggugaucggcaucgucaacaacacgguguacgacccccugcagccggagcuggacuccuucaaggaggagcucgacaaguacuucaagaaccacaccagccccgacguggaccugggggacaucuccggcaucaacgccagcgucgugaacauccagaaggagaucgaccgccugaacgagguggccaagaaccucaacgagucccugaucgaccugcaggagcucgggaaguacgagcaguacaucaaguggcccugguacaucuggcugggcuucaucgccggccugaucgcgaucgucauggugaccaucaugcucugcugcaugaccagcugcugcuccugccugaaggggugcugcagcugcggcuccugcugcaaguucgacgaggacgacagcgagccggugcugaagggggucaagcuccacuacacgugauaauaggcuggagccucgguggccuagcuucuugccccuugggccuccccccagccccuccuccccuuccugcacccguacccccguggucuuugaauaaagucugagugggcggcaaaaaaaaaaaaaaaaaaaaaaaaaaaaaaaaaaaaaaaaaaaaaaaaaaaaaaaaaaaaaaaaaaaaaaaaaaaaaaaaaaaaaaaaaaaaaaaaaaaaucuag

SEQ ID NO: 26616 - RNA, 4100 nt, Artificial Sequence
  SARS-CoV-2/Wuhan/WIV05/2019__EPI_ISL_402128 spike protein mRNA gc (1-1273)(K986P_V987P_ D614G)
gggaaauaagagagaaaagaagaguaagaagaaauauaagaccccggcgccgccaccauguucguguuccugguccuccugccccuggugagcucccagugcgugaaccucaccacccgcacgcagcugccgcccgccuacaccaacagcuucacccggggcgucuacuaccccgacaagguguuccgcuccagcgugcugcacuccacccaggaccucuuccugcccuucuucagcaacgucacgugguuccacgccauccacguguccgggaccaacggcaccaagcgguucgacaacccggugcugcccuucaacgacggggucuacuucgcgagcaccgagaaguccaacaucauccgcggcuggaucuucgggacgacccucgacagcaagacccagucccugcugaucgugaacaacgccaccaacguggucaucaaggugugcgaguuccaguucugcaacgaccccuuccucggcguguacuaccacaagaacaacaagagcuggauggaguccgaguuccgggucuacagcuccgccaacaacugcacguucgaguacgugagccagcccuuccugauggaccuggagggcaagcaggggaacuucaagaaccuccgcgaguucguguucaagaacaucgacggcuacuucaagaucuacuccaagcacaccccgaucaaccugguccgggaccugccccagggguucagcgcccucgagccccugguggaccugcccaucggcaucaacaucacccgcuuccagacccuccuggcccugcaccgguccuaccucacgccgggggacagcagcuccggcuggaccgcgggcgccgccgccuacuacgugggguaccugcagccccgcaccuuccugcucaaguacaacgagaacggcaccaucacggacgcggucgacugcgcccuggacccccugagcgagaccaagugcacccucaaguccuucaccguggagaaggggaucuaccagacgagcaacuuccgggugcagcccaccgaguccaucguccgcuucccgaacaucaccaaccugugccccuucggcgagguguucaacgccacccgguucgccagcgucuacgccuggaaccgcaagcggaucuccaacugcguggcggacuacagcgugcuguacaacuccgccagcuucuccacguucaagugcuacggcgucagccccaccaagcucaacgaccugugcuucaccaacguguacgccgacuccuucgugauccgcggggacgagguccggcagaucgcccccggccagaccgggaagaucgccgacuacaacuacaagcugccggacgacuucacgggcugcgugaucgcguggaacagcaacaaccucgacuccaaggucgggggcaacuacaacuaccuguaccgccuguuccgcaagagcaaccucaagcccuucgagcgggacaucuccaccgagaucuaccaggccggcagcacccccugcaacgggguggagggcuucaacugcuacuucccccugcaguccuacggguuccagccgaccaacggcgugggguaccagcccuaccggguggucgugcugagcuucgagcuccugcacgcccccgccacggugugcggccccaagaaguccaccaaccuggucaagaacaagugcgugaacuucaacuucaacggccucaccgggaccggcgugcugaccgagagcaacaagaaguuccugccguuccagcaguucgggcgcgacaucgccgacacgaccgacgcgguccgcgacccccagacccuggagauccucgacaucacccccugcagcuucggcgggguguccgugaucacgccgggcaccaacaccagcaaccaggucgccgugcuguaccagggcgugaacugcaccgagguccccguggccauccacgccgaccagcugacgcccaccuggcggguguacuccaccgggagcaacgucuuccagacccgcgccggcugccucaucggggcggagcacgugaacaacuccuacgagugcgacauccccaucggcgccggcaucugcgccagcuaccagacgcagaccaacuccccgcggcgcgcccggagcguggcgucccagagcaucaucgccuacaccaugucccugggggccgagaacagcgucgccuacuccaacaacagcaucgccauccccaccaacuucacgaucuccgugaccaccgagauccugcccgugagcaugaccaagacgagcgucgacugcaccauguacaucugcggcgacuccaccgagugcagcaaccuccugcugcaguacggguccuucugcacccagcucaaccgcgcgcugacgggcaucgccguggagcaggacaagaacacccaggagguguucgcccaggucaagcagaucuacaagacgcccccgaucaaggacuucgggggcuucaacuucagccagauccugcccgaccccuccaagcccagcaagcgguccuucaucgaggaccuccuguucaacaaggugacccuggccgacgccggcuucaucaagcaguacggggacugccucggcgacaucgcggcccgcgaccugaucugcgcccagaaguucaacgggcugaccgugcucccgccccugcugaccgacgagaugaucgcccaguacaccagcgcccuccuggcgggcaccaucacguccggguggaccuucggcgccggcgccgcccugcagauccccuucgcgaugcagauggccuaccgguucaacgggaucggcgucacccagaacgugcucuacgagaaccagaagcugaucgccaaccaguucaacagcgccaucgggaagauccaggacucccugagcuccaccgccagcgcgcucggcaagcugcaggacguggucaaccagaacgcccaggcccugaacacgcucgugaagcagcuguccagcaacuucggggccaucuccagcgugcugaacgacauccucucccgccuggacccgcccgaggccgagguccagaucgaccggcugaucaccggccgccuccagagccugcagaccuacgugacccagcagcugauccgggcggccgagauccgcgccagcgccaaccucgccgcgaccaagauguccgagugcgugcugggccagagcaagcgggucgacuucugcgggaagggcuaccaccugauguccuucccccagagcgcgccccacggggugguguuccuccacgucacguacgugcccgcccaggagaagaacuucaccaccgccccggccaucugccacgacggcaaggcccacuucccccgcgagggggucuucguguccaacggcacccacugguucgugacgcagcggaacuucuacgagccccagaucaucaccaccgacaacaccuucgucagcggcaacugcgacguggugaucgggaucgucaacaacacgguguacgacccccugcagccggagcuggacuccuucaaggaggagcucgacaaguacuucaagaaccacaccagccccgacguggaccugggcgacaucuccgggaucaacgccagcgucgugaacauccagaaggagaucgaccgccugaacgagguggccaagaaccucaacgagucccugaucgaccugcaggagcucggcaaguacgagcaguacaucaaguggcccugguacaucuggcugggcuucaucgccgggcugaucgcgaucgucauggugaccaucaugcucugcugcaugaccagcugcugcuccugccugaagggcugcugcagcugcggguccugcugcaaguucgacgaggacgacagcgagccggugcugaagggcgucaagcuccacuacacgugauaauaggcuggagccucgguggccuagcuucuugccccuugggccuccccccagccccuccuccccuuccugcacccguacccccguggucuuugaauaaagucugagugggcggcaaaaaaaaaaaaaaaaaaaaaaaaaaaaaaaaaaaaaaaaaaaaaaaaaaaaaaaaaaaaaaaaaaaaaaaaaaaaaaaaaaaaaaaaaaaaaaaaaaaaucuag

SEQ ID NO: 26617 - RNA, 4100 nt, Artificial Sequence
  SARS-CoV-2/Wuhan/WIV05/2019__EPI_ISL_402128 spike protein mRNA gc (1-1273)(K986P_V987P_A222V_D614G)
gggaaauaagagagaaaagaagaguaagaagaaauauaagaccccggcgccgccaccauguucguguuccugguccuccugccccuggugagcucccagugcgugaaccucaccacccgcacgcagcugccgcccgccuacaccaacagcuucacccggggcgucuacuaccccgacaagguguuccgcuccagcgugcugcacuccacccaggaccucuuccugcccuucuucagcaacgucacgugguuccacgccauccacguguccgggaccaacggcaccaagcgguucgacaacccggugcugcccuucaacgacggggucuacuucgcgagcaccgagaaguccaacaucauccgcggcuggaucuucgggacgacccucgacagcaagacccagucccugcugaucgugaacaacgccaccaacguggucaucaaggugugcgaguuccaguucugcaacgaccccuuccucggcguguacuaccacaagaacaacaagagcuggauggaguccgaguuccgggucuacagcuccgccaacaacugcacguucgaguacgugagccagcccuuccugauggaccuggagggcaagcaggggaacuucaagaaccuccgcgaguucguguucaagaacaucgacggcuacuucaagaucuacuccaagcacaccccgaucaaccugguccgggaccugccccagggguucagcgugcucgagccccugguggaccugcccaucggcaucaacaucacccgcuuccagacccuccuggcccugcaccgguccuaccucacgccgggggacagcagcuccggcuggaccgccggcgcggccgccuacuacgucggguaccugcagccccgcaccuuccugcucaaguacaacgagaacggcaccaucacggacgccguggacugcgcgcuggacccccugagcgagaccaagugcacccucaaguccuucaccguggagaaggggaucuaccagacgagcaacuuccggguccagcccaccgaguccaucgugcgcuucccgaacaucaccaaccugugccccuucggcgaggucuucaacgccacccgguucgccagcguguacgccuggaaccgcaagcggaucuccaacugcguggccgacuacagcguccuguacaacuccgcgagcuucuccacguucaagugcuacggcgugagccccaccaagcucaacgaccugugcuucaccaacguguacgccgacuccuucgucauccgcggggacgaggugcggcagaucgcccccggccagaccgggaagaucgccgacuacaacuacaagcugccggacgacuucacgggcugcgugaucgccuggaacagcaacaaccucgacuccaaggucgggggcaacuacaacuaccuguaccgccuguuccgcaagagcaaccucaagcccuucgagcgggacaucuccaccgagaucuaccaggcgggcagcacccccugcaacgggguggagggcuucaacugcuacuucccccugcaguccuacggguuccagccgaccaacggcgugggguaccagcccuaccgggucguggugcugagcuucgagcuccugcacgcccccgccacggucugcggccccaagaaguccaccaaccuggugaagaacaagugcgugaacuucaacuucaacggccucaccgggaccggcguccugaccgagagcaacaagaaguuccugccguuccagcaguucgggcgcgacaucgccgacacgaccgacgccgugcgcgacccccagacccuggagauccucgacaucacccccugcagcuucggcgggguguccgucaucacgccgggcaccaacaccagcaaccagguggcggugcuguaccagggcgucaacugcaccgaggugcccguggccauccacgccgaccagcugacgcccaccuggcgggucuacuccaccgggagcaacguguuccagacccgcgccggcugccucaucggggccgagcacgugaacaacuccuacgagugcgacauccccaucggcgcgggcaucugcgccagcuaccagacgcagaccaacuccccgcggcgcgcccggagcgucgccucccagagcaucaucgcguacaccaugucccugggggccgagaacagcguggccuacuccaacaacagcaucgccauccccaccaacuucacgaucuccgugaccaccgagauccugcccgucagcaugaccaagacgagcguggacugcaccauguacaucugcggcgacuccaccgagugcagcaaccuccugcugcaguacggguccuucugcacccagcucaaccgcgcccugacgggcaucgcgguggagcaggacaagaacacccaggaggucuucgcccaggugaagcagaucuacaagacgcccccgaucaaggacuucgggggcuucaacuucagccagauccugcccgaccccuccaagcccagcaagcgguccuucaucgaggaccuccuguucaacaaggugacccuggccgacgccggcuucaucaagcaguacggggacugccucggcgacaucgccgcgcgcgaccugaucugcgcccagaaguucaacgggcugaccguccucccgccccugcugaccgacgagaugaucgcccaguacaccagcgcccuccuggccggcaccaucacguccggguggaccuucggcgcgggcgccgcccugcagauccccuucgccaugcagauggcguaccgguucaacgggaucggcgugacccagaacgugcucuacgagaaccagaagcugaucgccaaccaguucaacagcgccaucgggaagauccaggacucccugagcuccaccgccagcgcccucggcaagcugcaggacgucgugaaccagaacgcgcaggcccugaacacgcucgugaagcagcuguccagcaacuucggggccaucuccagcguccugaacgacauccucucccgccuggacccgcccgaggccgaggugcagaucgaccggcugaucaccggccgccuccagagccugcagaccuacgugacccagcagcugauccgggccgcggagauccgcgccagcgccaaccucgccgccaccaagauguccgagugcguccugggccagagcaagcggguggacuucugcgggaagggcuaccaccugauguccuucccccagagcgcgccccacgggguggucuuccuccacgugacguacguccccgcccaggagaagaacuucaccaccgccccggccaucugccacgacggcaaggcgcacuucccccgcgaggggguguucguguccaacggcacccacugguucgucacgcagcggaacuucuacgagccccagaucaucaccaccgacaacaccuucgugagcggcaacugcgacguggucaucgggaucgugaacaacacgguguacgacccccugcagccggagcuggacuccuucaaggaggagcucgacaaguacuucaagaaccacaccagccccgacgucgaccugggcgacaucuccgggaucaacgccagcguggugaacauccagaaggagaucgaccgccugaacgaggucgccaagaaccucaacgagucccugaucgaccugcaggagcucggcaaguacgagcaguacaucaaguggcccugguacaucuggcugggcuucaucgccgggcugaucgccaucgugauggugaccaucaugcucugcugcaugaccagcugcugcuccugccugaagggcugcugcagcugcggguccugcugcaaguucgacgaggacgacagcgagccgguccugaagggcgugaagcuccacuacacgugauaauaggcuggagccucgguggccuagcuucuugccccuugggccuccccccagccccuccuccccuuccugcacccguacccccguggucuuugaauaaagucugagugggcggcaaaaaaaaaaaaaaaaaaaaaaaaaaaaaaaaaaaaaaaaaaaaaaaaaaaaaaaaaaaaaaaaaaaaaaaaaaaaaaaaaaaaaaaaaaaaaaaaaaaaucuag

SEQ ID NO: 26618 - RNA, 4100 nt, Artificial Sequence
  SARS-CoV-2/Wuhan/WIV05/2019__EPI_ISL_402128 spike protein mRNA gc (1-1273)(K986P_V987P_N439K_D614G)
gggaaauaagagagaaaagaagaguaagaagaaauauaagaccccggcgccgccaccauguucguguuccugguccuccugccccuggugagcucccagugcgugaaccucaccacccgcacgcagcugccgcccgccuacaccaacagcuucacccggggcgucuacuaccccgacaagguguuccgcuccagcgugcugcacuccacccaggaccucuuccugcccuucuucagcaacgucacgugguuccacgccauccacguguccgggaccaacggcaccaagcgguucgacaacccggugcugcccuucaacgacggggucuacuucgcgagcaccgagaaguccaacaucauccgcggcuggaucuucgggacgacccucgacagcaagacccagucccugcugaucgugaacaacgccaccaacguggucaucaaggugugcgaguuccaguucugcaacgaccccuuccucggcguguacuaccacaagaacaacaagagcuggauggaguccgaguuccgggucuacagcuccgccaacaacugcacguucgaguacgugagccagcccuuccugauggaccuggagggcaagcaggggaacuucaagaaccuccgcgaguucguguucaagaacaucgacggcuacuucaagaucuacuccaagcacaccccgaucaaccugguccgggaccugccccagggguucagcgcccucgagccccugguggaccugcccaucggcaucaacaucacccgcuuccagacccuccuggcccugcaccgguccuaccucacgccgggggacagcagcuccggcuggaccgcgggcgccgccgccuacuacgugggguaccugcagccccgcaccuuccugcucaaguacaacgagaacggcaccaucacggacgcggucgacugcgcccuggacccccugagcgagaccaagugcacccucaaguccuucaccguggagaaggggaucuaccagacgagcaacuuccgggugcagcccaccgaguccaucguccgcuucccgaacaucaccaaccugugccccuucggcgagguguucaacgccacccgguucgccagcgucuacgccuggaaccgcaagcggaucuccaacugcguggcggacuacagcgugcuguacaacuccgccagcuucuccacguucaagugcuacggcgucagccccaccaagcucaacgaccugugcuucaccaacguguacgccgacuccuucgugauccgcggggacgagguccggcagaucgcccccggccagaccgggaagaucgccgacuacaacuacaagcugccggacgacuucacgggcugcgugaucgcguggaacagcaagaaccucgacuccaaggucgggggcaacuacaacuaccuguaccgccuguuccgcaagagcaaccucaagcccuucgagcgggacaucuccaccgagaucuaccaggccggcagcacccccugcaacgggguggagggcuucaacugcuacuucccccugcaguccuacggguuccagccgaccaacggcgugggguaccagcccuaccggguggucgugcugagcuucgagcuccugcacgcccccgccacggugugcggccccaagaaguccaccaaccuggucaagaacaagugcgugaacuucaacuucaacggccucaccgggaccggcgugcugaccgagagcaacaagaaguuccugccguuccagcaguucgggcgcgacaucgccgacacgaccgacgcgguccgcgacccccagacccuggagauccucgacaucacccccugcagcuucggcgggguguccgugaucacgccgggcaccaacaccagcaaccaggucgccgugcuguaccagggcgugaacugcaccgagguccccguggccauccacgccgaccagcugacgcccaccuggcggguguacuccaccgggagcaacgucuuccagacccgcgccggcugccucaucggggcggagcacgugaacaacuccuacgagugcgacauccccaucggcgccggcaucugcgccagcuaccagacgcagaccaacuccccgcggcgcgcccggagcguggcgucccagagcaucaucgccuacaccaugucccugggggccgagaacagcgucgccuacuccaacaacagcaucgccauccccaccaacuucacgaucuccgugaccaccgagauccugcccgugagcaugaccaagacgagcgucgacugcaccauguacaucugcggcgacuccaccgagugcagcaaccuccugcugcaguacggguccuucugcacccagcucaaccgcgcgcugacgggcaucgccguggagcaggacaagaacacccaggagguguucgcccaggucaagcagaucuacaagacgcccccgaucaaggacuucgggggcuucaacuucagccagauccugcccgaccccuccaagcccagcaagcgguccuucaucgaggaccuccuguucaacaaggugacccuggccgacgccggcuucaucaagcaguacggggacugccucggcgacaucgcggcccgcgaccugaucugcgcccagaaguucaacgggcugaccgugcucccgccccugcugaccgacgagaugaucgcccaguacaccagcgcccuccuggcgggcaccaucacguccggguggaccuucggcgccggcgccgcccugcagauccccuucgcgaugcagauggccuaccgguucaacgggaucggcgucacccagaacgugcucuacgagaaccagaagcugaucgccaaccaguucaacagcgccaucgggaagauccaggacucccugagcuccaccgccagcgcgcucggcaagcugcaggacguggucaaccagaacgcccaggcccugaacacgcucgugaagcagcuguccagcaacuucggggccaucuccagcgugcugaacgacauccucucccgccuggacccgcccgaggccgagguccagaucgaccggcugaucaccggccgccuccagagccugcagaccuacgugacccagcagcugauccgggcggccgagauccgcgccagcgccaaccucgccgcgaccaagauguccgagugcgugcugggccagagcaagcgggucgacuucugcgggaagggcuaccaccugauguccuucccccagagcgcgccccacggggugguguuccuccacgucacguacgugcccgcccaggagaagaacuucaccaccgccccggccaucugccacgacggcaaggcccacuucccccgcgagggggucuucguguccaacggcacccacugguucgugacgcagcggaacuucuacgagccccagaucaucaccaccgacaacaccuucgucagcggcaacugcgacguggugaucgggaucgucaacaacacgguguacgacccccugcagccggagcuggacuccuucaaggaggagcucgacaaguacuucaagaaccacaccagccccgacguggaccugggcgacaucuccgggaucaacgccagcgucgugaacauccagaaggagaucgaccgccugaacgagguggccaagaaccucaacgagucccugaucgaccugcaggagcucggcaaguacgagcaguacaucaaguggcccugguacaucuggcugggcuucaucgccgggcugaucgcgaucgucauggugaccaucaugcucugcugcaugaccagcugcugcuccugccugaagggcugcugcagcugcggguccugcugcaaguucgacgaggacgacagcgagccggugcugaagggcgucaagcuccacuacacgugauaauaggcuggagccucgguggccuagcuucuugccccuugggccuccccccagccccuccuccccuuccugcacccguacccccguggucuuugaauaaagucugagugggcggcaaaaaaaaaaaaaaaaaaaaaaaaaaaaaaaaaaaaaaaaaaaaaaaaaaaaaaaaaaaaaaaaaaaaaaaaaaaaaaaaaaaaaaaaaaaaaaaaaaaaucuag

SEQ ID NO: 26619 - RNA, 4100 nt, Artificial Sequence
  SARS-CoV-2/Wuhan/WIV05/2019__EPI_ISL_402128 spike protein mRNA gc (1-1273)(K986P_V987P_S477N_D614G)
gggaaauaagagagaaaagaagaguaagaagaaauauaagaccccggcgccgccaccauguucguguuccugguccuccugccccuggugagcucccagugcgugaaccucaccacccgcacgcagcugccgcccgccuacaccaacagcuucacccggggcgucuacuaccccgacaagguguuccgcuccagcgugcugcacuccacccaggaccucuuccugcccuucuucagcaacgucacgugguuccacgccauccacguguccgggaccaacggcaccaagcgguucgacaacccggugcugcccuucaacgacggggucuacuucgcgagcaccgagaaguccaacaucauccgcggcuggaucuucgggacgacccucgacagcaagacccagucccugcugaucgugaacaacgccaccaacguggucaucaaggugugcgaguuccaguucugcaacgaccccuuccucggcguguacuaccacaagaacaacaagagcuggauggaguccgaguuccgggucuacagcuccgccaacaacugcacguucgaguacgugagccagcccuuccugauggaccuggagggcaagcaggggaacuucaagaaccuccgcgaguucguguucaagaacaucgacggcuacuucaagaucuacuccaagcacaccccgaucaaccugguccgggaccugccccagggguucagcgcccucgagccccugguggaccugcccaucggcaucaacaucacccgcuuccagacccuccuggcccugcaccgguccuaccucacgccgggggacagcagcuccggcuggaccgcgggcgccgccgccuacuacgugggguaccugcagccccgcaccuuccugcucaaguacaacgagaacggcaccaucacggacgcggucgacugcgcccuggacccccugagcgagaccaagugcacccucaaguccuucaccguggagaaggggaucuaccagacgagcaacuuccgggugcagcccaccgaguccaucguccgcuucccgaacaucaccaaccugugccccuucggcgagguguucaacgccacccgguucgccagcgucuacgccuggaaccgcaagcggaucuccaacugcguggcggacuacagcgugcuguacaacuccgccagcuucuccacguucaagugcuacggcgucagccccaccaagcucaacgaccugugcuucaccaacguguacgccgacuccuucgugauccgcggggacgagguccggcagaucgcccccggccagaccgggaagaucgccgacuacaacuacaagcugccggacgacuucacgggcugcgugaucgcguggaacagcaacaaccucgacuccaaggucgggggcaacuacaacuaccuguaccgccuguuccgcaagagcaaccucaagcccuucgagcgggacaucuccaccgagaucuaccaggccggcaacacccccugcaacgggguggagggcuucaacugcuacuucccccugcagagcuacggguuccagccgaccaacggcgugggguaccagcccuaccggguggucgugcuguccuucgagcuccugcacgcccccgccacggugugcggccccaagaaguccaccaaccuggucaagaacaagugcgugaacuucaacuucaacggccucaccgggaccggcgugcugaccgagagcaacaagaaguuccugccguuccagcaguucgggcgcgacaucgccgacacgaccgacgcgguccgcgacccccagacccuggagauccucgacaucacccccugcagcuucggcggggugagcgugaucacgccgggcaccaacaccuccaaccaggucgccgugcuguaccagggcgugaacugcaccgagguccccguggccauccacgccgaccagcugacgcccaccuggcggguguacagcaccggguccaacgucuuccagacccgcgccggcugccucaucggggcggagcacgugaacaacagcuacgagugcgacauccccaucggcgccggcaucugcgccuccuaccagacgcagaccaacagcccgcggcgcgcccgguccguggcgagccaguccaucaucgccuacaccaugagccugggggccgagaacuccgucgccuacagcaacaacuccaucgccauccccaccaacuucacgaucagcgugaccaccgagauccugcccguguccaugaccaagacgagcgucgacugcaccauguacaucugcggcgacagcaccgagugcuccaaccuccugcugcaguacgggagcuucugcacccagcucaaccgcgcgcugacgggcaucgccguggagcaggacaagaacacccaggagguguucgcccaggucaagcagaucuacaagacgcccccgaucaaggacuucgggggcuucaacuucucccagauccugcccgaccccagcaagcccuccaagcggagcuucaucgaggaccuccuguucaacaaggugacccuggccgacgccggcuucaucaagcaguacggggacugccucggcgacaucgcggcccgcgaccugaucugcgcccagaaguucaacgggcugaccgugcucccgccccugcugaccgacgagaugaucgcccaguacaccuccgcccuccuggcgggcaccaucacgagcggguggaccuucggcgccggcgccgcccugcagauccccuucgcgaugcagauggccuaccgguucaacgggaucggcgucacccagaacgugcucuacgagaaccagaagcugaucgccaaccaguucaacuccgccaucgggaagauccaggacagccuguccagcaccgccuccgcgcucggcaagcugcaggacguggucaaccagaacgcccaggcccugaacacgcucgugaagcagcugagcuccaacuucggggccaucagcuccgugcugaacgacauccucagccgccuggacccgcccgaggccgagguccagaucgaccggcugaucaccggccgccuccagucccugcagaccuacgugacccagcagcugauccgggcggccgagauccgcgccagcgccaaccucgccgcgaccaagaugagcgagugcgugcugggccaguccaagcgggucgacuucugcgggaagggcuaccaccugaugagcuucccccaguccgcgccccacggggugguguuccuccacgucacguacgugcccgcccaggagaagaacuucaccaccgccccggccaucugccacgacggcaaggcccacuucccccgcgagggggucuucgugagcaacggcacccacugguucgugacgcagcggaacuucuacgagccccagaucaucaccaccgacaacaccuucgucuccggcaacugcgacguggugaucgggaucgucaacaacacgguguacgacccccugcagccggagcuggacagcuucaaggaggagcucgacaaguacuucaagaaccacaccucccccgacguggaccugggcgacaucagcgggaucaacgccuccgucgugaacauccagaaggagaucgaccgccugaacgagguggccaagaaccucaacgagagccugaucgaccugcaggagcucggcaaguacgagcaguacaucaaguggcccugguacaucuggcugggcuucaucgccgggcugaucgcgaucgucauggugaccaucaugcucugcugcaugaccuccugcugcagcugccugaagggcugcugcuccugcgggagcugcugcaaguucgacgaggacgacuccgagccggugcugaagggcgucaagcuccacuacacgugauaauaggcuggagccucgguggccuagcuucuugccccuugggccuccccccagccccuccuccccuuccugcacccguacccccguggucuuugaauaaagucugagugggcggcaaaaaaaaaaaaaaaaaaaaaaaaaaaaaaaaaaaaaaaaaaaaaaaaaaaaaaaaaaaaaaaaaaaaaaaaaaaaaaaaaaaaaaaaaaaaaaaaaaaaucuag

SEQ ID NO: 26620 - RNA, 4100 nt, Artificial Sequence
  SARS-CoV-2/Wuhan/WIV05/2019__EPI_ISL_402128 spike protein mRNA gc (1-1273)(K986P_V987P_N501Y_D614G)
gggaaauaagagagaaaagaagaguaagaagaaauauaagaccccggcgccgccaccauguucguguuccugguccuccugccccuggugagcucccagugcgugaaccucaccacccgcacgcagcugccgcccgccuacaccaacagcuucacccggggcgucuacuaccccgacaagguguuccgcuccagcgugcugcacuccacccaggaccucuuccugcccuucuucagcaacgucacgugguuccacgccauccacguguccgggaccaacggcaccaagcgguucgacaacccggugcugcccuucaacgacggggucuacuucgcgagcaccgagaaguccaacaucauccgcggcuggaucuucgggacgacccucgacagcaagacccagucccugcugaucgugaacaacgccaccaacguggucaucaaggugugcgaguuccaguucugcaacgaccccuuccucggcguguacuaccacaagaacaacaagagcuggauggaguccgaguuccgggucuacagcuccgccaacaacugcacguucgaguacgugagccagcccuuccugauggaccuggagggcaagcaggggaacuucaagaaccuccgcgaguucguguucaagaacaucgacggcuacuucaagaucuacuccaagcacaccccgaucaaccugguccgggaccugccccagggguucagcgcccucgagccccugguggaccugcccaucggcaucaacaucacccgcuuccagacccuccuggcccugcaccgguccuaccucacgccgggggacagcagcuccggcuggaccgcgggcgccgccgccuacuacgugggguaccugcagccccgcaccuuccugcucaaguacaacgagaacggcaccaucacggacgcggucgacugcgcccuggacccccugagcgagaccaagugcacccucaaguccuucaccguggagaaggggaucuaccagacgagcaacuuccgggugcagcccaccgaguccaucguccgcuucccgaacaucaccaaccugugccccuucggcgagguguucaacgccacccgguucgccagcgucuacgccuggaaccgcaagcggaucuccaacugcguggcggacuacagcgugcuguacaacuccgccagcuucuccacguucaagugcuacggcgucagccccaccaagcucaacgaccugugcuucaccaacguguacgccgacuccuucgugauccgcggggacgagguccggcagaucgcccccggccagaccgggaagaucgccgacuacaacuacaagcugccggacgacuucacgggcugcgugaucgcguggaacagcaacaaccucgacuccaaggucgggggcaacuacaacuaccuguaccgccuguuccgcaagagcaaccucaagcccuucgagcgggacaucuccaccgagaucuaccaggccggcagcacccccugcaacgggguggagggcuucaacugcuacuucccccugcaguccuacggguuccagccgaccuacggcgugggguaccagcccuaccggguggucgugcugagcuucgagcuccugcacgcccccgccacggugugcggccccaagaaguccaccaaccuggucaagaacaagugcgugaacuucaacuucaacggccucaccgggaccggcgugcugaccgagagcaacaagaaguuccugccguuccagcaguucgggcgcgacaucgccgacacgaccgacgcgguccgcgacccccagacccuggagauccucgacaucacccccugcagcuucggcgggguguccgugaucacgccgggcaccaacaccagcaaccaggucgccgugcuguaccagggcgugaacugcaccgagguccccguggccauccacgccgaccagcugacgcccaccuggcggguguacuccaccgggagcaacgucuuccagacccgcgccggcugccucaucggggcggagcacgugaacaacuccuacgagugcgacauccccaucggcgccggcaucugcgccagcuaccagacgcagaccaacuccccgcggcgcgcccggagcguggcgucccagagcaucaucgccuacaccaugucccugggggccgagaacagcgucgccuacuccaacaacagcaucgccauccccaccaacuucacgaucuccgugaccaccgagauccugcccgugagcaugaccaagacgagcgucgacugcaccauguacaucugcggcgacuccaccgagugcagcaaccuccugcugcaguacggguccuucugcacccagcucaaccgcgcgcugacgggcaucgccguggagcaggacaagaacacccaggagguguucgcccaggucaagcagaucuacaagacgcccccgaucaaggacuucgggggcuucaacuucagccagauccugcccgaccccuccaagcccagcaagcgguccuucaucgaggaccuccuguucaacaaggugacccuggccgacgccggcuucaucaagcaguacggggacugccucggcgacaucgcggcccgcgaccugaucugcgcccagaaguucaacgggcugaccgugcucccgccccugcugaccgacgagaugaucgcccaguacaccagcgcccuccuggcgggcaccaucacguccggguggaccuucggcgccggcgccgcccugcagauccccuucgcgaugcagauggccuaccgguucaacgggaucggcgucacccagaacgugcucuacgagaaccagaagcugaucgccaaccaguucaacagcgccaucgggaagauccaggacucccugagcuccaccgccagcgcgcucggcaagcugcaggacguggucaaccagaacgcccaggcccugaacacgcucgugaagcagcuguccagcaacuucggggccaucuccagcgugcugaacgacauccucucccgccuggacccgcccgaggccgagguccagaucgaccggcugaucaccggccgccuccagagccugcagaccuacgugacccagcagcugauccgggcggccgagauccgcgccagcgccaaccucgccgcgaccaagauguccgagugcgugcugggccagagcaagcgggucgacuucugcgggaagggcuaccaccugauguccuucccccagagcgcgccccacggggugguguuccuccacgucacguacgugcccgcccaggagaagaacuucaccaccgccccggccaucugccacgacggcaaggcccacuucccccgcgagggggucuucguguccaacggcacccacugguucgugacgcagcggaacuucuacgagccccagaucaucaccaccgacaacaccuucgucagcggcaacugcgacguggugaucgggaucgucaacaacacgguguacgacccccugcagccggagcuggacuccuucaaggaggagcucgacaaguacuucaagaaccacaccagccccgacguggaccugggcgacaucuccgggaucaacgccagcgucgugaacauccagaaggagaucgaccgccugaacgagguggccaagaaccucaacgagucccugaucgaccugcaggagcucggcaaguacgagcaguacaucaaguggcccugguacaucuggcugggcuucaucgccgggcugaucgcgaucgucauggugaccaucaugcucugcugcaugaccagcugcugcuccugccugaagggcugcugcagcugcggguccugcugcaaguucgacgaggacgacagcgagccggugcugaagggcgucaagcuccacuacacgugauaauaggcuggagccucgguggccuagcuucuugccccuugggccuccccccagccccuccuccccuuccugcacccguacccccguggucuuugaauaaagucugagugggcggcaaaaaaaaaaaaaaaaaaaaaaaaaaaaaaaaaaaaaaaaaaaaaaaaaaaaaaaaaaaaaaaaaaaaaaaaaaaaaaaaaaaaaaaaaaaaaaaaaaaaucuag

SEQ ID NO: 26621 - RNA, 4094 nt, Artificial Sequence
  SARS-CoV-2/Wuhan/WIV05/2019__EPI_ISL_402128 spike protein mRNA gc (1-1273)(K986P_V987P_H69del_V70del_D614G)
gggaaauaagagagaaaagaagaguaagaagaaauauaagaccccggcgccgccaccauguucguguuccugguccuccugccccuggugagcucccagugcgugaaccucaccacccgcacgcagcugccgcccgccuacaccaacagcuucacccggggcgucuacuaccccgacaagguguuccgcuccagcgugcugcacuccacccaggaccucuuccugcccuucuucagcaacgucacgugguuccacgccaucuccgggaccaacggcaccaagcgguucgacaacccggugcugcccuucaacgacgggguguacuucgcgagcaccgagaaguccaacaucauccgcggcuggaucuucgggacgacccucgacagcaagacccagucccugcugaucgucaacaacgccaccaacguggugaucaaggucugcgaguuccaguucugcaacgaccccuuccucggcguguacuaccacaagaacaacaagagcuggauggaguccgaguuccggguguacagcuccgccaacaacugcacguucgaguacgucagccagcccuuccugauggaccuggagggcaagcaggggaacuucaagaaccuccgcgaguucguguucaagaacaucgacggcuacuucaagaucuacuccaagcacaccccgaucaaccuggugcgggaccugccccagggguucagcgcccucgagccccuggucgaccugcccaucggcaucaacaucacccgcuuccagacccuccuggcccugcaccgguccuaccucacgccgggggacagcagcuccggcuggaccgcgggcgccgccgccuacuacgugggguaccugcagccccgcaccuuccugcucaaguacaacgagaacggcaccaucacggacgcgguggacugcgcccuggacccccugagcgagaccaagugcacccucaaguccuucaccgucgagaaggggaucuaccagacgagcaacuuccgggugcagcccaccgaguccaucgugcgcuucccgaacaucaccaaccugugccccuucggcgaggucuucaacgccacccgguucgccagcguguacgccuggaaccgcaagcggaucuccaacugcgucgcggacuacagcgugcuguacaacuccgccagcuucuccacguucaagugcuacggcgugagccccaccaagcucaacgaccugugcuucaccaacgucuacgccgacuccuucgugauccgcggggacgaggugcggcagaucgcccccggccagaccgggaagaucgccgacuacaacuacaagcugccggacgacuucacgggcugcgucaucgcguggaacagcaacaaccucgacuccaaggucgggggcaacuacaacuaccuguaccgccuguuccgcaagagcaaccucaagcccuucgagcgggacaucuccaccgagaucuaccaggccggcagcacccccugcaacgggguggagggcuucaacugcuacuucccccugcaguccuacggguuccagccgaccaacggcgugggguaccagcccuaccggguggugguccugagcuucgagcuccugcacgcccccgccacggugugcggccccaagaaguccaccaaccuggugaagaacaagugcgucaacuucaacuucaacggccucaccgggaccggcgugcugaccgagagcaacaagaaguuccugccguuccagcaguucgggcgcgacaucgccgacacgaccgacgcggugcgcgacccccagacccuggagauccucgacaucacccccugcagcuucggcggggucuccgugaucacgccgggcaccaacaccagcaaccagguggccguccuguaccagggcgugaacugcaccgaggugcccgucgccauccacgccgaccagcugacgcccaccuggcggguguacuccaccgggagcaacguguuccagacccgcgccggcugccucaucggggcggagcacgucaacaacuccuacgagugcgacauccccaucggcgccggcaucugcgccagcuaccagacgcagaccaacuccccgcggcgcgcccggagcguggcgucccagagcaucaucgccuacaccaugucccugggggccgagaacagcguggccuacuccaacaacagcaucgccauccccaccaacuucacgaucuccgucaccaccgagauccugcccgugagcaugaccaagacgagcguggacugcaccauguacaucugcggcgacuccaccgagugcagcaaccuccugcugcaguacggguccuucugcacccagcucaaccgcgcgcugacgggcaucgccgucgagcaggacaagaacacccaggagguguucgcccaggugaagcagaucuacaagacgcccccgaucaaggacuucgggggcuucaacuucagccagauccugcccgaccccuccaagcccagcaagcgguccuucaucgaggaccuccuguucaacaaggucacccuggccgacgccggcuucaucaagcaguacggggacugccucggcgacaucgcggcccgcgaccugaucugcgcccagaaguucaacgggcugaccgugcucccgccccugcugaccgacgagaugaucgcccaguacaccagcgcccuccuggcgggcaccaucacguccggguggaccuucggcgccggcgccgcccugcagauccccuucgcgaugcagauggccuaccgguucaacgggaucggcgugacccagaacguccucuacgagaaccagaagcugaucgccaaccaguucaacagcgccaucgggaagauccaggacucccugagcuccaccgccagcgcgcucggcaagcugcaggacguggugaaccagaacgcccaggcccugaacacgcucgucaagcagcuguccagcaacuucggggccaucuccagcgugcugaacgacauccucucccgccuggacccgcccgaggccgaggugcagaucgaccggcugaucaccggccgccuccagagccugcagaccuacgucacccagcagcugauccgggcggccgagauccgcgccagcgccaaccucgccgcgaccaagauguccgagugcgugcugggccagagcaagcggguggacuucugcgggaagggcuaccaccugauguccuucccccagagcgcgccccacggggucguguuccuccacgugacguacguccccgcccaggagaagaacuucaccaccgccccggccaucugccacgacggcaaggcccacuucccccgcgaggggguguucgucuccaacggcacccacugguucgugacgcagcggaacuucuacgagccccagaucaucaccaccgacaacaccuucgugagcggcaacugcgacgucgugaucgggaucgugaacaacacggucuacgacccccugcagccggagcuggacuccuucaaggaggagcucgacaaguacuucaagaaccacaccagccccgacguggaccugggcgacaucuccgggaucaacgccagcguggucaacauccagaaggagaucgaccgccugaacgagguggccaagaaccucaacgagucccugaucgaccugcaggagcucggcaaguacgagcaguacaucaaguggcccugguacaucuggcugggcuucaucgccgggcugaucgcgaucgugauggucaccaucaugcucugcugcaugaccagcugcugcuccugccugaagggcugcugcagcugcggguccugcugcaaguucgacgaggacgacagcgagccggugcugaagggcgugaagcuccacuacacgugauaauaggcuggagccucgguggccuagcuucuugccccuugggccuccccccagccccuccuccccuuccugcacccguacccccguggucuuugaauaaagucugagugggcggcaaaaaaaaaaaaaaaaaaaaaaaaaaaaaaaaaaaaaaaaaaaaaaaaaaaaaaaaaaaaaaaaaaaaaaaaaaaaaaaaaaaaaaaaaaaaaaaaaaaaucuag

SEQ ID NO: 26622 - RNA, 4100 nt, Artificial Sequence
  SARS-CoV-2/Wuhan/WIV05/2019__EPI_ISL_402128 spike protein mRNA gc (1-1273)(K986P_V987P_Y453F_D614G)
gggaaauaagagagaaaagaagaguaagaagaaauauaagaccccggcgccgccaccauguucguguuccugguccuccugccccuggugagcucccagugcgugaaccucaccacccgcacgcagcugccgcccgccuacaccaacagcuucacccggggcgucuacuaccccgacaagguguuccgcuccagcgugcugcacuccacccaggaccucuuccugcccuucuucagcaacgucacgugguuccacgccauccacguguccgggaccaacggcaccaagcgguucgacaacccggugcugcccuucaacgacggggucuacuucgcgagcaccgagaaguccaacaucauccgcggcuggaucuucgggacgacccucgacagcaagacccagucccugcugaucgugaacaacgccaccaacguggucaucaaggugugcgaguuccaguucugcaacgaccccuuccucggcguguacuaccacaagaacaacaagagcuggauggaguccgaguuccgggucuacagcuccgccaacaacugcacguucgaguacgugagccagcccuuccugauggaccuggagggcaagcaggggaacuucaagaaccuccgcgaguucguguucaagaacaucgacggcuacuucaagaucuacuccaagcacaccccgaucaaccugguccgggaccugccccagggguucagcgcccucgagccccugguggaccugcccaucggcaucaacaucacccgcuuccagacccuccuggcccugcaccgguccuaccucacgccgggggacagcagcuccggcuggaccgcgggcgccgccgccuacuacgugggguaccugcagccccgcaccuuccugcucaaguacaacgagaacggcaccaucacggacgcggucgacugcgcccuggacccccugagcgagaccaagugcacccucaaguccuucaccguggagaaggggaucuaccagacgagcaacuuccgggugcagcccaccgaguccaucguccgcuucccgaacaucaccaaccugugccccuucggcgagguguucaacgccacccgguucgccagcgucuacgccuggaaccgcaagcggaucuccaacugcguggcggacuacagcgugcuguacaacuccgccagcuucuccacguucaagugcuacggcgucagccccaccaagcucaacgaccugugcuucaccaacguguacgccgacuccuucgugauccgcggggacgagguccggcagaucgcccccggccagaccgggaagaucgccgacuacaacuacaagcugccggacgacuucacgggcugcgugaucgcguggaacagcaacaaccucgacuccaaggucgggggcaacuacaacuaccuguuccgccuguuccgcaagagcaaccucaagcccuucgagcgggacaucuccaccgagaucuaccaggccggcagcacccccugcaacgggguggagggcuucaacugcuacuucccccugcaguccuacggguuccagccgaccaacggcgugggguaccagcccuaccggguggucgugcugagcuucgagcuccugcacgcccccgccacggugugcggccccaagaaguccaccaaccuggucaagaacaagugcgugaacuucaacuucaacggccucaccgggaccggcgugcugaccgagagcaacaagaaguuccugccguuccagcaguucgggcgcgacaucgccgacacgaccgacgcgguccgcgacccccagacccuggagauccucgacaucacccccugcagcuucggcgggguguccgugaucacgccgggcaccaacaccagcaaccaggucgccgugcuguaccagggcgugaacugcaccgagguccccguggccauccacgccgaccagcugacgcccaccuggcggguguacuccaccgggagcaacgucuuccagacccgcgccggcugccucaucggggcggagcacgugaacaacuccuacgagugcgacauccccaucggcgccggcaucugcgccagcuaccagacgcagaccaacuccccgcggcgcgcccggagcguggcgucccagagcaucaucgccuacaccaugucccugggggccgagaacagcgucgccuacuccaacaacagcaucgccauccccaccaacuucacgaucuccgugaccaccgagauccugcccgugagcaugaccaagacgagcgucgacugcaccauguacaucugcggcgacuccaccgagugcagcaaccuccugcugcaguacggguccuucugcacccagcucaaccgcgcgcugacgggcaucgccguggagcaggacaagaacacccaggagguguucgcccaggucaagcagaucuacaagacgcccccgaucaaggacuucgggggcuucaacuucagccagauccugcccgaccccuccaagcccagcaagcgguccuucaucgaggaccuccuguucaacaaggugacccuggccgacgccggcuucaucaagcaguacggggacugccucggcgacaucgcggcccgcgaccugaucugcgcccagaaguucaacgggcugaccgugcucccgccccugcugaccgacgagaugaucgcccaguacaccagcgcccuccuggcgggcaccaucacguccggguggaccuucggcgccggcgccgcccugcagauccccuucgcgaugcagauggccuaccgguucaacgggaucggcgucacccagaacgugcucuacgagaaccagaagcugaucgccaaccaguucaacagcgccaucgggaagauccaggacucccugagcuccaccgccagcgcgcucggcaagcugcaggacguggucaaccagaacgcccaggcccugaacacgcucgugaagcagcuguccagcaacuucggggccaucuccagcgugcugaacgacauccucucccgccuggacccgcccgaggccgagguccagaucgaccggcugaucaccggccgccuccagagccugcagaccuacgugacccagcagcugauccgggcggccgagauccgcgccagcgccaaccucgccgcgaccaagauguccgagugcgugcugggccagagcaagcgggucgacuucugcgggaagggcuaccaccugauguccuucccccagagcgcgccccacggggugguguuccuccacgucacguacgugcccgcccaggagaagaacuucaccaccgccccggccaucugccacgacggcaaggcccacuucccccgcgagggggucuucguguccaacggcacccacugguucgugacgcagcggaacuucuacgagccccagaucaucaccaccgacaacaccuucgucagcggcaacugcgacguggugaucgggaucgucaacaacacgguguacgacccccugcagccggagcuggacuccuucaaggaggagcucgacaaguacuucaagaaccacaccagccccgacguggaccugggcgacaucuccgggaucaacgccagcgucgugaacauccagaaggagaucgaccgccugaacgagguggccaagaaccucaacgagucccugaucgaccugcaggagcucggcaaguacgagcaguacaucaaguggcccugguacaucuggcugggcuucaucgccgggcugaucgcgaucgucauggugaccaucaugcucugcugcaugaccagcugcugcuccugccugaagggcugcugcagcugcggguccugcugcaaguucgacgaggacgacagcgagccggugcugaagggcgucaagcuccacuacacgugauaauaggcuggagccucgguggccuagcuucuugccccuugggccuccccccagccccuccuccccuuccugcacccguacccccguggucuuugaauaaagucugagugggcggcaaaaaaaaaaaaaaaaaaaaaaaaaaaaaaaaaaaaaaaaaaaaaaaaaaaaaaaaaaaaaaaaaaaaaaaaaaaaaaaaaaaaaaaaaaaaaaaaaaaaucuag

SEQ ID NO: 26623 - RNA, 4100 nt, Artificial Sequence
  SARS-CoV-2/Wuhan/WIV05/2019__EPI_ISL_402128 spike protein mRNA gc (1-1273)(K986P_V987P_D614G_I692V)
gggaaauaagagagaaaagaagaguaagaagaaauauaagaccccggcgccgccaccauguucguguuccugguccuccugccccuggugagcucccagugcgugaaccucaccacccgcacgcagcugccgcccgccuacaccaacagcuucacccggggcgucuacuaccccgacaagguguuccgcuccagcgugcugcacuccacccaggaccucuuccugcccuucuucagcaacgucacgugguuccacgccauccacguguccgggaccaacggcaccaagcgguucgacaacccggugcugcccuucaacgacggggucuacuucgcgagcaccgagaaguccaacaucauccgcggcuggaucuucgggacgacccucgacagcaagacccagucccugcugaucgugaacaacgccaccaacguggucaucaaggugugcgaguuccaguucugcaacgaccccuuccucggcguguacuaccacaagaacaacaagagcuggauggaguccgaguuccgggucuacagcuccgccaacaacugcacguucgaguacgugagccagcccuuccugauggaccuggagggcaagcaggggaacuucaagaaccuccgcgaguucguguucaagaacaucgacggcuacuucaagaucuacuccaagcacaccccgaucaaccugguccgggaccugccccagggguucagcgcccucgagccccugguggaccugcccaucggcaucaacaucacccgcuuccagacccuccuggcccugcaccgguccuaccucacgccgggggacagcagcuccggcuggaccgcgggcgccgccgccuacuacgugggguaccugcagccccgcaccuuccugcucaaguacaacgagaacggcaccaucacggacgcggucgacugcgcccuggacccccugagcgagaccaagugcacccucaaguccuucaccguggagaaggggaucuaccagacgagcaacuuccgggugcagcccaccgaguccaucguccgcuucccgaacaucaccaaccugugccccuucggcgagguguucaacgccacccgguucgccagcgucuacgccuggaaccgcaagcggaucuccaacugcguggcggacuacagcgugcuguacaacuccgccagcuucuccacguucaagugcuacggcgucagccccaccaagcucaacgaccugugcuucaccaacguguacgccgacuccuucgugauccgcggggacgagguccggcagaucgcccccggccagaccgggaagaucgccgacuacaacuacaagcugccggacgacuucacgggcugcgugaucgcguggaacagcaacaaccucgacuccaaggucgggggcaacuacaacuaccuguaccgccuguuccgcaagagcaaccucaagcccuucgagcgggacaucuccaccgagaucuaccaggccggcagcacccccugcaacgggguggagggcuucaacugcuacuucccccugcaguccuacggguuccagccgaccaacggcgugggguaccagcccuaccggguggucgugcugagcuucgagcuccugcacgcccccgccacggugugcggccccaagaaguccaccaaccuggucaagaacaagugcgugaacuucaacuucaacggccucaccgggaccggcgugcugaccgagagcaacaagaaguuccugccguuccagcaguucgggcgcgacaucgccgacacgaccgacgcgguccgcgacccccagacccuggagauccucgacaucacccccugcagcuucggcgggguguccgugaucacgccgggcaccaacaccagcaaccaggucgccgugcuguaccagggcgugaacugcaccgagguccccguggccauccacgccgaccagcugacgcccaccuggcggguguacuccaccgggagcaacgucuuccagacccgcgccggcugccucaucggggcggagcacgugaacaacuccuacgagugcgacauccccaucggcgccggcaucugcgccagcuaccagacgcagaccaacuccccgcggcgcgcccggagcguggcgucccagagcgucaucgccuacaccaugucccugggggccgagaacagcguggccuacuccaacaacagcaucgccauccccaccaacuucacgaucuccgugaccaccgagauccugcccgucagcaugaccaagacgagcguggacugcaccauguacaucugcggcgacuccaccgagugcagcaaccuccugcugcaguacggguccuucugcacccagcucaaccgcgcgcugacgggcaucgccguggagcaggacaagaacacccaggaggucuucgcccaggugaagcagaucuacaagacgcccccgaucaaggacuucgggggcuucaacuucagccagauccugcccgaccccuccaagcccagcaagcgguccuucaucgaggaccuccuguucaacaaggugacccuggccgacgccggcuucaucaagcaguacggggacugccucggcgacaucgcggcccgcgaccugaucugcgcccagaaguucaacgggcugaccguccucccgccccugcugaccgacgagaugaucgcccaguacaccagcgcccuccuggcgggcaccaucacguccggguggaccuucggcgccggcgccgcccugcagauccccuucgcgaugcagauggccuaccgguucaacgggaucggcgugacccagaacgugcucuacgagaaccagaagcugaucgccaaccaguucaacagcgccaucgggaagauccaggacucccugagcuccaccgccagcgcgcucggcaagcugcaggacgucgugaaccagaacgcccaggcccugaacacgcucgugaagcagcuguccagcaacuucggggccaucuccagcguccugaacgacauccucucccgccuggacccgcccgaggccgaggugcagaucgaccggcugaucaccggccgccuccagagccugcagaccuacgugacccagcagcugauccgggcggccgagauccgcgccagcgccaaccucgccgcgaccaagauguccgagugcguccugggccagagcaagcggguggacuucugcgggaagggcuaccaccugauguccuucccccagagcgcgccccacgggguggucuuccuccacgugacguacguccccgcccaggagaagaacuucaccaccgccccggccaucugccacgacggcaaggcccacuucccccgcgaggggguguucguguccaacggcacccacugguucgucacgcagcggaacuucuacgagccccagaucaucaccaccgacaacaccuucgugagcggcaacugcgacguggucaucgggaucgugaacaacacgguguacgacccccugcagccggagcuggacuccuucaaggaggagcucgacaaguacuucaagaaccacaccagccccgacgucgaccugggcgacaucuccgggaucaacgccagcguggugaacauccagaaggagaucgaccgccugaacgaggucgccaagaaccucaacgagucccugaucgaccugcaggagcucggcaaguacgagcaguacaucaaguggcccugguacaucuggcugggcuucaucgccgggcugaucgcgaucgugauggugaccaucaugcucugcugcaugaccagcugcugcuccugccugaagggcugcugcagcugcggguccugcugcaaguucgacgaggacgacagcgagccgguccugaagggcgugaagcuccacuacacgugauaauaggcuggagccucgguggccuagcuucuugccccuugggccuccccccagccccuccuccccuuccugcacccguacccccguggucuuugaauaaagucugagugggcggcaaaaaaaaaaaaaaaaaaaaaaaaaaaaaaaaaaaaaaaaaaaaaaaaaaaaaaaaaaaaaaaaaaaaaaaaaaaaaaaaaaaaaaaaaaaaaaaaaaaaucuag

SEQ ID NO: 26624 - RNA, 4100 nt, Artificial Sequence
  SARS-CoV-2/Wuhan/WIV05/2019__EPI_ISL_402128 spike protein mRNA gc (1-1273)(K986P_V987P_D614G_M1229I)
gggaaauaagagagaaaagaagaguaagaagaaauauaagaccccggcgccgccaccauguucguguuccugguccuccugccccuggugagcucccagugcgugaaccucaccacccgcacgcagcugccgcccgccuacaccaacagcuucacccggggcgucuacuaccccgacaagguguuccgcuccagcgugcugcacuccacccaggaccucuuccugcccuucuucagcaacgucacgugguuccacgccauccacguguccgggaccaacggcaccaagcgguucgacaacccggugcugcccuucaacgacggggucuacuucgcgagcaccgagaaguccaacaucauccgcggcuggaucuucgggacgacccucgacagcaagacccagucccugcugaucgugaacaacgccaccaacguggucaucaaggugugcgaguuccaguucugcaacgaccccuuccucggcguguacuaccacaagaacaacaagagcuggauggaguccgaguuccgggucuacagcuccgccaacaacugcacguucgaguacgugagccagcccuuccugauggaccuggagggcaagcaggggaacuucaagaaccuccgcgaguucguguucaagaacaucgacggcuacuucaagaucuacuccaagcacaccccgaucaaccugguccgggaccugccccagggguucagcgcccucgagccccugguggaccugcccaucggcaucaacaucacccgcuuccagacccuccuggcccugcaccgguccuaccucacgccgggggacagcagcuccggcuggaccgcgggcgccgccgccuacuacgugggguaccugcagccccgcaccuuccugcucaaguacaacgagaacggcaccaucacggacgcggucgacugcgcccuggacccccugagcgagaccaagugcacccucaaguccuucaccguggagaaggggaucuaccagacgagcaacuuccgggugcagcccaccgaguccaucguccgcuucccgaacaucaccaaccugugccccuucggcgagguguucaacgccacccgguucgccagcgucuacgccuggaaccgcaagcggaucuccaacugcguggcggacuacagcgugcuguacaacuccgccagcuucuccacguucaagugcuacggcgucagccccaccaagcucaacgaccugugcuucaccaacguguacgccgacuccuucgugauccgcggggacgagguccggcagaucgcccccggccagaccgggaagaucgccgacuacaacuacaagcugccggacgacuucacgggcugcgugaucgcguggaacagcaacaaccucgacuccaaggucgggggcaacuacaacuaccuguaccgccuguuccgcaagagcaaccucaagcccuucgagcgggacaucuccaccgagaucuaccaggccggcagcacccccugcaacgggguggagggcuucaacugcuacuucccccugcaguccuacggguuccagccgaccaacggcgugggguaccagcccuaccggguggucgugcugagcuucgagcuccugcacgcccccgccacggugugcggccccaagaaguccaccaaccuggucaagaacaagugcgugaacuucaacuucaacggccucaccgggaccggcgugcugaccgagagcaacaagaaguuccugccguuccagcaguucgggcgcgacaucgccgacacgaccgacgcgguccgcgacccccagacccuggagauccucgacaucacccccugcagcuucggcgggguguccgugaucacgccgggcaccaacaccagcaaccaggucgccgugcuguaccagggcgugaacugcaccgagguccccguggccauccacgccgaccagcugacgcccaccuggcggguguacuccaccgggagcaacgucuuccagacccgcgccggcugccucaucggggcggagcacgugaacaacuccuacgagugcgacauccccaucggcgccggcaucugcgccagcuaccagacgcagaccaacuccccgcggcgcgcccggagcguggcgucccagagcaucaucgccuacaccaugucccugggggccgagaacagcgucgccuacuccaacaacagcaucgccauccccaccaacuucacgaucuccgugaccaccgagauccugcccgugagcaugaccaagacgagcgucgacugcaccauguacaucugcggcgacuccaccgagugcagcaaccuccugcugcaguacggguccuucugcacccagcucaaccgcgcgcugacgggcaucgccguggagcaggacaagaacacccaggagguguucgcccaggucaagcagaucuacaagacgcccccgaucaaggacuucgggggcuucaacuucagccagauccugcccgaccccuccaagcccagcaagcgguccuucaucgaggaccuccuguucaacaaggugacccuggccgacgccggcuucaucaagcaguacggggacugccucggcgacaucgcggcccgcgaccugaucugcgcccagaaguucaacgggcugaccgugcucccgccccugcugaccgacgagaugaucgcccaguacaccagcgcccuccuggcgggcaccaucacguccggguggaccuucggcgccggcgccgcccugcagauccccuucgcgaugcagauggccuaccgguucaacgggaucggcgucacccagaacgugcucuacgagaaccagaagcugaucgccaaccaguucaacagcgccaucgggaagauccaggacucccugagcuccaccgccagcgcgcucggcaagcugcaggacguggucaaccagaacgcccaggcccugaacacgcucgugaagcagcuguccagcaacuucggggccaucuccagcgugcugaacgacauccucucccgccuggacccgcccgaggccgagguccagaucgaccggcugaucaccggccgccuccagagccugcagaccuacgugacccagcagcugauccgggcggccgagauccgcgccagcgccaaccucgccgcgaccaagauguccgagugcgugcugggccagagcaagcgggucgacuucugcgggaagggcuaccaccugauguccuucccccagagcgcgccccacggggugguguuccuccacgucacguacgugcccgcccaggagaagaacuucaccaccgccccggccaucugccacgacggcaaggcccacuucccccgcgagggggucuucguguccaacggcacccacugguucgugacgcagcggaacuucuacgagccccagaucaucaccaccgacaacaccuucgucagcggcaacugcgacguggugaucgggaucgucaacaacacgguguacgacccccugcagccggagcuggacuccuucaaggaggagcucgacaaguacuucaagaaccacaccagccccgacguggaccugggcgacaucuccgggaucaacgccagcgucgugaacauccagaaggagaucgaccgccugaacgagguggccaagaaccucaacgagucccugaucgaccugcaggagcucggcaaguacgagcaguacaucaaguggcccugguacaucuggcugggcuucaucgccgggcugaucgcgaucgucaucgugaccaucaugcucugcugcaugaccagcugcugcuccugccugaagggcugcugcagcugcggguccugcugcaaguucgacgaggacgacagcgagccggugcugaagggcgucaagcuccacuacacgugauaauaggcuggagccucgguggccuagcuucuugccccuugggccuccccccagccccuccuccccuuccugcacccguacccccguggucuuugaauaaagucugagugggcggcaaaaaaaaaaaaaaaaaaaaaaaaaaaaaaaaaaaaaaaaaaaaaaaaaaaaaaaaaaaaaaaaaaaaaaaaaaaaaaaaaaaaaaaaaaaaaaaaaaaaucuag

SEQ ID NO: 26625 - RNA, 4094 nt, Artificial Sequence
  SARS-CoV-2/Wuhan/WIV05/2019__EPI_ISL_402128 spike protein mRNA gc (1-1273)(K986P_V987P_H69del_V70del_A222V_Y453F_S477N_D614G_I692V)
gggaaauaagagagaaaagaagaguaagaagaaauauaagaccccggcgccgccaccauguucguguuccugguccuccugccccuggugagcucccagugcgugaaccucaccacccgcacgcagcugccgcccgccuacaccaacagcuucacccggggcgucuacuaccccgacaagguguuccgcuccagcgugcugcacuccacccaggaccucuuccugcccuucuucagcaacgucacgugguuccacgccaucuccgggaccaacggcaccaagcgguucgacaacccggugcugcccuucaacgacgggguguacuucgcgagcaccgagaaguccaacaucauccgcggcuggaucuucgggacgacccucgacagcaagacccagucccugcugaucgucaacaacgccaccaacguggugaucaaggucugcgaguuccaguucugcaacgaccccuuccucggcguguacuaccacaagaacaacaagagcuggauggaguccgaguuccggguguacagcuccgccaacaacugcacguucgaguacgucagccagcccuuccugauggaccuggagggcaagcaggggaacuucaagaaccuccgcgaguucguguucaagaacaucgacggcuacuucaagaucuacuccaagcacaccccgaucaaccuggugcgggaccugccccagggguucagcguccucgagccccugguggaccugcccaucggcaucaacaucacccgcuuccagacccuccuggcccugcaccgguccuaccucacgccgggggacagcagcuccggcuggaccgccggcgcggccgccuacuacgugggguaccugcagccccgcaccuuccugcucaaguacaacgagaacggcaccaucacggacgccgucgacugcgcgcuggacccccugagcgagaccaagugcacccucaaguccuucaccguggagaaggggaucuaccagacgagcaacuuccgggugcagcccaccgaguccaucguccgcuucccgaacaucaccaaccugugccccuucggcgagguguucaacgccacccgguucgccagcgucuacgccuggaaccgcaagcggaucuccaacugcguggccgacuacagcgugcuguacaacuccgcgagcuucuccacguucaagugcuacggcgucagccccaccaagcucaacgaccugugcuucaccaacguguacgccgacuccuucgugauccgcggggacgagguccggcagaucgcccccggccagaccgggaagaucgccgacuacaacuacaagcugccggacgacuucacgggcugcgugaucgccuggaacagcaacaaccucgacuccaaggucgggggcaacuacaacuaccuguuccgccuguuccgcaagagcaaccucaagcccuucgagcgggacaucuccaccgagaucuaccaggcgggcaacacccccugcaacgggguggagggcuucaacugcuacuucccccugcagagcuacggguuccagccgaccaacggcgugggguaccagcccuaccggguggucgugcuguccuucgagcuccugcacgcccccgccacggugugcggccccaagaaguccaccaaccuggucaagaacaagugcgugaacuucaacuucaacggccucaccgggaccggcgugcugaccgagagcaacaagaaguuccugccguuccagcaguucgggcgcgacaucgccgacacgaccgacgccguccgcgacccccagacccuggagauccucgacaucacccccugcagcuucggcggggugagcgugaucacgccgggcaccaacaccuccaaccaggucgcggugcuguaccagggcgugaacugcaccgagguccccguggccauccacgccgaccagcugacgcccaccuggcggguguacagcaccggguccaacgucuuccagacccgcgccggcugccucaucggggccgagcacgugaacaacagcuacgagugcgacauccccaucggcgcgggcaucugcgccuccuaccagacgcagaccaacagcccgcggcgcgcccgguccguggccagccaguccgucaucgcguacaccaugagccugggggccgagaacuccguggccuacagcaacaacuccaucgccauccccaccaacuucacgaucagcgugaccaccgagauccugcccgucuccaugaccaagacgagcguggacugcaccauguacaucugcggcgacagcaccgagugcuccaaccuccugcugcaguacgggagcuucugcacccagcucaaccgcgcccugacgggcaucgcgguggagcaggacaagaacacccaggaggucuucgcccaggugaagcagaucuacaagacgcccccgaucaaggacuucgggggcuucaacuucucccagauccugcccgaccccagcaagcccuccaagcggagcuucaucgaggaccuccuguucaacaaggugacccuggccgacgccggcuucaucaagcaguacggggacugccucggcgacaucgccgcgcgcgaccugaucugcgcccagaaguucaacgggcugaccguccucccgccccugcugaccgacgagaugaucgcccaguacaccuccgcccuccuggccggcaccaucacgagcggguggaccuucggcgcgggcgccgcccugcagauccccuucgccaugcagauggcguaccgguucaacgggaucggcgugacccagaacgugcucuacgagaaccagaagcugaucgccaaccaguucaacuccgccaucgggaagauccaggacagccuguccagcaccgccuccgcccucggcaagcugcaggacgucgugaaccagaacgcgcaggcccugaacacgcucgugaagcagcugagcuccaacuucggggccaucagcuccguccugaacgacauccucagccgccuggacccgcccgaggccgaggugcagaucgaccggcugaucaccggccgccuccagucccugcagaccuacgugacccagcagcugauccgggccgcggagauccgcgccagcgccaaccucgccgccaccaagaugagcgagugcguccugggccaguccaagcggguggacuucugcgggaagggcuaccaccugaugagcuucccccaguccgcgccccacgggguggucuuccuccacgugacguacguccccgcccaggagaagaacuucaccaccgccccggccaucugccacgacggcaaggcgcacuucccccgcgaggggguguucgugagcaacggcacccacugguucgucacgcagcggaacuucuacgagccccagaucaucaccaccgacaacaccuucguguccggcaacugcgacguggucaucgggaucgugaacaacacgguguacgacccccugcagccggagcuggacagcuucaaggaggagcucgacaaguacuucaagaaccacaccucccccgacgucgaccugggcgacaucagcgggaucaacgccuccguggugaacauccagaaggagaucgaccgccugaacgaggucgccaagaaccucaacgagagccugaucgaccugcaggagcucggcaaguacgagcaguacaucaaguggcccugguacaucuggcugggcuucaucgccgggcugaucgccaucgugauggugaccaucaugcucugcugcaugaccuccugcugcagcugccugaagggcugcugcuccugcgggagcugcugcaaguucgacgaggacgacuccgagccgguccugaagggcgugaagcuccacuacacgugauaauaggcuggagccucgguggccuagcuucuugccccuugggccuccccccagccccuccuccccuuccugcacccguacccccguggucuuugaauaaagucugagugggcggcaaaaaaaaaaaaaaaaaaaaaaaaaaaaaaaaaaaaaaaaaaaaaaaaaaaaaaaaaaaaaaaaaaaaaaaaaaaaaaaaaaaaaaaaaaaaaaaaaaaaucuag

SEQ ID NO: 26626 - RNA, 4094 nt, Artificial Sequence
  SARS-CoV-2/Wuhan/WIV05/2019__EPI_ISL_402128 spike protein mRNA gc (1-1273)(K986P_V987P_H69del_V70del_Y453F_D614G_I692V_M1229I)
gggaaauaagagagaaaagaagaguaagaagaaauauaagaccccggcgccgccaccauguucguguuccugguccuccugccccuggugagcucccagugcgugaaccucaccacccgcacgcagcugccgcccgccuacaccaacagcuucacccggggcgucuacuaccccgacaagguguuccgcuccagcgugcugcacuccacccaggaccucuuccugcccuucuucagcaacgucacgugguuccacgccaucuccgggaccaacggcaccaagcgguucgacaacccggugcugcccuucaacgacgggguguacuucgcgagcaccgagaaguccaacaucauccgcggcuggaucuucgggacgacccucgacagcaagacccagucccugcugaucgucaacaacgccaccaacguggugaucaaggucugcgaguuccaguucugcaacgaccccuuccucggcguguacuaccacaagaacaacaagagcuggauggaguccgaguuccggguguacagcuccgccaacaacugcacguucgaguacgucagccagcccuuccugauggaccuggagggcaagcaggggaacuucaagaaccuccgcgaguucguguucaagaacaucgacggcuacuucaagaucuacuccaagcacaccccgaucaaccuggugcgggaccugccccagggguucagcgcccucgagccccuggucgaccugcccaucggcaucaacaucacccgcuuccagacccuccuggcccugcaccgguccuaccucacgccgggggacagcagcuccggcuggaccgcgggcgccgccgccuacuacgugggguaccugcagccccgcaccuuccugcucaaguacaacgagaacggcaccaucacggacgcgguggacugcgcccuggacccccugagcgagaccaagugcacccucaaguccuucaccgucgagaaggggaucuaccagacgagcaacuuccgggugcagcccaccgaguccaucgugcgcuucccgaacaucaccaaccugugccccuucggcgaggucuucaacgccacccgguucgccagcguguacgccuggaaccgcaagcggaucuccaacugcgucgcggacuacagcgugcuguacaacuccgccagcuucuccacguucaagugcuacggcgugagccccaccaagcucaacgaccugugcuucaccaacgucuacgccgacuccuucgugauccgcggggacgaggugcggcagaucgcccccggccagaccgggaagaucgccgacuacaacuacaagcugccggacgacuucacgggcugcgucaucgcguggaacagcaacaaccucgacuccaaggucgggggcaacuacaacuaccuguuccgccuguuccgcaagagcaaccucaagcccuucgagcgggacaucuccaccgagaucuaccaggccggcagcacccccugcaacgggguggagggcuucaacugcuacuucccccugcaguccuacggguuccagccgaccaacggcgugggguaccagcccuaccggguggugguccugagcuucgagcuccugcacgcccccgccacggugugcggccccaagaaguccaccaaccuggugaagaacaagugcgucaacuucaacuucaacggccucaccgggaccggcgugcugaccgagagcaacaagaaguuccugccguuccagcaguucgggcgcgacaucgccgacacgaccgacgcggugcgcgacccccagacccuggagauccucgacaucacccccugcagcuucggcggggucuccgugaucacgccgggcaccaacaccagcaaccagguggccguccuguaccagggcgugaacugcaccgaggugcccgucgccauccacgccgaccagcugacgcccaccuggcggguguacuccaccgggagcaacguguuccagacccgcgccggcugccucaucggggcggagcacgucaacaacuccuacgagugcgacauccccaucggcgccggcaucugcgccagcuaccagacgcagaccaacuccccgcggcgcgcccggagcguggcgucccagagcgugaucgccuacaccaugucccugggggccgagaacagcgucgccuacuccaacaacagcaucgccauccccaccaacuucacgaucuccgugaccaccgagauccugcccgugagcaugaccaagacgagcgucgacugcaccauguacaucugcggcgacuccaccgagugcagcaaccuccugcugcaguacggguccuucugcacccagcucaaccgcgcgcugacgggcaucgccguggagcaggacaagaacacccaggagguguucgcccaggucaagcagaucuacaagacgcccccgaucaaggacuucgggggcuucaacuucagccagauccugcccgaccccuccaagcccagcaagcgguccuucaucgaggaccuccuguucaacaaggugacccuggccgacgccggcuucaucaagcaguacggggacugccucggcgacaucgcggcccgcgaccugaucugcgcccagaaguucaacgggcugaccgugcucccgccccugcugaccgacgagaugaucgcccaguacaccagcgcccuccuggcgggcaccaucacguccggguggaccuucggcgccggcgccgcccugcagauccccuucgcgaugcagauggccuaccgguucaacgggaucggcgucacccagaacgugcucuacgagaaccagaagcugaucgccaaccaguucaacagcgccaucgggaagauccaggacucccugagcuccaccgccagcgcgcucggcaagcugcaggacguggucaaccagaacgcccaggcccugaacacgcucgugaagcagcuguccagcaacuucggggccaucuccagcgugcugaacgacauccucucccgccuggacccgcccgaggccgagguccagaucgaccggcugaucaccggccgccuccagagccugcagaccuacgugacccagcagcugauccgggcggccgagauccgcgccagcgccaaccucgccgcgaccaagauguccgagugcgugcugggccagagcaagcgggucgacuucugcgggaagggcuaccaccugauguccuucccccagagcgcgccccacggggugguguuccuccacgucacguacgugcccgcccaggagaagaacuucaccaccgccccggccaucugccacgacggcaaggcccacuucccccgcgagggggucuucguguccaacggcacccacugguucgugacgcagcggaacuucuacgagccccagaucaucaccaccgacaacaccuucgucagcggcaacugcgacguggugaucgggaucgucaacaacacgguguacgacccccugcagccggagcuggacuccuucaaggaggagcucgacaaguacuucaagaaccacaccagccccgacguggaccugggcgacaucuccgggaucaacgccagcgucgugaacauccagaaggagaucgaccgccugaacgagguggccaagaaccucaacgagucccugaucgaccugcaggagcucggcaaguacgagcaguacaucaaguggcccugguacaucuggcugggcuucaucgccgggcugaucgcgaucgucaucgugaccaucaugcucugcugcaugaccagcugcugcuccugccugaagggcugcugcagcugcggguccugcugcaaguucgacgaggacgacagcgagccggugcugaagggcgucaagcuccacuacacgugauaauaggcuggagccucgguggccuagcuucuugccccuugggccuccccccagccccuccuccccuuccugcacccguacccccguggucuuugaauaaagucugagugggcggcaaaaaaaaaaaaaaaaaaaaaaaaaaaaaaaaaaaaaaaaaaaaaaaaaaaaaaaaaaaaaaaaaaaaaaaaaaaaaaaaaaaaaaaaaaaaaaaaaaaaucuag

SEQ ID NO: 26627 - RNA, 4091 nt, Artificial Sequence
  SARS-CoV-2/Wuhan/WIV05/2019__EPI_ISL_402128 spike protein mRNA gc (1-1273)(K986P_V987P_K986P_V987P_H69del_V70del_Y144del_N501Y_A570 D_D614G_P681H_T716I_S982A_D1118H)
gggaaauaagagagaaaagaagaguaagaagaaauauaagaccccggcgccgccaccauguucguguuccugguccuccugccccuggugagcucccagugcgugaaccucaccacccgcacgcagcugccgcccgccuacaccaacagcuucacccggggcgucuacuaccccgacaagguguuccgcuccagcgugcugcacuccacccaggaccucuuccugcccuucuucagcaacgucacgugguuccacgccaucuccgggaccaacggcaccaagcgguucgacaacccggugcugcccuucaacgacgggguguacuucgcgagcaccgagaaguccaacaucauccgcggcuggaucuucgggacgacccucgacagcaagacccagucccugcugaucgucaacaacgccaccaacguggugaucaaggucugcgaguuccaguucugcaacgaccccuuccucggcguguaccacaagaacaacaagagcuggauggaguccgaguuccggguguacagcuccgccaacaacugcacguucgaguacgucagccagcccuuccugauggaccuggagggcaagcaggggaacuucaagaaccuccgcgaguucguguucaagaacaucgacggcuacuucaagaucuacuccaagcacaccccgaucaaccuggugcgggaccugccccagggguucagcgcccucgagccccuggucgaccugcccaucggcaucaacaucacccgcuuccagacccuccuggcccugcaccgguccuaccucacgccgggggacagcagcuccggcuggaccgcgggcgccgccgccuacuacgugggguaccugcagccccgcaccuuccugcucaaguacaacgagaacggcaccaucacggacgcgguggacugcgcccuggacccccugagcgagaccaagugcacccucaaguccuucaccgucgagaaggggaucuaccagacgagcaacuuccgggugcagcccaccgaguccaucgugcgcuucccgaacaucaccaaccugugccccuucggcgaggucuucaacgccacccgguucgccagcguguacgccuggaaccgcaagcggaucuccaacugcgucgcggacuacagcgugcuguacaacuccgccagcuucuccacguucaagugcuacggcgugagccccaccaagcucaacgaccugugcuucaccaacgucuacgccgacuccuucgugauccgcggggacgaggugcggcagaucgcccccggccagaccgggaagaucgccgacuacaacuacaagcugccggacgacuucacgggcugcgucaucgcguggaacagcaacaaccucgacuccaaggucgggggcaacuacaacuaccuguaccgccuguuccgcaagagcaaccucaagcccuucgagcgggacaucuccaccgagaucuaccaggccggcagcacccccugcaacgggguggagggcuucaacugcuacuucccccugcaguccuacggguuccagccgaccuacggcgugggguaccagcccuaccggguggugguccugagcuucgagcuccugcacgcccccgccacggugugcggccccaagaaguccaccaaccuggugaagaacaagugcgucaacuucaacuucaacggccucaccgggaccggcgugcugaccgagagcaacaagaaguuccugccguuccagcaguucgggcgcgacaucgacgacacgaccgacgccgugcgcgacccccagacccuggagauccucgacaucacccccugcagcuucggcggggucuccgugaucacgccgggcaccaacaccagcaaccagguggcgguccuguaccagggcgugaacugcaccgaggugcccgucgccauccacgccgaccagcugacgcccaccuggcggguguacuccaccgggagcaacguguuccagacccgcgccggcugccucaucggggccgagcacgucaacaacuccuacgagugcgacauccccaucggcgcgggcaucugcgccagcuaccagacgcagaccaacucccaccggcgcgcccggagcguggccucccagagcaucaucgcguacaccaugucccugggggccgagaacagcguggccuacuccaacaacagcaucgccaucccgaucaacuucaccaucuccgucacgaccgagauccugcccgugagcaugaccaagaccagcguggacugcacgauguacaucugcggcgacuccaccgagugcagcaaccuccugcugcaguacggguccuucugcacccagcucaaccgcgcccugaccggcaucgcggucgagcaggacaagaacacgcaggagguguucgcccaggugaagcagaucuacaagaccccgcccaucaaggacuucgggggcuucaacuucagccagauccugcccgaccccuccaagcccagcaagcgguccuucaucgaggaccuccuguucaacaaggucacccuggccgacgccggcuucaucaagcaguacggggacugccucggcgacaucgccgcgcgcgaccugaucugcgcccagaaguucaacgggcugaccgugcugcccccgcuccugacggacgagaugaucgcccaguacaccagcgcccuccuggccggcaccaucaccuccggguggacguucggcgcgggcgccgcccugcagauccccuucgccaugcagauggcguaccgguucaacgggaucggcgugacccagaacguccucuacgagaaccagaagcugaucgccaaccaguucaacagcgccaucgggaagauccaggacucccugagcuccaccgccagcgcccucggcaagcugcaggacguggugaaccagaacgcgcaggcccugaacacccucgucaagcagcuguccagcaacuucggggccaucuccagcgugcugaacgacauccucgcccgccuggacccgcccgaggccgaggugcagaucgaccggcugaucacgggccgccuccagucccugcagaccuacgucacccagcagcugauccgggcggccgagauccgcgccagcgccaaccucgccgcgaccaagaugagcgagugcgugcugggccaguccaagcggguggacuucugcgggaagggcuaccaccugaugagcuucccccaguccgcgccccacggggucguguuccuccacgugaccuacguccccgcccaggagaagaacuucacgaccgcccccgccaucugccacgacggcaaggcccacuucccgcgcgaggggguguucgucagcaacggcacccacugguucgugacccagcggaacuucuacgagccccagaucaucacgacccacaacaccuucguguccggcaacugcgacgucgugaucgggaucgugaacaacaccgucuacgacccccugcagcccgagcuggacagcuucaaggaggagcucgacaaguacuucaagaaccacacguccccggacguggaccugggcgacaucagcgggaucaacgccuccguggucaacauccagaaggagaucgaccgccugaacgagguggccaagaaccucaacgagagccugaucgaccugcaggagcucggcaaguacgagcaguacaucaaguggcccugguacaucuggcugggcuucaucgccgggcugaucgcgaucgugauggucaccaucaugcucugcugcaugaccuccugcugcagcugccugaagggcugcugcuccugcgggagcugcugcaaguucgacgaggacgacuccgagcccgugcugaagggcgugaagcuccacuacaccugauaauaggcuggagccucgguggccuagcuucuugccccuugggccuccccccagccccuccuccccuuccugcacccguacccccguggucuuugaauaaagucugagugggcggcaaaaaaaaaaaaaaaaaaaaaaaaaaaaaaaaaaaaaaaaaaaaaaaaaaaaaaaaaaaaaaaaaaaaaaaaaaaaaaaaaaaaaaaaaaaaaaaaaaaaucuag

SEQ ID NO: 26628 - RNA, 4100 nt, Artificial Sequence
  SARS-CoV-2/Wuhan/WIV05/2019__EPI_ISL_402128 spike protein mRNA gc (1-1273)(K986P_V987P_K986P_V987P_K417N_E484K_N501Y_D614G)
gggaaauaagagagaaaagaagaguaagaagaaauauaagaccccggcgccgccaccauguucguguuccugguccuccugccccuggugagcucccagugcgugaaccucaccacccgcacgcagcugccgcccgccuacaccaacagcuucacccggggcgucuacuaccccgacaagguguuccgcuccagcgugcugcacuccacccaggaccucuuccugcccuucuucagcaacgucacgugguuccacgccauccacguguccgggaccaacggcaccaagcgguucgacaacccggugcugcccuucaacgacggggucuacuucgcgagcaccgagaaguccaacaucauccgcggcuggaucuucgggacgacccucgacagcaagacccagucccugcugaucgugaacaacgccaccaacguggucaucaaggugugcgaguuccaguucugcaacgaccccuuccucggcguguacuaccacaagaacaacaagagcuggauggaguccgaguuccgggucuacagcuccgccaacaacugcacguucgaguacgugagccagcccuuccugauggaccuggagggcaagcaggggaacuucaagaaccuccgcgaguucguguucaagaacaucgacggcuacuucaagaucuacuccaagcacaccccgaucaaccugguccgggaccugccccagggguucagcgcccucgagccccugguggaccugcccaucggcaucaacaucacccgcuuccagacccuccuggcccugcaccgguccuaccucacgccgggggacagcagcuccggcuggaccgcgggcgccgccgccuacuacgugggguaccugcagccccgcaccuuccugcucaaguacaacgagaacggcaccaucacggacgcggucgacugcgcccuggacccccugagcgagaccaagugcacccucaaguccuucaccguggagaaggggaucuaccagacgagcaacuuccgggugcagcccaccgaguccaucguccgcuucccgaacaucaccaaccugugccccuucggcgagguguucaacgccacccgguucgccagcgucuacgccuggaaccgcaagcggaucuccaacugcguggcggacuacagcgugcuguacaacuccgccagcuucuccacguucaagugcuacggcgucagccccaccaagcucaacgaccugugcuucaccaacguguacgccgacuccuucgugauccgcggggacgagguccggcagaucgcccccggccagaccgggaacaucgccgacuacaacuacaagcugccggacgacuucacgggcugcgugaucgcguggaacagcaacaaccucgacuccaaggucgggggcaacuacaacuaccuguaccgccuguuccgcaagagcaaccucaagcccuucgagcgggacaucuccaccgagaucuaccaggccggcagcacccccugcaacggggugaagggcuucaacugcuacuucccccugcaguccuacggguuccagccgaccuacggcgugggguaccagcccuaccggguggucgugcugagcuucgagcuccugcacgcccccgccacggugugcggccccaagaaguccaccaaccuggucaagaacaagugcgugaacuucaacuucaacggccucaccgggaccggcgugcugaccgagagcaacaagaaguuccugccguuccagcaguucgggcgcgacaucgccgacacgaccgacgcgguccgcgacccccagacccuggagauccucgacaucacccccugcagcuucggcgggguguccgugaucacgccgggcaccaacaccagcaaccaggucgccgugcuguaccagggcgugaacugcaccgagguccccguggccauccacgccgaccagcugacgcccaccuggcggguguacuccaccgggagcaacgucuuccagacccgcgccggcugccucaucggggcggagcacgugaacaacuccuacgagugcgacauccccaucggcgccggcaucugcgccagcuaccagacgcagaccaacuccccgcggcgcgcccggagcguggcgucccagagcaucaucgccuacaccaugucccugggggccgagaacagcgucgccuacuccaacaacagcaucgccauccccaccaacuucacgaucuccgugaccaccgagauccugcccgugagcaugaccaagacgagcgucgacugcaccauguacaucugcggcgacuccaccgagugcagcaaccuccugcugcaguacggguccuucugcacccagcucaaccgcgcgcugacgggcaucgccguggagcaggacaagaacacccaggagguguucgcccaggucaagcagaucuacaagacgcccccgaucaaggacuucgggggcuucaacuucagccagauccugcccgaccccuccaagcccagcaagcgguccuucaucgaggaccuccuguucaacaaggugacccuggccgacgccggcuucaucaagcaguacggggacugccucggcgacaucgcggcccgcgaccugaucugcgcccagaaguucaacgggcugaccgugcucccgccccugcugaccgacgagaugaucgcccaguacaccagcgcccuccuggcgggcaccaucacguccggguggaccuucggcgccggcgccgcccugcagauccccuucgcgaugcagauggccuaccgguucaacgggaucggcgucacccagaacgugcucuacgagaaccagaagcugaucgccaaccaguucaacagcgccaucgggaagauccaggacucccugagcuccaccgccagcgcgcucggcaagcugcaggacguggucaaccagaacgcccaggcccugaacacgcucgugaagcagcuguccagcaacuucggggccaucuccagcgugcugaacgacauccucucccgccuggacccgcccgaggccgagguccagaucgaccggcugaucaccggccgccuccagagccugcagaccuacgugacccagcagcugauccgggcggccgagauccgcgccagcgccaaccucgccgcgaccaagauguccgagugcgugcugggccagagcaagcgggucgacuucugcgggaagggcuaccaccugauguccuucccccagagcgcgccccacggggugguguuccuccacgucacguacgugcccgcccaggagaagaacuucaccaccgccccggccaucugccacgacggcaaggcccacuucccccgcgagggggucuucguguccaacggcacccacugguucgugacgcagcggaacuucuacgagccccagaucaucaccaccgacaacaccuucgucagcggcaacugcgacguggugaucgggaucgucaacaacacgguguacgacccccugcagccggagcuggacuccuucaaggaggagcucgacaaguacuucaagaaccacaccagccccgacguggaccugggcgacaucuccgggaucaacgccagcgucgugaacauccagaaggagaucgaccgccugaacgagguggccaagaaccucaacgagucccugaucgaccugcaggagcucggcaaguacgagcaguacaucaaguggcccugguacaucuggcugggcuucaucgccgggcugaucgcgaucgucauggugaccaucaugcucugcugcaugaccagcugcugcuccugccugaagggcugcugcagcugcggguccugcugcaaguucgacgaggacgacagcgagccggugcugaagggcgucaagcuccacuacacgugauaauaggcuggagccucgguggccuagcuucuugccccuugggccuccccccagccccuccuccccuuccugcacccguacccccguggucuuugaauaaagucugagugggcggcaaaaaaaaaaaaaaaaaaaaaaaaaaaaaaaaaaaaaaaaaaaaaaaaaaaaaaaaaaaaaaaaaaaaaaaaaaaaaaaaaaaaaaaaaaaaaaaaaaaaucuag

SEQ ID NO: 26629 - RNA, 4091 nt, Artificial Sequence
  SARS-CoV-2/Wuhan/WIV05/2019__EPI_ISL_402128 spike protein mRNA gc (1-1273)(K986P_V987P_K986P_V987P_L18F_D80A_D215G_L242del_A243del_ L244del_R246I_K417N_E484K_N501Y_D614G_A701V)
gggaaauaagagagaaaagaagaguaagaagaaauauaagaccccggcgccgccaccauguucguguuccugguccuccugccccuggugagcucccagugcgugaacuucaccacccgcacgcagcucccgcccgccuacaccaacagcuucacccggggcgucuacuaccccgacaagguguuccgcuccagcgugcugcacuccacccaggaccuguuccuccccuucuucagcaacgucacgugguuccacgccauccacguguccgggaccaacggcaccaagcgguucgcgaacccggugcugcccuucaacgacggggucuacuucgccagcaccgagaaguccaacaucauccgcggcuggaucuucgggacgacccuggacagcaagacccagucccuccugaucgugaacaacgccaccaacguggucaucaaggugugcgaguuccaguucugcaacgaccccuuccugggcguguacuaccacaagaacaacaagagcuggauggaguccgaguuccgggucuacagcuccgccaacaacugcacguucgaguacgugagccagcccuuccucauggaccuggagggcaagcaggggaacuucaagaaccugcgcgaguucguguucaagaacaucgacggcuacuucaagaucuacuccaagcacaccccgaucaaccucguccgggggcugccccagggcuucagcgcccuggagccccucguggaccugcccaucgggaucaacaucacccgcuuccagacccugcacaucuccuaccucacgccgggcgacagcagcuccggcuggaccgcgggggccgccgccuacuacgugggcuaccugcagccccggaccuuccugcucaaguacaacgagaacgggaccaucacggacgcggucgacugcgcccuggacccccugagcgagaccaagugcacccucaaguccuucaccguggagaagggcaucuaccagacgagcaacuuccgcgugcagcccaccgaguccaucguccgguucccgaacaucaccaaccugugccccuucggcgagguguucaacgccacccgcuucgccagcgucuacgccuggaaccggaagcgcaucuccaacugcguggcggacuacagcgugcuguacaacuccgccagcuucuccacguucaagugcuacggggucagccccaccaagcucaacgaccugugcuucaccaacguguacgccgacuccuucgugauccggggcgacgagguccgccagaucgcccccgggcagaccggcaacaucgccgacuacaacuacaagcugccggacgacuucacggggugcgugaucgcguggaacagcaacaaccucgacuccaaggugggcggcaacuacaacuaccuguaccggcuguuccgcaagagcaaccucaagcccuucgagcgggacaucuccaccgagaucuaccaggccgggagcacccccugcaacggcgucaagggguucaacugcuacuucccccugcaguccuacggcuuccagccgaccuacggggugggcuaccagcccuaccgcguggucgugcugagcuucgagcuccugcacgcccccgccacggugugcggccccaagaaguccaccaaccuggucaagaacaagugcgugaacuucaacuucaacgggcucaccggcaccggggugcugaccgagagcaacaagaaguuccugccguuccagcaguucggccgggacaucgccgacacgaccgacgcgguccgcgacccccagacccucgagauccuggacaucacccccugcagcuucgggggcguguccgugaucacgccgggcaccaacaccagcaaccaggucgccgugcuguaccagggggugaacugcaccgagguccccguggccauccacgccgaccagcugacgcccaccuggcgcguguacuccaccggcagcaacgucuuccagacccgggccgggugccucaucggcgcggagcacgugaacaacuccuacgagugcgacauccccaucggcgccgggaucugcgccagcuaccagacgcagaccaacuccccgcgccgggcccgcagcguggcgucccagagcaucaucgccuacaccaugucccugggcgucgagaacagcguggccuacuccaacaacagcaucgccauccccaccaacuucacgaucuccgugaccaccgagauccugcccgucagcaugaccaagacgagcguggacugcaccauguacaucugcggggacuccaccgagugcagcaaccuccugcugcaguacggcuccuucugcacccagcucaaccgggcccugacggggaucgcgguggagcaggacaagaacacccaggaggucuucgcccaggugaagcagaucuacaagacgcccccgaucaaggacuucggcggcuucaacuucagccagauccugcccgaccccuccaagcccagcaagcgcuccuucaucgaggaccuccuguucaacaaggugacccuggccgacgccggguucaucaagcaguacggcgacugccucggggacaucgccgcgcgggaccugaucugcgcccagaaguucaacggccugaccguccucccgccccugcugaccgacgagaugaucgcccaguacaccagcgcccuccuggccgggaccaucacguccggcuggaccuucggcgcgggggccgcccugcagauccccuucgccaugcagauggcguaccgcuucaacggcaucggggugacccagaacgugcucuacgagaaccagaagcugaucgccaaccaguucaacagcgccaucggcaagauccaggacucccugagcuccaccgccagcgcccucgggaagcugcaggacgucgugaaccagaacgcgcaggcccugaacacgcucgugaagcagcuguccagcaacuucggcgccaucuccagcguccugaacgacauccucucccggcuggacccgcccgaggccgaggugcagaucgaccgccugaucaccggccggcuccagagccugcagaccuacgugacccagcagcugauccgcgccgcggagauccgggccagcgccaaccucgccgccaccaagauguccgagugcguccuggggcagagcaagcgcguggacuucugcggcaagggguaccaccugauguccuucccccagagcgcgccccacggcguggucuuccuccacgugacguacguccccgcccaggagaagaacuucaccaccgccccggccaucugccacgacgggaaggcgcacuucccccgggagggcguguucguguccaacggcacccacugguucgucacgcagcgcaacuucuacgagccccagaucaucaccaccgacaacaccuucgugagcgggaacugcgacguggucaucggcaucgugaacaacacgguguacgacccccugcagccggagcuggacuccuucaaggaggagcucgacaaguacuucaagaaccacaccagccccgacgucgaccugggggacaucuccggcaucaacgccagcguggugaacauccagaaggagaucgaccggcugaacgaggucgccaagaaccucaacgagucccugaucgaccugcaggagcucggcaaguacgagcaguacaucaaguggcccugguacaucuggcugggguucaucgccggccugaucgccaucgugauggugaccaucaugcucugcugcaugaccagcugcugcuccugccugaaggggugcugcagcugcggcuccugcugcaaguucgacgaggacgacagcgagccgguccugaagggggugaagcuccacuacacgugauaauaggcuggagccucgguggccuagcuucuugccccuugggccuccccccagccccuccuccccuuccugcacccguacccccguggucuuugaauaaagucugagugggcggcaaaaaaaaaaaaaaaaaaaaaaaaaaaaaaaaaaaaaaaaaaaaaaaaaaaaaaaaaaaaaaaaaaaaaaaaaaaaaaaaaaaaaaaaaaaaaaaaaaaaucuag

SEQ ID NO: 26630 - RNA, 4100 nt, Artificial Sequence
  SARS-CoV-2/Wuhan/WIV05/2019__EPI_ISL_402128 spike protein mRNA gc (1-1273)(K986P_V987P_K986P_V987P_E484K_D614G)
gggaaauaagagagaaaagaagaguaagaagaaauauaagaccccggcgccgccaccauguucguguuccugguccuccugccccuggugagcucccagugcgugaaccucaccacccgcacgcagcugccgcccgccuacaccaacagcuucacccggggcgucuacuaccccgacaagguguuccgcuccagcgugcugcacuccacccaggaccucuuccugcccuucuucagcaacgucacgugguuccacgccauccacguguccgggaccaacggcaccaagcgguucgacaacccggugcugcccuucaacgacggggucuacuucgcgagcaccgagaaguccaacaucauccgcggcuggaucuucgggacgacccucgacagcaagacccagucccugcugaucgugaacaacgccaccaacguggucaucaaggugugcgaguuccaguucugcaacgaccccuuccucggcguguacuaccacaagaacaacaagagcuggauggaguccgaguuccgggucuacagcuccgccaacaacugcacguucgaguacgugagccagcccuuccugauggaccuggagggcaagcaggggaacuucaagaaccuccgcgaguucguguucaagaacaucgacggcuacuucaagaucuacuccaagcacaccccgaucaaccugguccgggaccugccccagggguucagcgcccucgagccccugguggaccugcccaucggcaucaacaucacccgcuuccagacccuccuggcccugcaccgguccuaccucacgccgggggacagcagcuccggcuggaccgcgggcgccgccgccuacuacgugggguaccugcagccccgcaccuuccugcucaaguacaacgagaacggcaccaucacggacgcggucgacugcgcccuggacccccugagcgagaccaagugcacccucaaguccuucaccguggagaaggggaucuaccagacgagcaacuuccgggugcagcccaccgaguccaucguccgcuucccgaacaucaccaaccugugccccuucggcgagguguucaacgccacccgguucgccagcgucuacgccuggaaccgcaagcggaucuccaacugcguggcggacuacagcgugcuguacaacuccgccagcuucuccacguucaagugcuacggcgucagccccaccaagcucaacgaccugugcuucaccaacguguacgccgacuccuucgugauccgcggggacgagguccggcagaucgcccccggccagaccgggaagaucgccgacuacaacuacaagcugccggacgacuucacgggcugcgugaucgcguggaacagcaacaaccucgacuccaaggucgggggcaacuacaacuaccuguaccgccuguuccgcaagagcaaccucaagcccuucgagcgggacaucuccaccgagaucuaccaggccggcagcacccccugcaacggggugaagggcuucaacugcuacuucccccugcaguccuacggguuccagccgaccaacggcgugggguaccagcccuaccggguggucgugcugagcuucgagcuccugcacgcccccgccacggugugcggccccaagaaguccaccaaccuggucaagaacaagugcgugaacuucaacuucaacggccucaccgggaccggcgugcugaccgagagcaacaagaaguuccugccguuccagcaguucgggcgcgacaucgccgacacgaccgacgcgguccgcgacccccagacccuggagauccucgacaucacccccugcagcuucggcgggguguccgugaucacgccgggcaccaacaccagcaaccaggucgccgugcuguaccagggcgugaacugcaccgagguccccguggccauccacgccgaccagcugacgcccaccuggcggguguacuccaccgggagcaacgucuuccagacccgcgccggcugccucaucggggcggagcacgugaacaacuccuacgagugcgacauccccaucggcgccggcaucugcgccagcuaccagacgcagaccaacuccccgcggcgcgcccggagcguggcgucccagagcaucaucgccuacaccaugucccugggggccgagaacagcgucgccuacuccaacaacagcaucgccauccccaccaacuucacgaucuccgugaccaccgagauccugcccgugagcaugaccaagacgagcgucgacugcaccauguacaucugcggcgacuccaccgagugcagcaaccuccugcugcaguacggguccuucugcacccagcucaaccgcgcgcugacgggcaucgccguggagcaggacaagaacacccaggagguguucgcccaggucaagcagaucuacaagacgcccccgaucaaggacuucgggggcuucaacuucagccagauccugcccgaccccuccaagcccagcaagcgguccuucaucgaggaccuccuguucaacaaggugacccuggccgacgccggcuucaucaagcaguacggggacugccucggcgacaucgcggcccgcgaccugaucugcgcccagaaguucaacgggcugaccgugcucccgccccugcugaccgacgagaugaucgcccaguacaccagcgcccuccuggcgggcaccaucacguccggguggaccuucggcgccggcgccgcccugcagauccccuucgcgaugcagauggccuaccgguucaacgggaucggcgucacccagaacgugcucuacgagaaccagaagcugaucgccaaccaguucaacagcgccaucgggaagauccaggacucccugagcuccaccgccagcgcgcucggcaagcugcaggacguggucaaccagaacgcccaggcccugaacacgcucgugaagcagcuguccagcaacuucggggccaucuccagcgugcugaacgacauccucucccgccuggacccgcccgaggccgagguccagaucgaccggcugaucaccggccgccuccagagccugcagaccuacgugacccagcagcugauccgggcggccgagauccgcgccagcgccaaccucgccgcgaccaagauguccgagugcgugcugggccagagcaagcgggucgacuucugcgggaagggcuaccaccugauguccuucccccagagcgcgccccacggggugguguuccuccacgucacguacgugcccgcccaggagaagaacuucaccaccgccccggccaucugccacgacggcaaggcccacuucccccgcgagggggucuucguguccaacggcacccacugguucgugacgcagcggaacuucuacgagccccagaucaucaccaccgacaacaccuucgucagcggcaacugcgacguggugaucgggaucgucaacaacacgguguacgacccccugcagccggagcuggacuccuucaaggaggagcucgacaaguacuucaagaaccacaccagccccgacguggaccugggcgacaucuccgggaucaacgccagcgucgugaacauccagaaggagaucgaccgccugaacgagguggccaagaaccucaacgagucccugaucgaccugcaggagcucggcaaguacgagcaguacaucaaguggcccugguacaucuggcugggcuucaucgccgggcugaucgcgaucgucauggugaccaucaugcucugcugcaugaccagcugcugcuccugccugaagggcugcugcagcugcggguccugcugcaaguucgacgaggacgacagcgagccggugcugaagggcgucaagcuccacuacacgugauaauaggcuggagccucgguggccuagcuucuugccccuugggccuccccccagccccuccuccccuuccugcacccguacccccguggucuuugaauaaagucugagugggcggcaaaaaaaaaaaaaaaaaaaaaaaaaaaaaaaaaaaaaaaaaaaaaaaaaaaaaaaaaaaaaaaaaaaaaaaaaaaaaaaaaaaaaaaaaaaaaaaaaaaaucuag

SEQ ID NO: 26631 - RNA, 4100 nt, Artificial Sequence
  SARS-CoV-2/Wuhan/WIV05/2019__EPI_ISL_402128 spike protein mRNA gc (1-1273)(K986P_V987P_K986P_V987P_L18F_T20N_P26S_D138Y_R190S_K417T _E484K_N501Y_D614G_H655Y_T1027I)
gggaaauaagagagaaaagaagaguaagaagaaauauaagaccccggcgccgccaccauguucguguuccugguccuccugccccuggugagcucccagugcgugaacuucaccaaccgcacccagcucccgagcgccuacacgaacuccuucacccggggcgucuacuaccccgacaagguguuccgcagcuccgugcugcacagcacccaggaccuguuccuccccuucuucuccaacgucaccugguuccacgccauccacgugagcgggacgaacggcaccaagcgguucgacaaccccgugcugccguucaacgacggggucuacuucgcguccaccgagaaguccaacaucauccgcggcuggaucuucgggaccacgcuggacuccaagacccagagccuccugaucgugaacaacgccaccaacguggucaucaaggugugcgaguuccaguucugcaacuaccccuuccugggcguguacuaccacaagaacaacaaguccuggauggagagcgaguuccgggucuacuccagcgccaacaacugcaccuucgaguacgugucccagcccuuccucauggaccuggagggcaagcaggggaacuucaagaaccugagcgaguucguguucaagaacaucgacggcuacuucaagaucuacuccaagcacacgcccaucaaccucguccgcgaccugccgcagggguucagcgcccuggagccccucguggaccugcccaucggcaucaacaucacccgguuccagacccugcucgcccugcaccgcagcuaccugacccccggggacuccagcuccggcuggacggcgggcgccgccgccuacuacgugggguaccuccagccgcggaccuuccugcugaaguacaacgagaacggcaccaucaccgacgcggucgacugcgcccucgacccccugagcgagacgaagugcacccugaaguccuucaccguggagaaggggaucuaccagaccagcaacuuccgcgugcagcccacggaguccaucguccgguuccccaacaucaccaaccucugcccguucggcgagguguucaacgccacccgcuucgccagcgucuacgccuggaaccggaagcgcaucuccaacugcguggcggacuacagcgugcuguacaacuccgccagcuucuccaccuucaagugcuacggcgucagccccacgaagcugaacgaccucugcuucaccaacguguacgccgacuccuucgugauccgcggggacgagguccggcagaucgcccccggccagaccgggaccaucgccgacuacaacuacaagcugcccgacgacuucacgggcugcgugaucgcguggaacagcaacaaccuggacuccaaggucgggggcaacuacaacuaccucuaccggcuguuccgcaagagcaaccugaagccguucgagcgggacaucuccaccgagaucuaccaggccggcagcacccccugcaacggggugaagggcuucaacugcuacuucccccuccagagcuacggguuccagcccaccuacggcgugggguaccagccguaccgcguggucgugcuguccuucgagcugcuccacgcccccgccacggugugcggccccaagaaguccaccaaccuggucaagaacaagugcgugaacuucaacuucaacggccugaccgggaccggcgugcucaccgagagcaacaagaaguuccugcccuuccagcaguucgggcgggacaucgccgacacgaccgacgcgguccgcgacccgcagacccuggagauccuggacaucacccccugcagcuucggcgggguguccgugaucacgcccggcaccaacaccagcaaccaggucgccgugcucuaccagggcgugaacugcaccgaggucccgguggccauccacgccgaccagcugacgcccaccuggcgcguguacuccaccgggagcaacgucuuccagacccgggccggcugccugaucggggcggaguacgugaacaacuccuacgagugcgacauccccaucggcgccggcaucugcgccagcuaccagacgcagaccaacagcccccgccgggcccgcagcguggcgucccagagcaucaucgccuacaccaugucccucggggccgagaacagcgucgccuacuccaacaacagcaucgccaucccgaccaacuucacgaucagcgugaccaccgagauccugcccguguccaugaccaagacgagcgucgacugcaccauguacaucugcggcgacuccaccgagugcagcaaccugcuccugcaguacggguccuucugcacccagcugaaccgggcgcucacgggcaucgccguggagcaggacaagaacacccaggagguguucgcccaggucaagcagaucuacaagaccccgcccaucaaggacuucgggggcuucaacuucagccagauccugcccgaccccuccaagcccagcaagcgcuccuucaucgaggaccuccuguucaacaaggugacccuggccgacgccggcuucaucaagcaguacggggacugccugggcgacaucgcggcccgggaccucaucugcgcccagaaguucaacgggcugacggugcugcccccgcuccugaccgacgagaugaucgcccaguacaccagcgcccugcucgcgggcaccaucacguccggguggaccuucggcgccggcgccgcccugcagauccccuucgcgaugcagauggccuaccgcuucaacgggaucggcgucacccagaacgugcuguacgagaaccagaagcucaucgccaaccaguucaacagcgccaucgggaagauccaggacucccugagcuccaccgccagcgcgcugggcaagcuccaggacguggucaaccagaacgcccaggcccugaacacgcuggugaagcagcucuccagcaacuucggggccaucuccagcgugcugaacgacauccugagccggcucgacccgcccgaggccgagguccagaucgaccgccugaucaccggccggcugcagucccuccagaccuacgugacccagcagcugauccgcgcggccgagauccgggccagcgccaaccuggccgcgaucaagauguccgagugcgugcucggccagagcaagcgcgucgacuucugcgggaagggcuaccaccugauguccuucccccagagcgcgccccacggggugguguuccugcacgucaccuacgugcccgcccaggagaagaacuucacgaccgcccccgccaucugccacgacggcaaggcccacuucccgcgggagggggucuucguguccaacggcacccacugguucgugacccagcgcaacuucuacgagccccagaucaucacgaccgacaacaccuucgucagcggcaacugcgacguggugaucgggaucgucaacaacaccguguacgacccccuccagcccgagcuggacuccuucaaggaggagcuggacaaguacuucaagaaccacacgagcccggacguggaccucggcgacaucuccgggaucaacgccagcgucgugaacauccagaaggagaucgaccggcugaacgagguggccaagaaccugaacgagucccucaucgaccugcaggagcugggcaaguacgagcaguacaucaaguggcccugguacaucuggcucggcuucaucgccgggcugaucgcgaucgucauggugaccaucaugcugugcugcaugaccagcugcugcuccugccucaagggcugcugcagcugcggguccugcugcaaguucgacgaggacgacagcgagcccgugcugaagggcgucaagcugcacuacaccugauaauaggcuggagccucgguggccuagcuucuugccccuugggccuccccccagccccuccuccccuuccugcacccguacccccguggucuuugaauaaagucugagugggcggcaaaaaaaaaaaaaaaaaaaaaaaaaaaaaaaaaaaaaaaaaaaaaaaaaaaaaaaaaaaaaaaaaaaaaaaaaaaaaaaaaaaaaaaaaaaaaaaaaaaaucuag

SEQ ID NO: 26632 - RNA, 4100 nt, Artificial Sequence
  SARS-CoV-2/Wuhan/WIV05/2019__EPI_ISL_402128 spike protein mRNA gc (1-1273)(K986P_V987P_K986P_V987P_S13I_W152C_L452R_D614G)
gggaaauaagagagaaaagaagaguaagaagaaauauaagaccccggcgccgccaccauguucguguuccugguccuccugccccuggugagcauccagugcgugaaccucaccacccgcacgcagcugccgcccgccuacaccaacuccuucacccggggcgucuacuaccccgacaagguguuccgcagcuccgugcugcacagcacccaggaccucuuccugcccuucuucuccaacgucacgugguuccacgccauccacgugagcgggaccaacggcaccaagcgguucgacaacccggugcugcccuucaacgacggggucuacuucgcguccaccgagaaguccaacaucauccgcggcuggaucuucgggacgacccucgacagcaagacccagagccugcugaucgugaacaacgccaccaacguggucaucaaggugugcgaguuccaguucugcaacgaccccuuccucggcguguacuaccacaagaacaacaaguccugcauggagagcgaguuccgggucuacuccagcgccaacaacugcacguucgaguacgugucccagcccuuccugauggaccuggagggcaagcaggggaacuucaagaaccuccgcgaguucguguucaagaacaucgacggcuacuucaagaucuacagcaagcacaccccgaucaaccugguccgggaccugccccagggguucuccgcccucgagccccugguggaccugcccaucggcaucaacaucacccgcuuccagacccuccuggcccugcaccggagcuaccucacgccgggggacuccagcagcggcuggaccgcgggcgccgccgccuacuacgugggguaccugcagccccgcaccuuccugcucaaguacaacgagaacggcaccaucacggacgcggucgacugcgcccuggacccccuguccgagaccaagugcacccucaagagcuucaccguggagaaggggaucuaccagacguccaacuuccgggugcagcccaccgagagcaucguccgcuucccgaacaucaccaaccugugccccuucggcgagguguucaacgccacccgguucgccuccgucuacgccuggaaccgcaagcggaucagcaacugcguggcggacuacuccgugcuguacaacagcgccuccuucagcacguucaagugcuacggcgucucccccaccaagcucaacgaccugugcuucaccaacguguacgccgacagcuucgugauccgcggggacgagguccggcagaucgcccccggccagaccgggaagaucgccgacuacaacuacaagcugccggacgacuucacgggcugcgugaucgcguggaacuccaacaaccucgacagcaaggucgggggcaacuacaacuaccgcuaccggcuguuccgcaaguccaaccugaagcccuucgagcgggacaucagcaccgagaucuaccaggccggcuccacccccugcaacgggguggagggcuucaacugcuacuucccccuccagagcuacggguuccagccgaccaacggcgugggguaccagcccuaccgcguggucgugcuguccuucgagcugcuccacgcccccgccacggugugcggccccaagaaguccaccaaccuggucaagaacaagugcgugaacuucaacuucaacggccugaccgggaccggcgugcucaccgagagcaacaagaaguuccugccguuccagcaguucgggcgcgacaucgccgacacgaccgacgcgguccgggacccccagacccuggagauccuggacaucacccccugcagcuucggcggggugagcgugaucacgccgggcaccaacaccuccaaccaggucgccgugcucuaccagggcgugaacugcaccgagguccccguggccauccacgccgaccagcugacgcccaccuggcgcguguacagcaccggguccaacgucuuccagacccgggccggcugccugaucggggcggagcacgugaacaacagcuacgagugcgacauccccaucggcgccggcaucugcgccuccuaccagacgcagaccaacagcccgcgccgggcccgcuccguggcgagccaguccaucaucgccuacaccaugagccucggggccgagaacuccgucgccuacagcaacaacuccaucgccauccccaccaacuucacgaucagcgugaccaccgagauccugcccguguccaugaccaagacgagcgucgacugcaccauguacaucugcggcgacagcaccgagugcuccaaccugcuccugcaguacgggagcuucugcacccagcugaaccgggcgcucacgggcaucgccguggagcaggacaagaacacccaggagguguucgcccaggucaagcagaucuacaagacgcccccgaucaaggacuucgggggcuucaacuucucccagauccugcccgaccccagcaagcccuccaagcgcagcuucaucgaggaccuccuguucaacaaggugacccuggccgacgccggcuucaucaagcaguacggggacugccugggcgacaucgcggcccgggaccucaucugcgcccagaaguucaacgggcugaccgugcugccgccccuccugaccgacgagaugaucgcccaguacaccuccgcccugcucgcgggcaccaucacgagcggguggaccuucggcgccggcgccgcccugcagauccccuucgcgaugcagauggccuaccgcuucaacgggaucggcgucacccagaacgugcuguacgagaaccagaagcucaucgccaaccaguucaacuccgccaucgggaagauccaggacagccuguccagcaccgccuccgcgcugggcaagcuccaggacguggucaaccagaacgcccaggcccugaacacgcuggugaagcagcucagcuccaacuucggggccaucagcuccgugcugaacgacauccugagccggcucgacccgcccgaggccgagguccagaucgaccgccugaucaccggccggcugcagucccuccagaccuacgugacccagcagcugauccgcgcggccgagauccgggccagcgccaaccuggccgcgaccaagaugagcgagugcgugcucggccaguccaagcgcgucgacuucugcgggaagggcuaccaccugaugagcuucccccaguccgcgccccacggggugguguuccugcacgucacguacgugcccgcccaggagaagaacuucaccaccgccccggccaucugccacgacggcaaggcccacuucccccgggagggggucuucgugagcaacggcacccacugguucgugacgcagcgcaacuucuacgagccccagaucaucaccaccgacaacaccuucgucuccggcaacugcgacguggugaucgggaucgucaacaacacgguguacgacccccuccagccggagcuggacagcuucaaggaggagcuggacaaguacuucaagaaccacaccucccccgacguggaccucggcgacaucagcgggaucaacgccuccgucgugaacauccagaaggagaucgaccggcugaacgagguggccaagaaccugaacgagagccucaucgaccugcaggagcugggcaaguacgagcaguacaucaaguggcccugguacaucuggcucggcuucaucgccgggcugaucgcgaucgucauggugaccaucaugcugugcugcaugaccuccugcugcagcugccucaagggcugcugcuccugcgggagcugcugcaaguucgacgaggacgacuccgagccggugcugaagggcgucaagcugcacuacacgugauaauaggcuggagccucgguggccuagcuucuugccccuugggccuccccccagccccuccuccccuuccugcacccguacccccguggucuuugaauaaagucugagugggcggcaaaaaaaaaaaaaaaaaaaaaaaaaaaaaaaaaaaaaaaaaaaaaaaaaaaaaaaaaaaaaaaaaaaaaaaaaaaaaaaaaaaaaaaaaaaaaaaaaaaaucuag

SEQ ID NO: 26633 - RNA, 4100 nt, Artificial Sequence
  SARS-CoV-2/Wuhan/WIV05/2019__EPI_ISL_402128 spike protein mRNA gc (1-1273)(K986P_V987P)
gggaaauaagagagaaaagaagaguaagaagaaauauaagaccccggcgccgccaccauguucguguuccuggugcugcugccccuggugagcagccagugcgugaaccugaccacccggacccagcugccaccagccuacaccaacagcuucacccggggcgucuacuaccccgacaagguguuccggagcagcguccugcacagcacccaggaccuguuccugcccuucuucagcaacgugaccugguuccacgccauccacgugagcggcaccaacggcaccaagcgguucgacaaccccgugcugcccuucaacgacggcguguacuucgccagcaccgagaagagcaacaucauccggggcuggaucuucggcaccacccuggacagcaagacccagagccugcugaucgugaauaacgccaccaacguggugaucaaggugugcgaguuccaguucugcaacgaccccuuccugggcguguacuaccacaagaacaacaagagcuggauggagagcgaguuccggguguacagcagcgccaacaacugcaccuucgaguacgugagccagcccuuccugauggaccuggagggcaagcagggcaacuucaagaaccugcgggaguucguguucaagaacaucgacggcuacuucaagaucuacagcaagcacaccccaaucaaccuggugcgggaucugccccagggcuucucagcccuggagccccugguggaccugcccaucggcaucaacaucacccgguuccagacccugcuggcccugcaccggagcuaccugaccccaggcgacagcagcagcggguggacagcaggcgcggcugcuuacuacgugggcuaccugcagccccggaccuuccugcugaaguacaacgagaacggcaccaucaccgacgccguggacugcgcccuggacccucugagcgagaccaagugcacccugaagagcuucaccguggagaagggcaucuaccagaccagcaacuuccgggugcagcccaccgagagcaucgugcgguuccccaacaucaccaaccugugccccuucggcgagguguucaacgccacccgguucgccagcguguacgccuggaaccggaagcggaucagcaacugcguggccgacuacagcgugcuguacaacagcgccagcuucagcaccuucaagugcuacggcgugagccccaccaagcugaacgaccugugcuucaccaacguguacgccgacagcuucgugauccguggcgacgaggugcggcagaucgcacccggccagacaggcaagaucgccgacuacaacuacaagcugcccgacgacuucaccggcugcgugaucgccuggaacagcaacaaccucgacagcaaggugggcggcaacuacaacuaccuguaccggcuguuccggaagagcaaccugaagcccuucgagcgggacaucagcaccgagaucuaccaagccggcuccaccccuugcaacggcguggagggcuucaacugcuacuucccucugcagagcuacggcuuccagcccaccaacggcgugggcuaccagcccuaccgggugguggugcugagcuucgagcugcugcacgccccagccaccguguguggccccaagaagagcaccaaccuggugaagaacaagugcgugaacuucaacuucaacggccuuaccggcaccggcgugcugaccgagagcaacaagaaauuccugcccuuucagcaguucggccgggacaucgccgacaccaccgacgcugugcgggauccccagacccuggagauccuggacaucaccccuugcagcuucggcggcgugagcgugaucaccccaggcaccaacaccagcaaccagguggccgugcuguaccaggacgugaacugcaccgaggugcccguggccauccacgccgaccagcugacacccaccuggcgggucuacagcaccggcagcaacguguuccagacccgggccgguugccugaucggcgccgagcacgugaacaacagcuacgagugcgacauccccaucggcgccggcaucugugccagcuaccagacccagaccaauucaccccggagggcaaggagcguggccagccagagcaucaucgccuacaccaugagccugggcgccgagaacagcguggccuacagcaacaacagcaucgccauccccaccaacuucaccaucagcgugaccaccgagauucugcccgugagcaugaccaagaccagcguggacugcaccauguacaucugcggcgacagcaccgagugcagcaaccugcugcugcaguacggcagcuucugcacccagcugaaccgggcccugaccggcaucgccguggagcaggacaagaacacccaggagguguucgcccaggugaagcagaucuacaagaccccucccaucaaggacuucggcggcuucaacuucagccagauccugcccgaccccagcaagcccagcaagcggagcuucaucgaggaccugcuguucaacaaggugacccuagccgacgccggcuucaucaagcaguacggcgacugccucggcgacauagccgcccgggaccugaucugcgcccagaaguucaacggccugaccgugcugccuccccugcugaccgacgagaugaucgcccaguacaccagcgcccuguuagccggaaccaucaccagcggcuggacuuucggcgcuggagccgcucugcagauccccuucgccaugcagauggccuaccgguucaacggcaucggcgugacccagaacgugcuguacgagaaccagaagcugaucgccaaccaguucaacagcgccaucggcaagauccaggacagccugagcagcaccgcuagcgcccugggcaagcugcaggacguggugaaccagaacgcccaggcccugaacacccuggugaagcagcugagcagcaacuucggcgccaucagcagcgugcugaacgacauccugagccggcuggacccucccgaggccgaggugcagaucgaccggcugaucacuggccggcugcagagccugcagaccuacgugacccagcagcugauccgggccgccgagauucgggccagcgccaaccuggccgccaccaagaugagcgagugcgugcugggccagagcaagcggguggacuucugcggcaagggcuaccaccugaugagcuuuccccagagcgcaccccacggagugguguuccugcacgugaccuacgugcccgcccaggagaagaacuucaccaccgccccagccaucugccacgacggcaaggcccacuuuccccgggagggcguguucgugagcaacggcacccacugguucgugacccagcggaacuucuacgagccccagaucaucaccaccgacaacaccuucgugagcggcaacugcgacguggugaucggcaucgugaacaacaccguguacgauccccugcagcccgagcuggacagcuucaaggaggagcuggacaaguacuucaagaaucacaccagccccgacguggaccugggcgacaucagcggcaucaacgccagcguggugaacauccagaaggagaucgaucggcugaacgagguggccaagaaccugaacgagagccugaucgaccugcaggagcugggcaaguacgagcaguacaucaaguggcccugguacaucuggcugggcuucaucgccggccugaucgccaucgugauggugaccaucaugcugugcugcaugaccagcugcugcagcugccugaagggcuguugcagcugcggcagcugcugcaaguucgacgaggacgacagcgagcccgugcugaagggcgugaagcugcacuacaccugauaauaggcuggagccucgguggccuagcuucuugccccuugggccuccccccagccccuccuccccuuccugcacccguacccccguggucuuugaauaaagucugagugggcggcaaaaaaaaaaaaaaaaaaaaaaaaaaaaaaaaaaaaaaaaaaaaaaaaaaaaaaaaaaaaaaaaaaaaaaaaaaaaaaaaaaaaaaaaaaaaaaaaaaaaucuag

SEQ ID NO: 26634 - RNA, 4100 nt, Artificial Sequence
  SARS-CoV-2/Wuhan/WIV05/2019__EPI_ISL_402128 spike protein mRNA gc (1-1273)(K986P_V987P_ D614G)
gggaaauaagagagaaaagaagaguaagaagaaauauaagaccccggcgccgccaccauguucguguuccuggugcugcugccccuggugagcagccagugcgugaaccugaccacccggacccagcugccaccagccuacaccaacagcuucacccggggcgucuacuaccccgacaagguguuccggagcagcguccugcacagcacccaggaccuguuccugcccuucuucagcaacgugaccugguuccacgccauccacgugagcggcaccaacggcaccaagcgguucgacaaccccgugcugcccuucaacgacggcguguacuucgccagcaccgagaagagcaacaucauccggggcuggaucuucggcaccacccuggacagcaagacccagagccugcugaucgugaauaacgccaccaacguggugaucaaggugugcgaguuccaguucugcaacgaccccuuccugggcguguacuaccacaagaacaacaagagcuggauggagagcgaguuccggguguacagcagcgccaacaacugcaccuucgaguacgugagccagcccuuccugauggaccuggagggcaagcagggcaacuucaagaaccugcgggaguucguguucaagaacaucgacggcuacuucaagaucuacagcaagcacaccccaaucaaccuggugcgggaucugccccagggcuucucagcccuggagccccugguggaccugcccaucggcaucaacaucacccgguuccagacccugcuggcccugcaccggagcuaccugaccccaggcgacagcagcagcggguggacagcaggcgcggcugcuuacuacgugggcuaccugcagccccggaccuuccugcugaaguacaacgagaacggcaccaucaccgacgccguggacugcgcccuggacccucugagcgagaccaagugcacccugaagagcuucaccguggagaagggcaucuaccagaccagcaacuuccgggugcagcccaccgagagcaucgugcgguuccccaacaucaccaaccugugccccuucggcgagguguucaacgccacccgguucgccagcguguacgccuggaaccggaagcggaucagcaacugcguggccgacuacagcgugcuguacaacagcgccagcuucagcaccuucaagugcuacggcgugagccccaccaagcugaacgaccugugcuucaccaacguguacgccgacagcuucgugauccguggcgacgaggugcggcagaucgcacccggccagacaggcaagaucgccgacuacaacuacaagcugcccgacgacuucaccggcugcgugaucgccuggaacagcaacaaccucgacagcaaggugggcggcaacuacaacuaccuguaccggcuguuccggaagagcaaccugaagcccuucgagcgggacaucagcaccgagaucuaccaagccggcuccaccccuugcaacggcguggagggcuucaacugcuacuucccucugcagagcuacggcuuccagcccaccaacggcgugggcuaccagcccuaccgggugguggugcugagcuucgagcugcugcacgccccagccaccguguguggccccaagaagagcaccaaccuggugaagaacaagugcgugaacuucaacuucaacggccuuaccggcaccggcgugcugaccgagagcaacaagaaauuccugcccuuucagcaguucggccgggacaucgccgacaccaccgacgcugugcgggauccccagacccuggagauccuggacaucaccccuugcagcuucggcggcgugagcgugaucaccccaggcaccaacaccagcaaccagguggccgugcuguaccagggcgugaacugcaccgaggugcccguggccauccacgccgaccagcugacacccaccuggcgggucuacagcaccggcagcaacguguuccagacccgggccgguugccugaucggcgccgagcacgugaacaacagcuacgagugcgacauccccaucggcgccggcaucugugccagcuaccagacccagaccaauucaccccggagggcaaggagcguggccagccagagcaucaucgccuacaccaugagccugggcgccgagaacagcguggccuacagcaacaacagcaucgccauccccaccaacuucaccaucagcgugaccaccgagauucugcccgugagcaugaccaagaccagcguggacugcaccauguacaucugcggcgacagcaccgagugcagcaaccugcugcugcaguacggcagcuucugcacccagcugaaccgggcccugaccggcaucgccguggagcaggacaagaacacccaggagguguucgcccaggugaagcagaucuacaagaccccucccaucaaggacuucggcggcuucaacuucagccagauccugcccgaccccagcaagcccagcaagcggagcuucaucgaggaccugcuguucaacaaggugacccuagccgacgccggcuucaucaagcaguacggcgacugccucggcgacauagccgcccgggaccugaucugcgcccagaaguucaacggccugaccgugcugccuccccugcugaccgacgagaugaucgcccaguacaccagcgcccuguuagccggaaccaucaccagcggcuggacuuucggcgcuggagccgcucugcagauccccuucgccaugcagauggccuaccgguucaacggcaucggcgugacccagaacgugcuguacgagaaccagaagcugaucgccaaccaguucaacagcgccaucggcaagauccaggacagccugagcagcaccgcuagcgcccugggcaagcugcaggacguggugaaccagaacgcccaggcccugaacacccuggugaagcagcugagcagcaacuucggcgccaucagcagcgugcugaacgacauccugagccggcuggacccucccgaggccgaggugcagaucgaccggcugaucacuggccggcugcagagccugcagaccuacgugacccagcagcugauccgggccgccgagauucgggccagcgccaaccuggccgccaccaagaugagcgagugcgugcugggccagagcaagcggguggacuucugcggcaagggcuaccaccugaugagcuuuccccagagcgcaccccacggagugguguuccugcacgugaccuacgugcccgcccaggagaagaacuucaccaccgccccagccaucugccacgacggcaaggcccacuuuccccgggagggcguguucgugagcaacggcacccacugguucgugacccagcggaacuucuacgagccccagaucaucaccaccgacaacaccuucgugagcggcaacugcgacguggugaucggcaucgugaacaacaccguguacgauccccugcagcccgagcuggacagcuucaaggaggagcuggacaaguacuucaagaaucacaccagccccgacguggaccugggcgacaucagcggcaucaacgccagcguggugaacauccagaaggagaucgaucggcugaacgagguggccaagaaccugaacgagagccugaucgaccugcaggagcugggcaaguacgagcaguacaucaaguggcccugguacaucuggcugggcuucaucgccggccugaucgccaucgugauggugaccaucaugcugugcugcaugaccagcugcugcagcugccugaagggcuguugcagcugcggcagcugcugcaaguucgacgaggacgacagcgagcccgugcugaagggcgugaagcugcacuacaccugauaauaggcuggagccucgguggccuagcuucuugccccuugggccuccccccagccccuccuccccuuccugcacccguacccccguggucuuugaauaaagucugagugggcggcaaaaaaaaaaaaaaaaaaaaaaaaaaaaaaaaaaaaaaaaaaaaaaaaaaaaaaaaaaaaaaaaaaaaaaaaaaaaaaaaaaaaaaaaaaaaaaaaaaaaucuag

SEQ ID NO: 26635 - RNA, 4100 nt, Artificial Sequence
  SARS-CoV-2/Wuhan/WIV05/2019__EPI_ISL_402128 spike protein mRNA gc (1-1273)(K986P_V987P_A222V_D614G)
gggaaauaagagagaaaagaagaguaagaagaaauauaagaccccggcgccgccaccauguucguguuccuggugcugcugccccuggugagcagccagugcgugaaccugaccacccggacccagcugccaccagccuacaccaacagcuucacccggggcgucuacuaccccgacaagguguuccggagcagcguccugcacagcacccaggaccuguuccugcccuucuucagcaacgugaccugguuccacgccauccacgugagcggcaccaacggcaccaagcgguucgacaaccccgugcugcccuucaacgacggcguguacuucgccagcaccgagaagagcaacaucauccggggcuggaucuucggcaccacccuggacagcaagacccagagccugcugaucgugaauaacgccaccaacguggugaucaaggugugcgaguuccaguucugcaacgaccccuuccugggcguguacuaccacaagaacaacaagagcuggauggagagcgaguuccggguguacagcagcgccaacaacugcaccuucgaguacgugagccagcccuuccugauggaccuggagggcaagcagggcaacuucaagaaccugcgggaguucguguucaagaacaucgacggcuacuucaagaucuacagcaagcacaccccaaucaaccuggugcgggaucugccccagggcuucucagugcuggagccccugguggaccugcccaucggcaucaacaucacccgguuccagacccugcuggcccugcaccggagcuaccugaccccaggcgacagcagcagcggguggacagcaggcgcggcugcuuacuacgugggcuaccugcagccccggaccuuccugcugaaguacaacgagaacggcaccaucaccgacgccguggacugcgcccuggacccucugagcgagaccaagugcacccugaagagcuucaccguggagaagggcaucuaccagaccagcaacuuccgggugcagcccaccgagagcaucgugcgguuccccaacaucaccaaccugugccccuucggcgagguguucaacgccacccgguucgccagcguguacgccuggaaccggaagcggaucagcaacugcguggccgacuacagcgugcuguacaacagcgccagcuucagcaccuucaagugcuacggcgugagccccaccaagcugaacgaccugugcuucaccaacguguacgccgacagcuucgugauccguggcgacgaggugcggcagaucgcacccggccagacaggcaagaucgccgacuacaacuacaagcugcccgacgacuucaccggcugcgugaucgccuggaacagcaacaaccucgacagcaaggugggcggcaacuacaacuaccuguaccggcuguuccggaagagcaaccugaagcccuucgagcgggacaucagcaccgagaucuaccaagccggcuccaccccuugcaacggcguggagggcuucaacugcuacuucccucugcagagcuacggcuuccagcccaccaacggcgugggcuaccagcccuaccgggugguggugcugagcuucgagcugcugcacgccccagccaccguguguggccccaagaagagcaccaaccuggugaagaacaagugcgugaacuucaacuucaacggccuuaccggcaccggcgugcugaccgagagcaacaagaaauuccugcccuuucagcaguucggccgggacaucgccgacaccaccgacgcugugcgggauccccagacccuggagauccuggacaucaccccuugcagcuucggcggcgugagcgugaucaccccaggcaccaacaccagcaaccagguggccgugcuguaccagggcgugaacugcaccgaggugcccguggccauccacgccgaccagcugacacccaccuggcgggucuacagcaccggcagcaacguguuccagacccgggccgguugccugaucggcgccgagcacgugaacaacagcuacgagugcgacauccccaucggcgccggcaucugugccagcuaccagacccagaccaauucaccccggagggcaaggagcguggccagccagagcaucaucgccuacaccaugagccugggcgccgagaacagcguggccuacagcaacaacagcaucgccauccccaccaacuucaccaucagcgugaccaccgagauucugcccgugagcaugaccaagaccagcguggacugcaccauguacaucugcggcgacagcaccgagugcagcaaccugcugcugcaguacggcagcuucugcacccagcugaaccgggcccugaccggcaucgccguggagcaggacaagaacacccaggagguguucgcccaggugaagcagaucuacaagaccccucccaucaaggacuucggcggcuucaacuucagccagauccugcccgaccccagcaagcccagcaagcggagcuucaucgaggaccugcuguucaacaaggugacccuagccgacgccggcuucaucaagcaguacggcgacugccucggcgacauagccgcccgggaccugaucugcgcccagaaguucaacggccugaccgugcugccuccccugcugaccgacgagaugaucgcccaguacaccagcgcccuguuagccggaaccaucaccagcggcuggacuuucggcgcuggagccgcucugcagauccccuucgccaugcagauggccuaccgguucaacggcaucggcgugacccagaacgugcuguacgagaaccagaagcugaucgccaaccaguucaacagcgccaucggcaagauccaggacagccugagcagcaccgcuagcgcccugggcaagcugcaggacguggugaaccagaacgcccaggcccugaacacccuggugaagcagcugagcagcaacuucggcgccaucagcagcgugcugaacgacauccugagccggcuggacccucccgaggccgaggugcagaucgaccggcugaucacuggccggcugcagagccugcagaccuacgugacccagcagcugauccgggccgccgagauucgggccagcgccaaccuggccgccaccaagaugagcgagugcgugcugggccagagcaagcggguggacuucugcggcaagggcuaccaccugaugagcuuuccccagagcgcaccccacggagugguguuccugcacgugaccuacgugcccgcccaggagaagaacuucaccaccgccccagccaucugccacgacggcaaggcccacuuuccccgggagggcguguucgugagcaacggcacccacugguucgugacccagcggaacuucuacgagccccagaucaucaccaccgacaacaccuucgugagcggcaacugcgacguggugaucggcaucgugaacaacaccguguacgauccccugcagcccgagcuggacagcuucaaggaggagcuggacaaguacuucaagaaucacaccagccccgacguggaccugggcgacaucagcggcaucaacgccagcguggugaacauccagaaggagaucgaucggcugaacgagguggccaagaaccugaacgagagccugaucgaccugcaggagcugggcaaguacgagcaguacaucaaguggcccugguacaucuggcugggcuucaucgccggccugaucgccaucgugauggugaccaucaugcugugcugcaugaccagcugcugcagcugccugaagggcuguugcagcugcggcagcugcugcaaguucgacgaggacgacagcgagcccgugcugaagggcgugaagcugcacuacaccugauaauaggcuggagccucgguggccuagcuucuugccccuugggccuccccccagccccuccuccccuuccugcacccguacccccguggucuuugaauaaagucugagugggcggcaaaaaaaaaaaaaaaaaaaaaaaaaaaaaaaaaaaaaaaaaaaaaaaaaaaaaaaaaaaaaaaaaaaaaaaaaaaaaaaaaaaaaaaaaaaaaaaaaaaaucuag

SEQ ID NO: 26636 - RNA, 4100 nt, Artificial Sequence
  SARS-CoV-2/Wuhan/WIV05/2019__EPI_ISL_402128 spike protein mRNA gc (1-1273)(K986P_V987P_N439K_D614G)
gggaaauaagagagaaaagaagaguaagaagaaauauaagaccccggcgccgccaccauguucguguuccuggugcugcugccccuggugagcagccagugcgugaaccugaccacccggacccagcugccaccagccuacaccaacagcuucacccggggcgucuacuaccccgacaagguguuccggagcagcguccugcacagcacccaggaccuguuccugcccuucuucagcaacgugaccugguuccacgccauccacgugagcggcaccaacggcaccaagcgguucgacaaccccgugcugcccuucaacgacggcguguacuucgccagcaccgagaagagcaacaucauccggggcuggaucuucggcaccacccuggacagcaagacccagagccugcugaucgugaauaacgccaccaacguggugaucaaggugugcgaguuccaguucugcaacgaccccuuccugggcguguacuaccacaagaacaacaagagcuggauggagagcgaguuccggguguacagcagcgccaacaacugcaccuucgaguacgugagccagcccuuccugauggaccuggagggcaagcagggcaacuucaagaaccugcgggaguucguguucaagaacaucgacggcuacuucaagaucuacagcaagcacaccccaaucaaccuggugcgggaucugccccagggcuucucagcccuggagccccugguggaccugcccaucggcaucaacaucacccgguuccagacccugcuggcccugcaccggagcuaccugaccccaggcgacagcagcagcggguggacagcaggcgcggcugcuuacuacgugggcuaccugcagccccggaccuuccugcugaaguacaacgagaacggcaccaucaccgacgccguggacugcgcccuggacccucugagcgagaccaagugcacccugaagagcuucaccguggagaagggcaucuaccagaccagcaacuuccgggugcagcccaccgagagcaucgugcgguuccccaacaucaccaaccugugccccuucggcgagguguucaacgccacccgguucgccagcguguacgccuggaaccggaagcggaucagcaacugcguggccgacuacagcgugcuguacaacagcgccagcuucagcaccuucaagugcuacggcgugagccccaccaagcugaacgaccugugcuucaccaacguguacgccgacagcuucgugauccguggcgacgaggugcggcagaucgcacccggccagacaggcaagaucgccgacuacaacuacaagcugcccgacgacuucaccggcugcgugaucgccuggaacagcaagaaccucgacagcaaggugggcggcaacuacaacuaccuguaccggcuguuccggaagagcaaccugaagcccuucgagcgggacaucagcaccgagaucuaccaagccggcuccaccccuugcaacggcguggagggcuucaacugcuacuucccucugcagagcuacggcuuccagcccaccaacggcgugggcuaccagcccuaccgggugguggugcugagcuucgagcugcugcacgccccagccaccguguguggccccaagaagagcaccaaccuggugaagaacaagugcgugaacuucaacuucaacggccuuaccggcaccggcgugcugaccgagagcaacaagaaauuccugcccuuucagcaguucggccgggacaucgccgacaccaccgacgcugugcgggauccccagacccuggagauccuggacaucaccccuugcagcuucggcggcgugagcgugaucaccccaggcaccaacaccagcaaccagguggccgugcuguaccagggcgugaacugcaccgaggugcccguggccauccacgccgaccagcugacacccaccuggcgggucuacagcaccggcagcaacguguuccagacccgggccgguugccugaucggcgccgagcacgugaacaacagcuacgagugcgacauccccaucggcgccggcaucugugccagcuaccagacccagaccaauucaccccggagggcaaggagcguggccagccagagcaucaucgccuacaccaugagccugggcgccgagaacagcguggccuacagcaacaacagcaucgccauccccaccaacuucaccaucagcgugaccaccgagauucugcccgugagcaugaccaagaccagcguggacugcaccauguacaucugcggcgacagcaccgagugcagcaaccugcugcugcaguacggcagcuucugcacccagcugaaccgggcccugaccggcaucgccguggagcaggacaagaacacccaggagguguucgcccaggugaagcagaucuacaagaccccucccaucaaggacuucggcggcuucaacuucagccagauccugcccgaccccagcaagcccagcaagcggagcuucaucgaggaccugcuguucaacaaggugacccuagccgacgccggcuucaucaagcaguacggcgacugccucggcgacauagccgcccgggaccugaucugcgcccagaaguucaacggccugaccgugcugccuccccugcugaccgacgagaugaucgcccaguacaccagcgcccuguuagccggaaccaucaccagcggcuggacuuucggcgcuggagccgcucugcagauccccuucgccaugcagauggccuaccgguucaacggcaucggcgugacccagaacgugcuguacgagaaccagaagcugaucgccaaccaguucaacagcgccaucggcaagauccaggacagccugagcagcaccgcuagcgcccugggcaagcugcaggacguggugaaccagaacgcccaggcccugaacacccuggugaagcagcugagcagcaacuucggcgccaucagcagcgugcugaacgacauccugagccggcuggacccucccgaggccgaggugcagaucgaccggcugaucacuggccggcugcagagccugcagaccuacgugacccagcagcugauccgggccgccgagauucgggccagcgccaaccuggccgccaccaagaugagcgagugcgugcugggccagagcaagcggguggacuucugcggcaagggcuaccaccugaugagcuuuccccagagcgcaccccacggagugguguuccugcacgugaccuacgugcccgcccaggagaagaacuucaccaccgccccagccaucugccacgacggcaaggcccacuuuccccgggagggcguguucgugagcaacggcacccacugguucgugacccagcggaacuucuacgagccccagaucaucaccaccgacaacaccuucgugagcggcaacugcgacguggugaucggcaucgugaacaacaccguguacgauccccugcagcccgagcuggacagcuucaaggaggagcuggacaaguacuucaagaaucacaccagccccgacguggaccugggcgacaucagcggcaucaacgccagcguggugaacauccagaaggagaucgaucggcugaacgagguggccaagaaccugaacgagagccugaucgaccugcaggagcugggcaaguacgagcaguacaucaaguggcccugguacaucuggcugggcuucaucgccggccugaucgccaucgugauggugaccaucaugcugugcugcaugaccagcugcugcagcugccugaagggcuguugcagcugcggcagcugcugcaaguucgacgaggacgacagcgagcccgugcugaagggcgugaagcugcacuacaccugauaauaggcuggagccucgguggccuagcuucuugccccuugggccuccccccagccccuccuccccuuccugcacccguacccccguggucuuugaauaaagucugagugggcggcaaaaaaaaaaaaaaaaaaaaaaaaaaaaaaaaaaaaaaaaaaaaaaaaaaaaaaaaaaaaaaaaaaaaaaaaaaaaaaaaaaaaaaaaaaaaaaaaaaaaucuag

SEQ ID NO: 26637 - RNA, 4100 nt, Artificial Sequence
  SARS-CoV-2/Wuhan/WIV05/2019__EPI_ISL_402128 spike protein mRNA gc (1-1273)(K986P_V987P_S477N_D614G)
gggaaauaagagagaaaagaagaguaagaagaaauauaagaccccggcgccgccaccauguucguguuccuggugcugcugccccuggugagcagccagugcgugaaccugaccacccggacccagcugccaccagccuacaccaacagcuucacccggggcgucuacuaccccgacaagguguuccggagcagcguccugcacagcacccaggaccuguuccugcccuucuucagcaacgugaccugguuccacgccauccacgugagcggcaccaacggcaccaagcgguucgacaaccccgugcugcccuucaacgacggcguguacuucgccagcaccgagaagagcaacaucauccggggcuggaucuucggcaccacccuggacagcaagacccagagccugcugaucgugaauaacgccaccaacguggugaucaaggugugcgaguuccaguucugcaacgaccccuuccugggcguguacuaccacaagaacaacaagagcuggauggagagcgaguuccggguguacagcagcgccaacaacugcaccuucgaguacgugagccagcccuuccugauggaccuggagggcaagcagggcaacuucaagaaccugcgggaguucguguucaagaacaucgacggcuacuucaagaucuacagcaagcacaccccaaucaaccuggugcgggaucugccccagggcuucucagcccuggagccccugguggaccugcccaucggcaucaacaucacccgguuccagacccugcuggcccugcaccggagcuaccugaccccaggcgacagcagcagcggguggacagcaggcgcggcugcuuacuacgugggcuaccugcagccccggaccuuccugcugaaguacaacgagaacggcaccaucaccgacgccguggacugcgcccuggacccucugagcgagaccaagugcacccugaagagcuucaccguggagaagggcaucuaccagaccagcaacuuccgggugcagcccaccgagagcaucgugcgguuccccaacaucaccaaccugugccccuucggcgagguguucaacgccacccgguucgccagcguguacgccuggaaccggaagcggaucagcaacugcguggccgacuacagcgugcuguacaacagcgccagcuucagcaccuucaagugcuacggcgugagccccaccaagcugaacgaccugugcuucaccaacguguacgccgacagcuucgugauccguggcgacgaggugcggcagaucgcacccggccagacaggcaagaucgccgacuacaacuacaagcugcccgacgacuucaccggcugcgugaucgccuggaacagcaacaaccucgacagcaaggugggcggcaacuacaacuaccuguaccggcuguuccggaagagcaaccugaagcccuucgagcgggacaucagcaccgagaucuaccaagccggcaacaccccuugcaacggcguggagggcuucaacugcuacuucccucugcagagcuacggcuuccagcccaccaacggcgugggcuaccagcccuaccgggugguggugcugagcuucgagcugcugcacgccccagccaccguguguggccccaagaagagcaccaaccuggugaagaacaagugcgugaacuucaacuucaacggccuuaccggcaccggcgugcugaccgagagcaacaagaaauuccugcccuuucagcaguucggccgggacaucgccgacaccaccgacgcugugcgggauccccagacccuggagauccuggacaucaccccuugcagcuucggcggcgugagcgugaucaccccaggcaccaacaccagcaaccagguggccgugcuguaccagggcgugaacugcaccgaggugcccguggccauccacgccgaccagcugacacccaccuggcgggucuacagcaccggcagcaacguguuccagacccgggccgguugccugaucggcgccgagcacgugaacaacagcuacgagugcgacauccccaucggcgccggcaucugugccagcuaccagacccagaccaauucaccccggagggcaaggagcguggccagccagagcaucaucgccuacaccaugagccugggcgccgagaacagcguggccuacagcaacaacagcaucgccauccccaccaacuucaccaucagcgugaccaccgagauucugcccgugagcaugaccaagaccagcguggacugcaccauguacaucugcggcgacagcaccgagugcagcaaccugcugcugcaguacggcagcuucugcacccagcugaaccgggcccugaccggcaucgccguggagcaggacaagaacacccaggagguguucgcccaggugaagcagaucuacaagaccccucccaucaaggacuucggcggcuucaacuucagccagauccugcccgaccccagcaagcccagcaagcggagcuucaucgaggaccugcuguucaacaaggugacccuagccgacgccggcuucaucaagcaguacggcgacugccucggcgacauagccgcccgggaccugaucugcgcccagaaguucaacggccugaccgugcugccuccccugcugaccgacgagaugaucgcccaguacaccagcgcccuguuagccggaaccaucaccagcggcuggacuuucggcgcuggagccgcucugcagauccccuucgccaugcagauggccuaccgguucaacggcaucggcgugacccagaacgugcuguacgagaaccagaagcugaucgccaaccaguucaacagcgccaucggcaagauccaggacagccugagcagcaccgcuagcgcccugggcaagcugcaggacguggugaaccagaacgcccaggcccugaacacccuggugaagcagcugagcagcaacuucggcgccaucagcagcgugcugaacgacauccugagccggcuggacccucccgaggccgaggugcagaucgaccggcugaucacuggccggcugcagagccugcagaccuacgugacccagcagcugauccgggccgccgagauucgggccagcgccaaccuggccgccaccaagaugagcgagugcgugcugggccagagcaagcggguggacuucugcggcaagggcuaccaccugaugagcuuuccccagagcgcaccccacggagugguguuccugcacgugaccuacgugcccgcccaggagaagaacuucaccaccgccccagccaucugccacgacggcaaggcccacuuuccccgggagggcguguucgugagcaacggcacccacugguucgugacccagcggaacuucuacgagccccagaucaucaccaccgacaacaccuucgugagcggcaacugcgacguggugaucggcaucgugaacaacaccguguacgauccccugcagcccgagcuggacagcuucaaggaggagcuggacaaguacuucaagaaucacaccagccccgacguggaccugggcgacaucagcggcaucaacgccagcguggugaacauccagaaggagaucgaucggcugaacgagguggccaagaaccugaacgagagccugaucgaccugcaggagcugggcaaguacgagcaguacaucaaguggcccugguacaucuggcugggcuucaucgccggccugaucgccaucgugauggugaccaucaugcugugcugcaugaccagcugcugcagcugccugaagggcuguugcagcugcggcagcugcugcaaguucgacgaggacgacagcgagcccgugcugaagggcgugaagcugcacuacaccugauaauaggcuggagccucgguggccuagcuucuugccccuugggccuccccccagccccuccuccccuuccugcacccguacccccguggucuuugaauaaagucugagugggcggcaaaaaaaaaaaaaaaaaaaaaaaaaaaaaaaaaaaaaaaaaaaaaaaaaaaaaaaaaaaaaaaaaaaaaaaaaaaaaaaaaaaaaaaaaaaaaaaaaaaaucuag

SEQ ID NO: 26638 - RNA, 4100 nt, Artificial Sequence
  SARS-CoV-2/Wuhan/WIV05/2019__EPI_ISL_402128 spike protein mRNA gc (1-1273)(K986P_V987P_N501Y_D614G)
gggaaauaagagagaaaagaagaguaagaagaaauauaagaccccggcgccgccaccauguucguguuccuggugcugcugccccuggugagcagccagugcgugaaccugaccacccggacccagcugccaccagccuacaccaacagcuucacccggggcgucuacuaccccgacaagguguuccggagcagcguccugcacagcacccaggaccuguuccugcccuucuucagcaacgugaccugguuccacgccauccacgugagcggcaccaacggcaccaagcgguucgacaaccccgugcugcccuucaacgacggcguguacuucgccagcaccgagaagagcaacaucauccggggcuggaucuucggcaccacccuggacagcaagacccagagccugcugaucgugaauaacgccaccaacguggugaucaaggugugcgaguuccaguucugcaacgaccccuuccugggcguguacuaccacaagaacaacaagagcuggauggagagcgaguuccggguguacagcagcgccaacaacugcaccuucgaguacgugagccagcccuuccugauggaccuggagggcaagcagggcaacuucaagaaccugcgggaguucguguucaagaacaucgacggcuacuucaagaucuacagcaagcacaccccaaucaaccuggugcgggaucugccccagggcuucucagcccuggagccccugguggaccugcccaucggcaucaacaucacccgguuccagacccugcuggcccugcaccggagcuaccugaccccaggcgacagcagcagcggguggacagcaggcgcggcugcuuacuacgugggcuaccugcagccccggaccuuccugcugaaguacaacgagaacggcaccaucaccgacgccguggacugcgcccuggacccucugagcgagaccaagugcacccugaagagcuucaccguggagaagggcaucuaccagaccagcaacuuccgggugcagcccaccgagagcaucgugcgguuccccaacaucaccaaccugugccccuucggcgagguguucaacgccacccgguucgccagcguguacgccuggaaccggaagcggaucagcaacugcguggccgacuacagcgugcuguacaacagcgccagcuucagcaccuucaagugcuacggcgugagccccaccaagcugaacgaccugugcuucaccaacguguacgccgacagcuucgugauccguggcgacgaggugcggcagaucgcacccggccagacaggcaagaucgccgacuacaacuacaagcugcccgacgacuucaccggcugcgugaucgccuggaacagcaacaaccucgacagcaaggugggcggcaacuacaacuaccuguaccggcuguuccggaagagcaaccugaagcccuucgagcgggacaucagcaccgagaucuaccaagccggcuccaccccuugcaacggcguggagggcuucaacugcuacuucccucugcagagcuacggcuuccagcccaccuacggcgugggcuaccagcccuaccgggugguggugcugagcuucgagcugcugcacgccccagccaccguguguggccccaagaagagcaccaaccuggugaagaacaagugcgugaacuucaacuucaacggccuuaccggcaccggcgugcugaccgagagcaacaagaaauuccugcccuuucagcaguucggccgggacaucgccgacaccaccgacgcugugcgggauccccagacccuggagauccuggacaucaccccuugcagcuucggcggcgugagcgugaucaccccaggcaccaacaccagcaaccagguggccgugcuguaccagggcgugaacugcaccgaggugcccguggccauccacgccgaccagcugacacccaccuggcgggucuacagcaccggcagcaacguguuccagacccgggccgguugccugaucggcgccgagcacgugaacaacagcuacgagugcgacauccccaucggcgccggcaucugugccagcuaccagacccagaccaauucaccccggagggcaaggagcguggccagccagagcaucaucgccuacaccaugagccugggcgccgagaacagcguggccuacagcaacaacagcaucgccauccccaccaacuucaccaucagcgugaccaccgagauucugcccgugagcaugaccaagaccagcguggacugcaccauguacaucugcggcgacagcaccgagugcagcaaccugcugcugcaguacggcagcuucugcacccagcugaaccgggcccugaccggcaucgccguggagcaggacaagaacacccaggagguguucgcccaggugaagcagaucuacaagaccccucccaucaaggacuucggcggcuucaacuucagccagauccugcccgaccccagcaagcccagcaagcggagcuucaucgaggaccugcuguucaacaaggugacccuagccgacgccggcuucaucaagcaguacggcgacugccucggcgacauagccgcccgggaccugaucugcgcccagaaguucaacggccugaccgugcugccuccccugcugaccgacgagaugaucgcccaguacaccagcgcccuguuagccggaaccaucaccagcggcuggacuuucggcgcuggagccgcucugcagauccccuucgccaugcagauggccuaccgguucaacggcaucggcgugacccagaacgugcuguacgagaaccagaagcugaucgccaaccaguucaacagcgccaucggcaagauccaggacagccugagcagcaccgcuagcgcccugggcaagcugcaggacguggugaaccagaacgcccaggcccugaacacccuggugaagcagcugagcagcaacuucggcgccaucagcagcgugcugaacgacauccugagccggcuggacccucccgaggccgaggugcagaucgaccggcugaucacuggccggcugcagagccugcagaccuacgugacccagcagcugauccgggccgccgagauucgggccagcgccaaccuggccgccaccaagaugagcgagugcgugcugggccagagcaagcggguggacuucugcggcaagggcuaccaccugaugagcuuuccccagagcgcaccccacggagugguguuccugcacgugaccuacgugcccgcccaggagaagaacuucaccaccgccccagccaucugccacgacggcaaggcccacuuuccccgggagggcguguucgugagcaacggcacccacugguucgugacccagcggaacuucuacgagccccagaucaucaccaccgacaacaccuucgugagcggcaacugcgacguggugaucggcaucgugaacaacaccguguacgauccccugcagcccgagcuggacagcuucaaggaggagcuggacaaguacuucaagaaucacaccagccccgacguggaccugggcgacaucagcggcaucaacgccagcguggugaacauccagaaggagaucgaucggcugaacgagguggccaagaaccugaacgagagccugaucgaccugcaggagcugggcaaguacgagcaguacaucaaguggcccugguacaucuggcugggcuucaucgccggccugaucgccaucgugauggugaccaucaugcugugcugcaugaccagcugcugcagcugccugaagggcuguugcagcugcggcagcugcugcaaguucgacgaggacgacagcgagcccgugcugaagggcgugaagcugcacuacaccugauaauaggcuggagccucgguggccuagcuucuugccccuugggccuccccccagccccuccuccccuuccugcacccguacccccguggucuuugaauaaagucugagugggcggcaaaaaaaaaaaaaaaaaaaaaaaaaaaaaaaaaaaaaaaaaaaaaaaaaaaaaaaaaaaaaaaaaaaaaaaaaaaaaaaaaaaaaaaaaaaaaaaaaaaaucuag

SEQ ID NO: 26639 - RNA, 4094 nt, Artificial Sequence
  SARS-CoV-2/Wuhan/WIV05/2019__EPI_ISL_402128 spike protein mRNA gc (1-1273)(K986P_V987P_H69del_V70del_D614G)
gggaaauaagagagaaaagaagaguaagaagaaauauaagaccccggcgccgccaccauguucguguuccuggugcugcugccccuggugagcagccagugcgugaaccugaccacccggacccagcugccaccagccuacaccaacagcuucacccggggcgucuacuaccccgacaagguguuccggagcagcguccugcacagcacccaggaccuguuccugcccuucuucagcaacgugaccugguuccacgccaucagcggcaccaacggcaccaagcgguucgacaaccccgugcugcccuucaacgacggcguguacuucgccagcaccgagaagagcaacaucauccggggcuggaucuucggcaccacccuggacagcaagacccagagccugcugaucgugaauaacgccaccaacguggugaucaaggugugcgaguuccaguucugcaacgaccccuuccugggcguguacuaccacaagaacaacaagagcuggauggagagcgaguuccggguguacagcagcgccaacaacugcaccuucgaguacgugagccagcccuuccugauggaccuggagggcaagcagggcaacuucaagaaccugcgggaguucguguucaagaacaucgacggcuacuucaagaucuacagcaagcacaccccaaucaaccuggugcgggaucugccccagggcuucucagcccuggagccccugguggaccugcccaucggcaucaacaucacccgguuccagacccugcuggcccugcaccggagcuaccugaccccaggcgacagcagcagcggguggacagcaggcgcggcugcuuacuacgugggcuaccugcagccccggaccuuccugcugaaguacaacgagaacggcaccaucaccgacgccguggacugcgcccuggacccucugagcgagaccaagugcacccugaagagcuucaccguggagaagggcaucuaccagaccagcaacuuccgggugcagcccaccgagagcaucgugcgguuccccaacaucaccaaccugugccccuucggcgagguguucaacgccacccgguucgccagcguguacgccuggaaccggaagcggaucagcaacugcguggccgacuacagcgugcuguacaacagcgccagcuucagcaccuucaagugcuacggcgugagccccaccaagcugaacgaccugugcuucaccaacguguacgccgacagcuucgugauccguggcgacgaggugcggcagaucgcacccggccagacaggcaagaucgccgacuacaacuacaagcugcccgacgacuucaccggcugcgugaucgccuggaacagcaacaaccucgacagcaaggugggcggcaacuacaacuaccuguaccggcuguuccggaagagcaaccugaagcccuucgagcgggacaucagcaccgagaucuaccaagccggcuccaccccuugcaacggcguggagggcuucaacugcuacuucccucugcagagcuacggcuuccagcccaccaacggcgugggcuaccagcccuaccgggugguggugcugagcuucgagcugcugcacgccccagccaccguguguggccccaagaagagcaccaaccuggugaagaacaagugcgugaacuucaacuucaacggccuuaccggcaccggcgugcugaccgagagcaacaagaaauuccugcccuuucagcaguucggccgggacaucgccgacaccaccgacgcugugcgggauccccagacccuggagauccuggacaucaccccuugcagcuucggcggcgugagcgugaucaccccaggcaccaacaccagcaaccagguggccgugcuguaccagggcgugaacugcaccgaggugcccguggccauccacgccgaccagcugacacccaccuggcgggucuacagcaccggcagcaacguguuccagacccgggccgguugccugaucggcgccgagcacgugaacaacagcuacgagugcgacauccccaucggcgccggcaucugugccagcuaccagacccagaccaauucaccccggagggcaaggagcguggccagccagagcaucaucgccuacaccaugagccugggcgccgagaacagcguggccuacagcaacaacagcaucgccauccccaccaacuucaccaucagcgugaccaccgagauucugcccgugagcaugaccaagaccagcguggacugcaccauguacaucugcggcgacagcaccgagugcagcaaccugcugcugcaguacggcagcuucugcacccagcugaaccgggcccugaccggcaucgccguggagcaggacaagaacacccaggagguguucgcccaggugaagcagaucuacaagaccccucccaucaaggacuucggcggcuucaacuucagccagauccugcccgaccccagcaagcccagcaagcggagcuucaucgaggaccugcuguucaacaaggugacccuagccgacgccggcuucaucaagcaguacggcgacugccucggcgacauagccgcccgggaccugaucugcgcccagaaguucaacggccugaccgugcugccuccccugcugaccgacgagaugaucgcccaguacaccagcgcccuguuagccggaaccaucaccagcggcuggacuuucggcgcuggagccgcucugcagauccccuucgccaugcagauggccuaccgguucaacggcaucggcgugacccagaacgugcuguacgagaaccagaagcugaucgccaaccaguucaacagcgccaucggcaagauccaggacagccugagcagcaccgcuagcgcccugggcaagcugcaggacguggugaaccagaacgcccaggcccugaacacccuggugaagcagcugagcagcaacuucggcgccaucagcagcgugcugaacgacauccugagccggcuggacccucccgaggccgaggugcagaucgaccggcugaucacuggccggcugcagagccugcagaccuacgugacccagcagcugauccgggccgccgagauucgggccagcgccaaccuggccgccaccaagaugagcgagugcgugcugggccagagcaagcggguggacuucugcggcaagggcuaccaccugaugagcuuuccccagagcgcaccccacggagugguguuccugcacgugaccuacgugcccgcccaggagaagaacuucaccaccgccccagccaucugccacgacggcaaggcccacuuuccccgggagggcguguucgugagcaacggcacccacugguucgugacccagcggaacuucuacgagccccagaucaucaccaccgacaacaccuucgugagcggcaacugcgacguggugaucggcaucgugaacaacaccguguacgauccccugcagcccgagcuggacagcuucaaggaggagcuggacaaguacuucaagaaucacaccagccccgacguggaccugggcgacaucagcggcaucaacgccagcguggugaacauccagaaggagaucgaucggcugaacgagguggccaagaaccugaacgagagccugaucgaccugcaggagcugggcaaguacgagcaguacaucaaguggcccugguacaucuggcugggcuucaucgccggccugaucgccaucgugauggugaccaucaugcugugcugcaugaccagcugcugcagcugccugaagggcuguugcagcugcggcagcugcugcaaguucgacgaggacgacagcgagcccgugcugaagggcgugaagcugcacuacaccugauaauaggcuggagccucgguggccuagcuucuugccccuugggccuccccccagccccuccuccccuuccugcacccguacccccguggucuuugaauaaagucugagugggcggcaaaaaaaaaaaaaaaaaaaaaaaaaaaaaaaaaaaaaaaaaaaaaaaaaaaaaaaaaaaaaaaaaaaaaaaaaaaaaaaaaaaaaaaaaaaaaaaaaaaaucuag

SEQ ID NO: 26640 - RNA, 4100 nt, Artificial Sequence
  SARS-CoV-2/Wuhan/WIV05/2019__EPI_ISL_402128 spike protein mRNA gc (1-1273)(K986P_V987P_Y453F_D614G)
gggaaauaagagagaaaagaagaguaagaagaaauauaagaccccggcgccgccaccauguucguguuccuggugcugcugccccuggugagcagccagugcgugaaccugaccacccggacccagcugccaccagccuacaccaacagcuucacccggggcgucuacuaccccgacaagguguuccggagcagcguccugcacagcacccaggaccuguuccugcccuucuucagcaacgugaccugguuccacgccauccacgugagcggcaccaacggcaccaagcgguucgacaaccccgugcugcccuucaacgacggcguguacuucgccagcaccgagaagagcaacaucauccggggcuggaucuucggcaccacccuggacagcaagacccagagccugcugaucgugaauaacgccaccaacguggugaucaaggugugcgaguuccaguucugcaacgaccccuuccugggcguguacuaccacaagaacaacaagagcuggauggagagcgaguuccggguguacagcagcgccaacaacugcaccuucgaguacgugagccagcccuuccugauggaccuggagggcaagcagggcaacuucaagaaccugcgggaguucguguucaagaacaucgacggcuacuucaagaucuacagcaagcacaccccaaucaaccuggugcgggaucugccccagggcuucucagcccuggagccccugguggaccugcccaucggcaucaacaucacccgguuccagacccugcuggcccugcaccggagcuaccugaccccaggcgacagcagcagcggguggacagcaggcgcggcugcuuacuacgugggcuaccugcagccccggaccuuccugcugaaguacaacgagaacggcaccaucaccgacgccguggacugcgcccuggacccucugagcgagaccaagugcacccugaagagcuucaccguggagaagggcaucuaccagaccagcaacuuccgggugcagcccaccgagagcaucgugcgguuccccaacaucaccaaccugugccccuucggcgagguguucaacgccacccgguucgccagcguguacgccuggaaccggaagcggaucagcaacugcguggccgacuacagcgugcuguacaacagcgccagcuucagcaccuucaagugcuacggcgugagccccaccaagcugaacgaccugugcuucaccaacguguacgccgacagcuucgugauccguggcgacgaggugcggcagaucgcacccggccagacaggcaagaucgccgacuacaacuacaagcugcccgacgacuucaccggcugcgugaucgccuggaacagcaacaaccucgacagcaaggugggcggcaacuacaacuaccuguuccggcuguuccggaagagcaaccugaagcccuucgagcgggacaucagcaccgagaucuaccaagccggcuccaccccuugcaacggcguggagggcuucaacugcuacuucccucugcagagcuacggcuuccagcccaccaacggcgugggcuaccagcccuaccgggugguggugcugagcuucgagcugcugcacgccccagccaccguguguggccccaagaagagcaccaaccuggugaagaacaagugcgugaacuucaacuucaacggccuuaccggcaccggcgugcugaccgagagcaacaagaaauuccugcccuuucagcaguucggccgggacaucgccgacaccaccgacgcugugcgggauccccagacccuggagauccuggacaucaccccuugcagcuucggcggcgugagcgugaucaccccaggcaccaacaccagcaaccagguggccgugcuguaccagggcgugaacugcaccgaggugcccguggccauccacgccgaccagcugacacccaccuggcgggucuacagcaccggcagcaacguguuccagacccgggccgguugccugaucggcgccgagcacgugaacaacagcuacgagugcgacauccccaucggcgccggcaucugugccagcuaccagacccagaccaauucaccccggagggcaaggagcguggccagccagagcaucaucgccuacaccaugagccugggcgccgagaacagcguggccuacagcaacaacagcaucgccauccccaccaacuucaccaucagcgugaccaccgagauucugcccgugagcaugaccaagaccagcguggacugcaccauguacaucugcggcgacagcaccgagugcagcaaccugcugcugcaguacggcagcuucugcacccagcugaaccgggcccugaccggcaucgccguggagcaggacaagaacacccaggagguguucgcccaggugaagcagaucuacaagaccccucccaucaaggacuucggcggcuucaacuucagccagauccugcccgaccccagcaagcccagcaagcggagcuucaucgaggaccugcuguucaacaaggugacccuagccgacgccggcuucaucaagcaguacggcgacugccucggcgacauagccgcccgggaccugaucugcgcccagaaguucaacggccugaccgugcugccuccccugcugaccgacgagaugaucgcccaguacaccagcgcccuguuagccggaaccaucaccagcggcuggacuuucggcgcuggagccgcucugcagauccccuucgccaugcagauggccuaccgguucaacggcaucggcgugacccagaacgugcuguacgagaaccagaagcugaucgccaaccaguucaacagcgccaucggcaagauccaggacagccugagcagcaccgcuagcgcccugggcaagcugcaggacguggugaaccagaacgcccaggcccugaacacccuggugaagcagcugagcagcaacuucggcgccaucagcagcgugcugaacgacauccugagccggcuggacccucccgaggccgaggugcagaucgaccggcugaucacuggccggcugcagagccugcagaccuacgugacccagcagcugauccgggccgccgagauucgggccagcgccaaccuggccgccaccaagaugagcgagugcgugcugggccagagcaagcggguggacuucugcggcaagggcuaccaccugaugagcuuuccccagagcgcaccccacggagugguguuccugcacgugaccuacgugcccgcccaggagaagaacuucaccaccgccccagccaucugccacgacggcaaggcccacuuuccccgggagggcguguucgugagcaacggcacccacugguucgugacccagcggaacuucuacgagccccagaucaucaccaccgacaacaccuucgugagcggcaacugcgacguggugaucggcaucgugaacaacaccguguacgauccccugcagcccgagcuggacagcuucaaggaggagcuggacaaguacuucaagaaucacaccagccccgacguggaccugggcgacaucagcggcaucaacgccagcguggugaacauccagaaggagaucgaucggcugaacgagguggccaagaaccugaacgagagccugaucgaccugcaggagcugggcaaguacgagcaguacaucaaguggcccugguacaucuggcugggcuucaucgccggccugaucgccaucgugauggugaccaucaugcugugcugcaugaccagcugcugcagcugccugaagggcuguugcagcugcggcagcugcugcaaguucgacgaggacgacagcgagcccgugcugaagggcgugaagcugcacuacaccugauaauaggcuggagccucgguggccuagcuucuugccccuugggccuccccccagccccuccuccccuuccugcacccguacccccguggucuuugaauaaagucugagugggcggcaaaaaaaaaaaaaaaaaaaaaaaaaaaaaaaaaaaaaaaaaaaaaaaaaaaaaaaaaaaaaaaaaaaaaaaaaaaaaaaaaaaaaaaaaaaaaaaaaaaaucuag

SEQ ID NO: 26641 - RNA, 4100 nt, Artificial Sequence
  SARS-CoV-2/Wuhan/WIV05/2019__EPI_ISL_402128 spike protein mRNA gc (1-1273)(K986P_V987P_D614G_I692V)
gggaaauaagagagaaaagaagaguaagaagaaauauaagaccccggcgccgccaccauguucguguuccuggugcugcugccccuggugagcagccagugcgugaaccugaccacccggacccagcugccaccagccuacaccaacagcuucacccggggcgucuacuaccccgacaagguguuccggagcagcguccugcacagcacccaggaccuguuccugcccuucuucagcaacgugaccugguuccacgccauccacgugagcggcaccaacggcaccaagcgguucgacaaccccgugcugcccuucaacgacggcguguacuucgccagcaccgagaagagcaacaucauccggggcuggaucuucggcaccacccuggacagcaagacccagagccugcugaucgugaauaacgccaccaacguggugaucaaggugugcgaguuccaguucugcaacgaccccuuccugggcguguacuaccacaagaacaacaagagcuggauggagagcgaguuccggguguacagcagcgccaacaacugcaccuucgaguacgugagccagcccuuccugauggaccuggagggcaagcagggcaacuucaagaaccugcgggaguucguguucaagaacaucgacggcuacuucaagaucuacagcaagcacaccccaaucaaccuggugcgggaucugccccagggcuucucagcccuggagccccugguggaccugcccaucggcaucaacaucacccgguuccagacccugcuggcccugcaccggagcuaccugaccccaggcgacagcagcagcggguggacagcaggcgcggcugcuuacuacgugggcuaccugcagccccggaccuuccugcugaaguacaacgagaacggcaccaucaccgacgccguggacugcgcccuggacccucugagcgagaccaagugcacccugaagagcuucaccguggagaagggcaucuaccagaccagcaacuuccgggugcagcccaccgagagcaucgugcgguuccccaacaucaccaaccugugccccuucggcgagguguucaacgccacccgguucgccagcguguacgccuggaaccggaagcggaucagcaacugcguggccgacuacagcgugcuguacaacagcgccagcuucagcaccuucaagugcuacggcgugagccccaccaagcugaacgaccugugcuucaccaacguguacgccgacagcuucgugauccguggcgacgaggugcggcagaucgcacccggccagacaggcaagaucgccgacuacaacuacaagcugcccgacgacuucaccggcugcgugaucgccuggaacagcaacaaccucgacagcaaggugggcggcaacuacaacuaccuguaccggcuguuccggaagagcaaccugaagcccuucgagcgggacaucagcaccgagaucuaccaagccggcuccaccccuugcaacggcguggagggcuucaacugcuacuucccucugcagagcuacggcuuccagcccaccaacggcgugggcuaccagcccuaccgggugguggugcugagcuucgagcugcugcacgccccagccaccguguguggccccaagaagagcaccaaccuggugaagaacaagugcgugaacuucaacuucaacggccuuaccggcaccggcgugcugaccgagagcaacaagaaauuccugcccuuucagcaguucggccgggacaucgccgacaccaccgacgcugugcgggauccccagacccuggagauccuggacaucaccccuugcagcuucggcggcgugagcgugaucaccccaggcaccaacaccagcaaccagguggccgugcuguaccagggcgugaacugcaccgaggugcccguggccauccacgccgaccagcugacacccaccuggcgggucuacagcaccggcagcaacguguuccagacccgggccgguugccugaucggcgccgagcacgugaacaacagcuacgagugcgacauccccaucggcgccggcaucugugccagcuaccagacccagaccaauucaccccggagggcaaggagcguggccagccagagcgugaucgccuacaccaugagccugggcgccgagaacagcguggccuacagcaacaacagcaucgccauccccaccaacuucaccaucagcgugaccaccgagauucugcccgugagcaugaccaagaccagcguggacugcaccauguacaucugcggcgacagcaccgagugcagcaaccugcugcugcaguacggcagcuucugcacccagcugaaccgggcccugaccggcaucgccguggagcaggacaagaacacccaggagguguucgcccaggugaagcagaucuacaagaccccucccaucaaggacuucggcggcuucaacuucagccagauccugcccgaccccagcaagcccagcaagcggagcuucaucgaggaccugcuguucaacaaggugacccuagccgacgccggcuucaucaagcaguacggcgacugccucggcgacauagccgcccgggaccugaucugcgcccagaaguucaacggccugaccgugcugccuccccugcugaccgacgagaugaucgcccaguacaccagcgcccuguuagccggaaccaucaccagcggcuggacuuucggcgcuggagccgcucugcagauccccuucgccaugcagauggccuaccgguucaacggcaucggcgugacccagaacgugcuguacgagaaccagaagcugaucgccaaccaguucaacagcgccaucggcaagauccaggacagccugagcagcaccgcuagcgcccugggcaagcugcaggacguggugaaccagaacgcccaggcccugaacacccuggugaagcagcugagcagcaacuucggcgccaucagcagcgugcugaacgacauccugagccggcuggacccucccgaggccgaggugcagaucgaccggcugaucacuggccggcugcagagccugcagaccuacgugacccagcagcugauccgggccgccgagauucgggccagcgccaaccuggccgccaccaagaugagcgagugcgugcugggccagagcaagcggguggacuucugcggcaagggcuaccaccugaugagcuuuccccagagcgcaccccacggagugguguuccugcacgugaccuacgugcccgcccaggagaagaacuucaccaccgccccagccaucugccacgacggcaaggcccacuuuccccgggagggcguguucgugagcaacggcacccacugguucgugacccagcggaacuucuacgagccccagaucaucaccaccgacaacaccuucgugagcggcaacugcgacguggugaucggcaucgugaacaacaccguguacgauccccugcagcccgagcuggacagcuucaaggaggagcuggacaaguacuucaagaaucacaccagccccgacguggaccugggcgacaucagcggcaucaacgccagcguggugaacauccagaaggagaucgaucggcugaacgagguggccaagaaccugaacgagagccugaucgaccugcaggagcugggcaaguacgagcaguacaucaaguggcccugguacaucuggcugggcuucaucgccggccugaucgccaucgugauggugaccaucaugcugugcugcaugaccagcugcugcagcugccugaagggcuguugcagcugcggcagcugcugcaaguucgacgaggacgacagcgagcccgugcugaagggcgugaagcugcacuacaccugauaauaggcuggagccucgguggccuagcuucuugccccuugggccuccccccagccccuccuccccuuccugcacccguacccccguggucuuugaauaaagucugagugggcggcaaaaaaaaaaaaaaaaaaaaaaaaaaaaaaaaaaaaaaaaaaaaaaaaaaaaaaaaaaaaaaaaaaaaaaaaaaaaaaaaaaaaaaaaaaaaaaaaaaaaucuag

SEQ ID NO: 26642 - RNA, 4100 nt, Artificial Sequence
  SARS-CoV-2/Wuhan/WIV05/2019__EPI_ISL_402128 spike protein mRNA gc (1-1273)(K986P_V987P_D614G_M1229I)
gggaaauaagagagaaaagaagaguaagaagaaauauaagaccccggcgccgccaccauguucguguuccuggugcugcugccccuggugagcagccagugcgugaaccugaccacccggacccagcugccaccagccuacaccaacagcuucacccggggcgucuacuaccccgacaagguguuccggagcagcguccugcacagcacccaggaccuguuccugcccuucuucagcaacgugaccugguuccacgccauccacgugagcggcaccaacggcaccaagcgguucgacaaccccgugcugcccuucaacgacggcguguacuucgccagcaccgagaagagcaacaucauccggggcuggaucuucggcaccacccuggacagcaagacccagagccugcugaucgugaauaacgccaccaacguggugaucaaggugugcgaguuccaguucugcaacgaccccuuccugggcguguacuaccacaagaacaacaagagcuggauggagagcgaguuccggguguacagcagcgccaacaacugcaccuucgaguacgugagccagcccuuccugauggaccuggagggcaagcagggcaacuucaagaaccugcgggaguucguguucaagaacaucgacggcuacuucaagaucuacagcaagcacaccccaaucaaccuggugcgggaucugccccagggcuucucagcccuggagccccugguggaccugcccaucggcaucaacaucacccgguuccagacccugcuggcccugcaccggagcuaccugaccccaggcgacagcagcagcggguggacagcaggcgcggcugcuuacuacgugggcuaccugcagccccggaccuuccugcugaaguacaacgagaacggcaccaucaccgacgccguggacugcgcccuggacccucugagcgagaccaagugcacccugaagagcuucaccguggagaagggcaucuaccagaccagcaacuuccgggugcagcccaccgagagcaucgugcgguuccccaacaucaccaaccugugccccuucggcgagguguucaacgccacccgguucgccagcguguacgccuggaaccggaagcggaucagcaacugcguggccgacuacagcgugcuguacaacagcgccagcuucagcaccuucaagugcuacggcgugagccccaccaagcugaacgaccugugcuucaccaacguguacgccgacagcuucgugauccguggcgacgaggugcggcagaucgcacccggccagacaggcaagaucgccgacuacaacuacaagcugcccgacgacuucaccggcugcgugaucgccuggaacagcaacaaccucgacagcaaggugggcggcaacuacaacuaccuguaccggcuguuccggaagagcaaccugaagcccuucgagcgggacaucagcaccgagaucuaccaagccggcuccaccccuugcaacggcguggagggcuucaacugcuacuucccucugcagagcuacggcuuccagcccaccaacggcgugggcuaccagcccuaccgggugguggugcugagcuucgagcugcugcacgccccagccaccguguguggccccaagaagagcaccaaccuggugaagaacaagugcgugaacuucaacuucaacggccuuaccggcaccggcgugcugaccgagagcaacaagaaauuccugcccuuucagcaguucggccgggacaucgccgacaccaccgacgcugugcgggauccccagacccuggagauccuggacaucaccccuugcagcuucggcggcgugagcgugaucaccccaggcaccaacaccagcaaccagguggccgugcuguaccagggcgugaacugcaccgaggugcccguggccauccacgccgaccagcugacacccaccuggcgggucuacagcaccggcagcaacguguuccagacccgggccgguugccugaucggcgccgagcacgugaacaacagcuacgagugcgacauccccaucggcgccggcaucugugccagcuaccagacccagaccaauucaccccggagggcaaggagcguggccagccagagcaucaucgccuacaccaugagccugggcgccgagaacagcguggccuacagcaacaacagcaucgccauccccaccaacuucaccaucagcgugaccaccgagauucugcccgugagcaugaccaagaccagcguggacugcaccauguacaucugcggcgacagcaccgagugcagcaaccugcugcugcaguacggcagcuucugcacccagcugaaccgggcccugaccggcaucgccguggagcaggacaagaacacccaggagguguucgcccaggugaagcagaucuacaagaccccucccaucaaggacuucggcggcuucaacuucagccagauccugcccgaccccagcaagcccagcaagcggagcuucaucgaggaccugcuguucaacaaggugacccuagccgacgccggcuucaucaagcaguacggcgacugccucggcgacauagccgcccgggaccugaucugcgcccagaaguucaacggccugaccgugcugccuccccugcugaccgacgagaugaucgcccaguacaccagcgcccuguuagccggaaccaucaccagcggcuggacuuucggcgcuggagccgcucugcagauccccuucgccaugcagauggccuaccgguucaacggcaucggcgugacccagaacgugcuguacgagaaccagaagcugaucgccaaccaguucaacagcgccaucggcaagauccaggacagccugagcagcaccgcuagcgcccugggcaagcugcaggacguggugaaccagaacgcccaggcccugaacacccuggugaagcagcugagcagcaacuucggcgccaucagcagcgugcugaacgacauccugagccggcuggacccucccgaggccgaggugcagaucgaccggcugaucacuggccggcugcagagccugcagaccuacgugacccagcagcugauccgggccgccgagauucgggccagcgccaaccuggccgccaccaagaugagcgagugcgugcugggccagagcaagcggguggacuucugcggcaagggcuaccaccugaugagcuuuccccagagcgcaccccacggagugguguuccugcacgugaccuacgugcccgcccaggagaagaacuucaccaccgccccagccaucugccacgacggcaaggcccacuuuccccgggagggcguguucgugagcaacggcacccacugguucgugacccagcggaacuucuacgagccccagaucaucaccaccgacaacaccuucgugagcggcaacugcgacguggugaucggcaucgugaacaacaccguguacgauccccugcagcccgagcuggacagcuucaaggaggagcuggacaaguacuucaagaaucacaccagccccgacguggaccugggcgacaucagcggcaucaacgccagcguggugaacauccagaaggagaucgaucggcugaacgagguggccaagaaccugaacgagagccugaucgaccugcaggagcugggcaaguacgagcaguacaucaaguggcccugguacaucuggcugggcuucaucgccggccugaucgccaucgugaucgugaccaucaugcugugcugcaugaccagcugcugcagcugccugaagggcuguugcagcugcggcagcugcugcaaguucgacgaggacgacagcgagcccgugcugaagggcgugaagcugcacuacaccugauaauaggcuggagccucgguggccuagcuucuugccccuugggccuccccccagccccuccuccccuuccugcacccguacccccguggucuuugaauaaagucugagugggcggcaaaaaaaaaaaaaaaaaaaaaaaaaaaaaaaaaaaaaaaaaaaaaaaaaaaaaaaaaaaaaaaaaaaaaaaaaaaaaaaaaaaaaaaaaaaaaaaaaaaaucuag

SEQ ID NO: 26643 - RNA, 4094 nt, Artificial Sequence
  SARS-CoV-2/Wuhan/WIV05/2019__EPI_ISL_402128 spike protein mRNA gc (1-1273)(K986P_V987P_H69del_V70del_A222V_Y453F_S477N_D614G_I692V)
gggaaauaagagagaaaagaagaguaagaagaaauauaagaccccggcgccgccaccauguucguguuccuggugcugcugccccuggugagcagccagugcgugaaccugaccacccggacccagcugccaccagccuacaccaacagcuucacccggggcgucuacuaccccgacaagguguuccggagcagcguccugcacagcacccaggaccuguuccugcccuucuucagcaacgugaccugguuccacgccaucagcggcaccaacggcaccaagcgguucgacaaccccgugcugcccuucaacgacggcguguacuucgccagcaccgagaagagcaacaucauccggggcuggaucuucggcaccacccuggacagcaagacccagagccugcugaucgugaauaacgccaccaacguggugaucaaggugugcgaguuccaguucugcaacgaccccuuccugggcguguacuaccacaagaacaacaagagcuggauggagagcgaguuccggguguacagcagcgccaacaacugcaccuucgaguacgugagccagcccuuccugauggaccuggagggcaagcagggcaacuucaagaaccugcgggaguucguguucaagaacaucgacggcuacuucaagaucuacagcaagcacaccccaaucaaccuggugcgggaucugccccagggcuucucagugcuggagccccugguggaccugcccaucggcaucaacaucacccgguuccagacccugcuggcccugcaccggagcuaccugaccccaggcgacagcagcagcggguggacagcaggcgcggcugcuuacuacgugggcuaccugcagccccggaccuuccugcugaaguacaacgagaacggcaccaucaccgacgccguggacugcgcccuggacccucugagcgagaccaagugcacccugaagagcuucaccguggagaagggcaucuaccagaccagcaacuuccgggugcagcccaccgagagcaucgugcgguuccccaacaucaccaaccugugccccuucggcgagguguucaacgccacccgguucgccagcguguacgccuggaaccggaagcggaucagcaacugcguggccgacuacagcgugcuguacaacagcgccagcuucagcaccuucaagugcuacggcgugagccccaccaagcugaacgaccugugcuucaccaacguguacgccgacagcuucgugauccguggcgacgaggugcggcagaucgcacccggccagacaggcaagaucgccgacuacaacuacaagcugcccgacgacuucaccggcugcgugaucgccuggaacagcaacaaccucgacagcaaggugggcggcaacuacaacuaccuguuccggcuguuccggaagagcaaccugaagcccuucgagcgggacaucagcaccgagaucuaccaagccggcaacaccccuugcaacggcguggagggcuucaacugcuacuucccucugcagagcuacggcuuccagcccaccaacggcgugggcuaccagcccuaccgggugguggugcugagcuucgagcugcugcacgccccagccaccguguguggccccaagaagagcaccaaccuggugaagaacaagugcgugaacuucaacuucaacggccuuaccggcaccggcgugcugaccgagagcaacaagaaauuccugcccuuucagcaguucggccgggacaucgccgacaccaccgacgcugugcgggauccccagacccuggagauccuggacaucaccccuugcagcuucggcggcgugagcgugaucaccccaggcaccaacaccagcaaccagguggccgugcuguaccagggcgugaacugcaccgaggugcccguggccauccacgccgaccagcugacacccaccuggcgggucuacagcaccggcagcaacguguuccagacccgggccgguugccugaucggcgccgagcacgugaacaacagcuacgagugcgacauccccaucggcgccggcaucugugccagcuaccagacccagaccaauucaccccggagggcaaggagcguggccagccagagcgugaucgccuacaccaugagccugggcgccgagaacagcguggccuacagcaacaacagcaucgccauccccaccaacuucaccaucagcgugaccaccgagauucugcccgugagcaugaccaagaccagcguggacugcaccauguacaucugcggcgacagcaccgagugcagcaaccugcugcugcaguacggcagcuucugcacccagcugaaccgggcccugaccggcaucgccguggagcaggacaagaacacccaggagguguucgcccaggugaagcagaucuacaagaccccucccaucaaggacuucggcggcuucaacuucagccagauccugcccgaccccagcaagcccagcaagcggagcuucaucgaggaccugcuguucaacaaggugacccuagccgacgccggcuucaucaagcaguacggcgacugccucggcgacauagccgcccgggaccugaucugcgcccagaaguucaacggccugaccgugcugccuccccugcugaccgacgagaugaucgcccaguacaccagcgcccuguuagccggaaccaucaccagcggcuggacuuucggcgcuggagccgcucugcagauccccuucgccaugcagauggccuaccgguucaacggcaucggcgugacccagaacgugcuguacgagaaccagaagcugaucgccaaccaguucaacagcgccaucggcaagauccaggacagccugagcagcaccgcuagcgcccugggcaagcugcaggacguggugaaccagaacgcccaggcccugaacacccuggugaagcagcugagcagcaacuucggcgccaucagcagcgugcugaacgacauccugagccggcuggacccucccgaggccgaggugcagaucgaccggcugaucacuggccggcugcagagccugcagaccuacgugacccagcagcugauccgggccgccgagauucgggccagcgccaaccuggccgccaccaagaugagcgagugcgugcugggccagagcaagcggguggacuucugcggcaagggcuaccaccugaugagcuuuccccagagcgcaccccacggagugguguuccugcacgugaccuacgugcccgcccaggagaagaacuucaccaccgccccagccaucugccacgacggcaaggcccacuuuccccgggagggcguguucgugagcaacggcacccacugguucgugacccagcggaacuucuacgagccccagaucaucaccaccgacaacaccuucgugagcggcaacugcgacguggugaucggcaucgugaacaacaccguguacgauccccugcagcccgagcuggacagcuucaaggaggagcuggacaaguacuucaagaaucacaccagccccgacguggaccugggcgacaucagcggcaucaacgccagcguggugaacauccagaaggagaucgaucggcugaacgagguggccaagaaccugaacgagagccugaucgaccugcaggagcugggcaaguacgagcaguacaucaaguggcccugguacaucuggcugggcuucaucgccggccugaucgccaucgugauggugaccaucaugcugugcugcaugaccagcugcugcagcugccugaagggcuguugcagcugcggcagcugcugcaaguucgacgaggacgacagcgagcccgugcugaagggcgugaagcugcacuacaccugauaauaggcuggagccucgguggccuagcuucuugccccuugggccuccccccagccccuccuccccuuccugcacccguacccccguggucuuugaauaaagucugagugggcggcaaaaaaaaaaaaaaaaaaaaaaaaaaaaaaaaaaaaaaaaaaaaaaaaaaaaaaaaaaaaaaaaaaaaaaaaaaaaaaaaaaaaaaaaaaaaaaaaaaaaucuag

SEQ ID NO: 26644 - RNA, 4094 nt, Artificial Sequence
  SARS-CoV-2/Wuhan/WIV05/2019__EPI_ISL_402128 spike protein mRNA gc (1-1273)(K986P_V987P_H69del_V70del_Y453F_D614G_I692V_M1229I)
gggaaauaagagagaaaagaagaguaagaagaaauauaagaccccggcgccgccaccauguucguguuccuggugcugcugccccuggugagcagccagugcgugaaccugaccacccggacccagcugccaccagccuacaccaacagcuucacccggggcgucuacuaccccgacaagguguuccggagcagcguccugcacagcacccaggaccuguuccugcccuucuucagcaacgugaccugguuccacgccaucagcggcaccaacggcaccaagcgguucgacaaccccgugcugcccuucaacgacggcguguacuucgccagcaccgagaagagcaacaucauccggggcuggaucuucggcaccacccuggacagcaagacccagagccugcugaucgugaauaacgccaccaacguggugaucaaggugugcgaguuccaguucugcaacgaccccuuccugggcguguacuaccacaagaacaacaagagcuggauggagagcgaguuccggguguacagcagcgccaacaacugcaccuucgaguacgugagccagcccuuccugauggaccuggagggcaagcagggcaacuucaagaaccugcgggaguucguguucaagaacaucgacggcuacuucaagaucuacagcaagcacaccccaaucaaccuggugcgggaucugccccagggcuucucagcccuggagccccugguggaccugcccaucggcaucaacaucacccgguuccagacccugcuggcccugcaccggagcuaccugaccccaggcgacagcagcagcggguggacagcaggcgcggcugcuuacuacgugggcuaccugcagccccggaccuuccugcugaaguacaacgagaacggcaccaucaccgacgccguggacugcgcccuggacccucugagcgagaccaagugcacccugaagagcuucaccguggagaagggcaucuaccagaccagcaacuuccgggugcagcccaccgagagcaucgugcgguuccccaacaucaccaaccugugccccuucggcgagguguucaacgccacccgguucgccagcguguacgccuggaaccggaagcggaucagcaacugcguggccgacuacagcgugcuguacaacagcgccagcuucagcaccuucaagugcuacggcgugagccccaccaagcugaacgaccugugcuucaccaacguguacgccgacagcuucgugauccguggcgacgaggugcggcagaucgcacccggccagacaggcaagaucgccgacuacaacuacaagcugcccgacgacuucaccggcugcgugaucgccuggaacagcaacaaccucgacagcaaggugggcggcaacuacaacuaccuguuccggcuguuccggaagagcaaccugaagcccuucgagcgggacaucagcaccgagaucuaccaagccggcuccaccccuugcaacggcguggagggcuucaacugcuacuucccucugcagagcuacggcuuccagcccaccaacggcgugggcuaccagcccuaccgggugguggugcugagcuucgagcugcugcacgccccagccaccguguguggccccaagaagagcaccaaccuggugaagaacaagugcgugaacuucaacuucaacggccuuaccggcaccggcgugcugaccgagagcaacaagaaauuccugcccuuucagcaguucggccgggacaucgccgacaccaccgacgcugugcgggauccccagacccuggagauccuggacaucaccccuugcagcuucggcggcgugagcgugaucaccccaggcaccaacaccagcaaccagguggccgugcuguaccagggcgugaacugcaccgaggugcccguggccauccacgccgaccagcugacacccaccuggcgggucuacagcaccggcagcaacguguuccagacccgggccgguugccugaucggcgccgagcacgugaacaacagcuacgagugcgacauccccaucggcgccggcaucugugccagcuaccagacccagaccaauucaccccggagggcaaggagcguggccagccagagcgugaucgccuacaccaugagccugggcgccgagaacagcguggccuacagcaacaacagcaucgccauccccaccaacuucaccaucagcgugaccaccgagauucugcccgugagcaugaccaagaccagcguggacugcaccauguacaucugcggcgacagcaccgagugcagcaaccugcugcugcaguacggcagcuucugcacccagcugaaccgggcccugaccggcaucgccguggagcaggacaagaacacccaggagguguucgcccaggugaagcagaucuacaagaccccucccaucaaggacuucggcggcuucaacuucagccagauccugcccgaccccagcaagcccagcaagcggagcuucaucgaggaccugcuguucaacaaggugacccuagccgacgccggcuucaucaagcaguacggcgacugccucggcgacauagccgcccgggaccugaucugcgcccagaaguucaacggccugaccgugcugccuccccugcugaccgacgagaugaucgcccaguacaccagcgcccuguuagccggaaccaucaccagcggcuggacuuucggcgcuggagccgcucugcagauccccuucgccaugcagauggccuaccgguucaacggcaucggcgugacccagaacgugcuguacgagaaccagaagcugaucgccaaccaguucaacagcgccaucggcaagauccaggacagccugagcagcaccgcuagcgcccugggcaagcugcaggacguggugaaccagaacgcccaggcccugaacacccuggugaagcagcugagcagcaacuucggcgccaucagcagcgugcugaacgacauccugagccggcuggacccucccgaggccgaggugcagaucgaccggcugaucacuggccggcugcagagccugcagaccuacgugacccagcagcugauccgggccgccgagauucgggccagcgccaaccuggccgccaccaagaugagcgagugcgugcugggccagagcaagcggguggacuucugcggcaagggcuaccaccugaugagcuuuccccagagcgcaccccacggagugguguuccugcacgugaccuacgugcccgcccaggagaagaacuucaccaccgccccagccaucugccacgacggcaaggcccacuuuccccgggagggcguguucgugagcaacggcacccacugguucgugacccagcggaacuucuacgagccccagaucaucaccaccgacaacaccuucgugagcggcaacugcgacguggugaucggcaucgugaacaacaccguguacgauccccugcagcccgagcuggacagcuucaaggaggagcuggacaaguacuucaagaaucacaccagccccgacguggaccugggcgacaucagcggcaucaacgccagcguggugaacauccagaaggagaucgaucggcugaacgagguggccaagaaccugaacgagagccugaucgaccugcaggagcugggcaaguacgagcaguacaucaaguggcccugguacaucuggcugggcuucaucgccggccugaucgccaucgugaucgugaccaucaugcugugcugcaugaccagcugcugcagcugccugaagggcuguugcagcugcggcagcugcugcaaguucgacgaggacgacagcgagcccgugcugaagggcgugaagcugcacuacaccugauaauaggcuggagccucgguggccuagcuucuugccccuugggccuccccccagccccuccuccccuuccugcacccguacccccguggucuuugaauaaagucugagugggcggcaaaaaaaaaaaaaaaaaaaaaaaaaaaaaaaaaaaaaaaaaaaaaaaaaaaaaaaaaaaaaaaaaaaaaaaaaaaaaaaaaaaaaaaaaaaaaaaaaaaaucuag

SEQ ID NO: 26645 - RNA, 4091 nt, Artificial Sequence
  SARS-CoV-2/Wuhan/WIV05/2019__EPI_ISL_402128 spike protein mRNA gc (1-1273)(K986P_V987P_K986P_V987P_H69del_V70del_Y144del_N501Y_A570 D_D614G_P681H_T716I_S982A_D1118H)
gggaaauaagagagaaaagaagaguaagaagaaauauaagaccccggcgccgccaccauguucguguuccuggugcugcugccccuggugagcagccagugcgugaaccugaccacccggacccagcugccaccagccuacaccaacagcuucacccggggcgucuacuaccccgacaagguguuccggagcagcguccugcacagcacccaggaccuguuccugcccuucuucagcaacgugaccugguuccacgccaucagcggcaccaacggcaccaagcgguucgacaaccccgugcugcccuucaacgacggcguguacuucgccagcaccgagaagagcaacaucauccggggcuggaucuucggcaccacccuggacagcaagacccagagccugcugaucgugaauaacgccaccaacguggugaucaaggugugcgaguuccaguucugcaacgaccccuuccugggcguguaccacaagaacaacaagagcuggauggagagcgaguuccggguguacagcagcgccaacaacugcaccuucgaguacgugagccagcccuuccugauggaccuggagggcaagcagggcaacuucaagaaccugcgggaguucguguucaagaacaucgacggcuacuucaagaucuacagcaagcacaccccaaucaaccuggugcgggaucugccccagggcuucucagcccuggagccccugguggaccugcccaucggcaucaacaucacccgguuccagacccugcuggcccugcaccggagcuaccugaccccaggcgacagcagcagcggguggacagcaggcgcggcugcuuacuacgugggcuaccugcagccccggaccuuccugcugaaguacaacgagaacggcaccaucaccgacgccguggacugcgcccuggacccucugagcgagaccaagugcacccugaagagcuucaccguggagaagggcaucuaccagaccagcaacuuccgggugcagcccaccgagagcaucgugcgguuccccaacaucaccaaccugugccccuucggcgagguguucaacgccacccgguucgccagcguguacgccuggaaccggaagcggaucagcaacugcguggccgacuacagcgugcuguacaacagcgccagcuucagcaccuucaagugcuacggcgugagccccaccaagcugaacgaccugugcuucaccaacguguacgccgacagcuucgugauccguggcgacgaggugcggcagaucgcacccggccagacaggcaagaucgccgacuacaacuacaagcugcccgacgacuucaccggcugcgugaucgccuggaacagcaacaaccucgacagcaaggugggcggcaacuacaacuaccuguaccggcuguuccggaagagcaaccugaagcccuucgagcgggacaucagcaccgagaucuaccaagccggcuccaccccuugcaacggcguggagggcuucaacugcuacuucccucugcagagcuacggcuuccagcccaccuacggcgugggcuaccagcccuaccgggugguggugcugagcuucgagcugcugcacgccccagccaccguguguggccccaagaagagcaccaaccuggugaagaacaagugcgugaacuucaacuucaacggccuuaccggcaccggcgugcugaccgagagcaacaagaaauuccugcccuuucagcaguucggccgggacaucgacgacaccaccgacgcugugcgggauccccagacccuggagauccuggacaucaccccuugcagcuucggcggcgugagcgugaucaccccaggcaccaacaccagcaaccagguggccgugcuguaccagggcgugaacugcaccgaggugcccguggccauccacgccgaccagcugacacccaccuggcgggucuacagcaccggcagcaacguguuccagacccgggccgguugccugaucggcgccgagcacgugaacaacagcuacgagugcgacauccccaucggcgccggcaucugugccagcuaccagacccagaccaauucacaccggagggcaaggagcguggccagccagagcaucaucgccuacaccaugagccugggcgccgagaacagcguggccuacagcaacaacagcaucgccauccccaucaacuucaccaucagcgugaccaccgagauucugcccgugagcaugaccaagaccagcguggacugcaccauguacaucugcggcgacagcaccgagugcagcaaccugcugcugcaguacggcagcuucugcacccagcugaaccgggcccugaccggcaucgccguggagcaggacaagaacacccaggagguguucgcccaggugaagcagaucuacaagaccccucccaucaaggacuucggcggcuucaacuucagccagauccugcccgaccccagcaagcccagcaagcggagcuucaucgaggaccugcuguucaacaaggugacccuagccgacgccggcuucaucaagcaguacggcgacugccucggcgacauagccgcccgggaccugaucugcgcccagaaguucaacggccugaccgugcugccuccccugcugaccgacgagaugaucgcccaguacaccagcgcccuguuagccggaaccaucaccagcggcuggacuuucggcgcuggagccgcucugcagauccccuucgccaugcagauggccuaccgguucaacggcaucggcgugacccagaacgugcuguacgagaaccagaagcugaucgccaaccaguucaacagcgccaucggcaagauccaggacagccugagcagcaccgcuagcgcccugggcaagcugcaggacguggugaaccagaacgcccaggcccugaacacccuggugaagcagcugagcagcaacuucggcgccaucagcagcgugcugaacgacauccuggcccggcuggacccucccgaggccgaggugcagaucgaccggcugaucacuggccggcugcagagccugcagaccuacgugacccagcagcugauccgggccgccgagauucgggccagcgccaaccuggccgccaccaagaugagcgagugcgugcugggccagagcaagcggguggacuucugcggcaagggcuaccaccugaugagcuuuccccagagcgcaccccacggagugguguuccugcacgugaccuacgugcccgcccaggagaagaacuucaccaccgccccagccaucugccacgacggcaaggcccacuuuccccgggagggcguguucgugagcaacggcacccacugguucgugacccagcggaacuucuacgagccccagaucaucaccacccacaacaccuucgugagcggcaacugcgacguggugaucggcaucgugaacaacaccguguacgauccccugcagcccgagcuggacagcuucaaggaggagcuggacaaguacuucaagaaucacaccagccccgacguggaccugggcgacaucagcggcaucaacgccagcguggugaacauccagaaggagaucgaucggcugaacgagguggccaagaaccugaacgagagccugaucgaccugcaggagcugggcaaguacgagcaguacaucaaguggcccugguacaucuggcugggcuucaucgccggccugaucgccaucgugauggugaccaucaugcugugcugcaugaccagcugcugcagcugccugaagggcuguugcagcugcggcagcugcugcaaguucgacgaggacgacagcgagcccgugcugaagggcgugaagcugcacuacaccugauaauaggcuggagccucgguggccuagcuucuugccccuugggccuccccccagccccuccuccccuuccugcacccguacccccguggucuuugaauaaagucugagugggcggcaaaaaaaaaaaaaaaaaaaaaaaaaaaaaaaaaaaaaaaaaaaaaaaaaaaaaaaaaaaaaaaaaaaaaaaaaaaaaaaaaaaaaaaaaaaaaaaaaaaaucuag

SEQ ID NO: 26646 - RNA, 4100 nt, Artificial Sequence
  SARS-CoV-2/Wuhan/WIV05/2019__EPI_ISL_402128 spike protein mRNA gc (1-1273)(K986P_V987P_K986P_V987P_K417N_E484K_N501Y_D614G)
gggaaauaagagagaaaagaagaguaagaagaaauauaagaccccggcgccgccaccauguucguguuccuggugcugcugccccuggugagcagccagugcgugaaccugaccacccggacccagcugccaccagccuacaccaacagcuucacccggggcgucuacuaccccgacaagguguuccggagcagcguccugcacagcacccaggaccuguuccugcccuucuucagcaacgugaccugguuccacgccauccacgugagcggcaccaacggcaccaagcgguucgacaaccccgugcugcccuucaacgacggcguguacuucgccagcaccgagaagagcaacaucauccggggcuggaucuucggcaccacccuggacagcaagacccagagccugcugaucgugaauaacgccaccaacguggugaucaaggugugcgaguuccaguucugcaacgaccccuuccugggcguguacuaccacaagaacaacaagagcuggauggagagcgaguuccggguguacagcagcgccaacaacugcaccuucgaguacgugagccagcccuuccugauggaccuggagggcaagcagggcaacuucaagaaccugcgggaguucguguucaagaacaucgacggcuacuucaagaucuacagcaagcacaccccaaucaaccuggugcgggaucugccccagggcuucucagcccuggagccccugguggaccugcccaucggcaucaacaucacccgguuccagacccugcuggcccugcaccggagcuaccugaccccaggcgacagcagcagcggguggacagcaggcgcggcugcuuacuacgugggcuaccugcagccccggaccuuccugcugaaguacaacgagaacggcaccaucaccgacgccguggacugcgcccuggacccucugagcgagaccaagugcacccugaagagcuucaccguggagaagggcaucuaccagaccagcaacuuccgggugcagcccaccgagagcaucgugcgguuccccaacaucaccaaccugugccccuucggcgagguguucaacgccacccgguucgccagcguguacgccuggaaccggaagcggaucagcaacugcguggccgacuacagcgugcuguacaacagcgccagcuucagcaccuucaagugcuacggcgugagccccaccaagcugaacgaccugugcuucaccaacguguacgccgacagcuucgugauccguggcgacgaggugcggcagaucgcacccggccagacaggcaacaucgccgacuacaacuacaagcugcccgacgacuucaccggcugcgugaucgccuggaacagcaacaaccucgacagcaaggugggcggcaacuacaacuaccuguaccggcuguuccggaagagcaaccugaagcccuucgagcgggacaucagcaccgagaucuaccaagccggcuccaccccuugcaacggcgugaagggcuucaacugcuacuucccucugcagagcuacggcuuccagcccaccuacggcgugggcuaccagcccuaccgggugguggugcugagcuucgagcugcugcacgccccagccaccguguguggccccaagaagagcaccaaccuggugaagaacaagugcgugaacuucaacuucaacggccuuaccggcaccggcgugcugaccgagagcaacaagaaauuccugcccuuucagcaguucggccgggacaucgccgacaccaccgacgcugugcgggauccccagacccuggagauccuggacaucaccccuugcagcuucggcggcgugagcgugaucaccccaggcaccaacaccagcaaccagguggccgugcuguaccagggcgugaacugcaccgaggugcccguggccauccacgccgaccagcugacacccaccuggcgggucuacagcaccggcagcaacguguuccagacccgggccgguugccugaucggcgccgagcacgugaacaacagcuacgagugcgacauccccaucggcgccggcaucugugccagcuaccagacccagaccaauucaccccggagggcaaggagcguggccagccagagcaucaucgccuacaccaugagccugggcgccgagaacagcguggccuacagcaacaacagcaucgccauccccaccaacuucaccaucagcgugaccaccgagauucugcccgugagcaugaccaagaccagcguggacugcaccauguacaucugcggcgacagcaccgagugcagcaaccugcugcugcaguacggcagcuucugcacccagcugaaccgggcccugaccggcaucgccguggagcaggacaagaacacccaggagguguucgcccaggugaagcagaucuacaagaccccucccaucaaggacuucggcggcuucaacuucagccagauccugcccgaccccagcaagcccagcaagcggagcuucaucgaggaccugcuguucaacaaggugacccuagccgacgccggcuucaucaagcaguacggcgacugccucggcgacauagccgcccgggaccugaucugcgcccagaaguucaacggccugaccgugcugccuccccugcugaccgacgagaugaucgcccaguacaccagcgcccuguuagccggaaccaucaccagcggcuggacuuucggcgcuggagccgcucugcagauccccuucgccaugcagauggccuaccgguucaacggcaucggcgugacccagaacgugcuguacgagaaccagaagcugaucgccaaccaguucaacagcgccaucggcaagauccaggacagccugagcagcaccgcuagcgcccugggcaagcugcaggacguggugaaccagaacgcccaggcccugaacacccuggugaagcagcugagcagcaacuucggcgccaucagcagcgugcugaacgacauccugagccggcuggacccucccgaggccgaggugcagaucgaccggcugaucacuggccggcugcagagccugcagaccuacgugacccagcagcugauccgggccgccgagauucgggccagcgccaaccuggccgccaccaagaugagcgagugcgugcugggccagagcaagcggguggacuucugcggcaagggcuaccaccugaugagcuuuccccagagcgcaccccacggagugguguuccugcacgugaccuacgugcccgcccaggagaagaacuucaccaccgccccagccaucugccacgacggcaaggcccacuuuccccgggagggcguguucgugagcaacggcacccacugguucgugacccagcggaacuucuacgagccccagaucaucaccaccgacaacaccuucgugagcggcaacugcgacguggugaucggcaucgugaacaacaccguguacgauccccugcagcccgagcuggacagcuucaaggaggagcuggacaaguacuucaagaaucacaccagccccgacguggaccugggcgacaucagcggcaucaacgccagcguggugaacauccagaaggagaucgaucggcugaacgagguggccaagaaccugaacgagagccugaucgaccugcaggagcugggcaaguacgagcaguacaucaaguggcccugguacaucuggcugggcuucaucgccggccugaucgccaucgugauggugaccaucaugcugugcugcaugaccagcugcugcagcugccugaagggcuguugcagcugcggcagcugcugcaaguucgacgaggacgacagcgagcccgugcugaagggcgugaagcugcacuacaccugauaauaggcuggagccucgguggccuagcuucuugccccuugggccuccccccagccccuccuccccuuccugcacccguacccccguggucuuugaauaaagucugagugggcggcaaaaaaaaaaaaaaaaaaaaaaaaaaaaaaaaaaaaaaaaaaaaaaaaaaaaaaaaaaaaaaaaaaaaaaaaaaaaaaaaaaaaaaaaaaaaaaaaaaaaucuag

SEQ ID NO: 26647 - RNA, 4091 nt, Artificial Sequence
  SARS-CoV-2/Wuhan/WIV05/2019__EPI_ISL_402128 spike protein mRNA gc (1-1273)(K986P_V987P_K986P_V987P_L18F_D80A_D215G_L242del_A243del_ L244del_R246I_K417N_E484K_N501Y_D614G_A701V)
gggaaauaagagagaaaagaagaguaagaagaaauauaagaccccggcgccgccaccauguucguguuccuggugcugcugccccuggugagcagccagugcgugaacuucaccacccggacccagcugccaccagccuacaccaacagcuucacccggggcgucuacuaccccgacaagguguuccggagcagcguccugcacagcacccaggaccuguuccugcccuucuucagcaacgugaccugguuccacgccauccacgugagcggcaccaacggcaccaagcgguucgccaaccccgugcugcccuucaacgacggcguguacuucgccagcaccgagaagagcaacaucauccggggcuggaucuucggcaccacccuggacagcaagacccagagccugcugaucgugaauaacgccaccaacguggugaucaaggugugcgaguuccaguucugcaacgaccccuuccugggcguguacuaccacaagaacaacaagagcuggauggagagcgaguuccggguguacagcagcgccaacaacugcaccuucgaguacgugagccagcccuuccugauggaccuggagggcaagcagggcaacuucaagaaccugcgggaguucguguucaagaacaucgacggcuacuucaagaucuacagcaagcacaccccaaucaaccuggugcggggccugccccagggcuucucagcccuggagccccugguggaccugcccaucggcaucaacaucacccgguuccagacccugcacaucagcuaccugaccccaggcgacagcagcagcggguggacagcaggcgcggcugcuuacuacgugggcuaccugcagccccggaccuuccugcugaaguacaacgagaacggcaccaucaccgacgccguggacugcgcccuggacccucugagcgagaccaagugcacccugaagagcuucaccguggagaagggcaucuaccagaccagcaacuuccgggugcagcccaccgagagcaucgugcgguuccccaacaucaccaaccugugccccuucggcgagguguucaacgccacccgguucgccagcguguacgccuggaaccggaagcggaucagcaacugcguggccgacuacagcgugcuguacaacagcgccagcuucagcaccuucaagugcuacggcgugagccccaccaagcugaacgaccugugcuucaccaacguguacgccgacagcuucgugauccguggcgacgaggugcggcagaucgcacccggccagacaggcaacaucgccgacuacaacuacaagcugcccgacgacuucaccggcugcgugaucgccuggaacagcaacaaccucgacagcaaggugggcggcaacuacaacuaccuguaccggcuguuccggaagagcaaccugaagcccuucgagcgggacaucagcaccgagaucuaccaagccggcuccaccccuugcaacggcgugaagggcuucaacugcuacuucccucugcagagcuacggcuuccagcccaccuacggcgugggcuaccagcccuaccgggugguggugcugagcuucgagcugcugcacgccccagccaccguguguggccccaagaagagcaccaaccuggugaagaacaagugcgugaacuucaacuucaacggccuuaccggcaccggcgugcugaccgagagcaacaagaaauuccugcccuuucagcaguucggccgggacaucgccgacaccaccgacgcugugcgggauccccagacccuggagauccuggacaucaccccuugcagcuucggcggcgugagcgugaucaccccaggcaccaacaccagcaaccagguggccgugcuguaccagggcgugaacugcaccgaggugcccguggccauccacgccgaccagcugacacccaccuggcgggucuacagcaccggcagcaacguguuccagacccgggccgguugccugaucggcgccgagcacgugaacaacagcuacgagugcgacauccccaucggcgccggcaucugugccagcuaccagacccagaccaauucaccccggagggcaaggagcguggccagccagagcaucaucgccuacaccaugagccugggcguggagaacagcguggccuacagcaacaacagcaucgccauccccaccaacuucaccaucagcgugaccaccgagauucugcccgugagcaugaccaagaccagcguggacugcaccauguacaucugcggcgacagcaccgagugcagcaaccugcugcugcaguacggcagcuucugcacccagcugaaccgggcccugaccggcaucgccguggagcaggacaagaacacccaggagguguucgcccaggugaagcagaucuacaagaccccucccaucaaggacuucggcggcuucaacuucagccagauccugcccgaccccagcaagcccagcaagcggagcuucaucgaggaccugcuguucaacaaggugacccuagccgacgccggcuucaucaagcaguacggcgacugccucggcgacauagccgcccgggaccugaucugcgcccagaaguucaacggccugaccgugcugccuccccugcugaccgacgagaugaucgcccaguacaccagcgcccuguuagccggaaccaucaccagcggcuggacuuucggcgcuggagccgcucugcagauccccuucgccaugcagauggccuaccgguucaacggcaucggcgugacccagaacgugcuguacgagaaccagaagcugaucgccaaccaguucaacagcgccaucggcaagauccaggacagccugagcagcaccgcuagcgcccugggcaagcugcaggacguggugaaccagaacgcccaggcccugaacacccuggugaagcagcugagcagcaacuucggcgccaucagcagcgugcugaacgacauccugagccggcuggacccucccgaggccgaggugcagaucgaccggcugaucacuggccggcugcagagccugcagaccuacgugacccagcagcugauccgggccgccgagauucgggccagcgccaaccuggccgccaccaagaugagcgagugcgugcugggccagagcaagcggguggacuucugcggcaagggcuaccaccugaugagcuuuccccagagcgcaccccacggagugguguuccugcacgugaccuacgugcccgcccaggagaagaacuucaccaccgccccagccaucugccacgacggcaaggcccacuuuccccgggagggcguguucgugagcaacggcacccacugguucgugacccagcggaacuucuacgagccccagaucaucaccaccgacaacaccuucgugagcggcaacugcgacguggugaucggcaucgugaacaacaccguguacgauccccugcagcccgagcuggacagcuucaaggaggagcuggacaaguacuucaagaaucacaccagccccgacguggaccugggcgacaucagcggcaucaacgccagcguggugaacauccagaaggagaucgaucggcugaacgagguggccaagaaccugaacgagagccugaucgaccugcaggagcugggcaaguacgagcaguacaucaaguggcccugguacaucuggcugggcuucaucgccggccugaucgccaucgugauggugaccaucaugcugugcugcaugaccagcugcugcagcugccugaagggcuguugcagcugcggcagcugcugcaaguucgacgaggacgacagcgagcccgugcugaagggcgugaagcugcacuacaccugauaauaggcuggagccucgguggccuagcuucuugccccuugggccuccccccagccccuccuccccuuccugcacccguacccccguggucuuugaauaaagucugagugggcggcaaaaaaaaaaaaaaaaaaaaaaaaaaaaaaaaaaaaaaaaaaaaaaaaaaaaaaaaaaaaaaaaaaaaaaaaaaaaaaaaaaaaaaaaaaaaaaaaaaaaucuag

SEQ ID NO: 26648 - RNA, 4100 nt, Artificial Sequence
  SARS-CoV-2/Wuhan/WIV05/2019__EPI_ISL_402128 spike protein mRNA gc (1-1273)(K986P_V987P_K986P_V987P_E484K_D614G)
gggaaauaagagagaaaagaagaguaagaagaaauauaagaccccggcgccgccaccauguucguguuccuggugcugcugccccuggugagcagccagugcgugaaccugaccacccggacccagcugccaccagccuacaccaacagcuucacccggggcgucuacuaccccgacaagguguuccggagcagcguccugcacagcacccaggaccuguuccugcccuucuucagcaacgugaccugguuccacgccauccacgugagcggcaccaacggcaccaagcgguucgacaaccccgugcugcccuucaacgacggcguguacuucgccagcaccgagaagagcaacaucauccggggcuggaucuucggcaccacccuggacagcaagacccagagccugcugaucgugaauaacgccaccaacguggugaucaaggugugcgaguuccaguucugcaacgaccccuuccugggcguguacuaccacaagaacaacaagagcuggauggagagcgaguuccggguguacagcagcgccaacaacugcaccuucgaguacgugagccagcccuuccugauggaccuggagggcaagcagggcaacuucaagaaccugcgggaguucguguucaagaacaucgacggcuacuucaagaucuacagcaagcacaccccaaucaaccuggugcgggaucugccccagggcuucucagcccuggagccccugguggaccugcccaucggcaucaacaucacccgguuccagacccugcuggcccugcaccggagcuaccugaccccaggcgacagcagcagcggguggacagcaggcgcggcugcuuacuacgugggcuaccugcagccccggaccuuccugcugaaguacaacgagaacggcaccaucaccgacgccguggacugcgcccuggacccucugagcgagaccaagugcacccugaagagcuucaccguggagaagggcaucuaccagaccagcaacuuccgggugcagcccaccgagagcaucgugcgguuccccaacaucaccaaccugugccccuucggcgagguguucaacgccacccgguucgccagcguguacgccuggaaccggaagcggaucagcaacugcguggccgacuacagcgugcuguacaacagcgccagcuucagcaccuucaagugcuacggcgugagccccaccaagcugaacgaccugugcuucaccaacguguacgccgacagcuucgugauccguggcgacgaggugcggcagaucgcacccggccagacaggcaagaucgccgacuacaacuacaagcugcccgacgacuucaccggcugcgugaucgccuggaacagcaacaaccucgacagcaaggugggcggcaacuacaacuaccuguaccggcuguuccggaagagcaaccugaagcccuucgagcgggacaucagcaccgagaucuaccaagccggcuccaccccuugcaacggcgugaagggcuucaacugcuacuucccucugcagagcuacggcuuccagcccaccaacggcgugggcuaccagcccuaccgggugguggugcugagcuucgagcugcugcacgccccagccaccguguguggccccaagaagagcaccaaccuggugaagaacaagugcgugaacuucaacuucaacggccuuaccggcaccggcgugcugaccgagagcaacaagaaauuccugcccuuucagcaguucggccgggacaucgccgacaccaccgacgcugugcgggauccccagacccuggagauccuggacaucaccccuugcagcuucggcggcgugagcgugaucaccccaggcaccaacaccagcaaccagguggccgugcuguaccagggcgugaacugcaccgaggugcccguggccauccacgccgaccagcugacacccaccuggcgggucuacagcaccggcagcaacguguuccagacccgggccgguugccugaucggcgccgagcacgugaacaacagcuacgagugcgacauccccaucggcgccggcaucugugccagcuaccagacccagaccaauucaccccggagggcaaggagcguggccagccagagcaucaucgccuacaccaugagccugggcgccgagaacagcguggccuacagcaacaacagcaucgccauccccaccaacuucaccaucagcgugaccaccgagauucugcccgugagcaugaccaagaccagcguggacugcaccauguacaucugcggcgacagcaccgagugcagcaaccugcugcugcaguacggcagcuucugcacccagcugaaccgggcccugaccggcaucgccguggagcaggacaagaacacccaggagguguucgcccaggugaagcagaucuacaagaccccucccaucaaggacuucggcggcuucaacuucagccagauccugcccgaccccagcaagcccagcaagcggagcuucaucgaggaccugcuguucaacaaggugacccuagccgacgccggcuucaucaagcaguacggcgacugccucggcgacauagccgcccgggaccugaucugcgcccagaaguucaacggccugaccgugcugccuccccugcugaccgacgagaugaucgcccaguacaccagcgcccuguuagccggaaccaucaccagcggcuggacuuucggcgcuggagccgcucugcagauccccuucgccaugcagauggccuaccgguucaacggcaucggcgugacccagaacgugcuguacgagaaccagaagcugaucgccaaccaguucaacagcgccaucggcaagauccaggacagccugagcagcaccgcuagcgcccugggcaagcugcaggacguggugaaccagaacgcccaggcccugaacacccuggugaagcagcugagcagcaacuucggcgccaucagcagcgugcugaacgacauccugagccggcuggacccucccgaggccgaggugcagaucgaccggcugaucacuggccggcugcagagccugcagaccuacgugacccagcagcugauccgggccgccgagauucgggccagcgccaaccuggccgccaccaagaugagcgagugcgugcugggccagagcaagcggguggacuucugcggcaagggcuaccaccugaugagcuuuccccagagcgcaccccacggagugguguuccugcacgugaccuacgugcccgcccaggagaagaacuucaccaccgccccagccaucugccacgacggcaaggcccacuuuccccgggagggcguguucgugagcaacggcacccacugguucgugacccagcggaacuucuacgagccccagaucaucaccaccgacaacaccuucgugagcggcaacugcgacguggugaucggcaucgugaacaacaccguguacgauccccugcagcccgagcuggacagcuucaaggaggagcuggacaaguacuucaagaaucacaccagccccgacguggaccugggcgacaucagcggcaucaacgccagcguggugaacauccagaaggagaucgaucggcugaacgagguggccaagaaccugaacgagagccugaucgaccugcaggagcugggcaaguacgagcaguacaucaaguggcccugguacaucuggcugggcuucaucgccggccugaucgccaucgugauggugaccaucaugcugugcugcaugaccagcugcugcagcugccugaagggcuguugcagcugcggcagcugcugcaaguucgacgaggacgacagcgagcccgugcugaagggcgugaagcugcacuacaccugauaauaggcuggagccucgguggccuagcuucuugccccuugggccuccccccagccccuccuccccuuccugcacccguacccccguggucuuugaauaaagucugagugggcggcaaaaaaaaaaaaaaaaaaaaaaaaaaaaaaaaaaaaaaaaaaaaaaaaaaaaaaaaaaaaaaaaaaaaaaaaaaaaaaaaaaaaaaaaaaaaaaaaaaaaucuag

SEQ ID NO: 26649 - RNA, 4100 nt, Artificial Sequence
  SARS-CoV-2/Wuhan/WIV05/2019__EPI_ISL_402128 spike protein mRNA gc (1-1273)(K986P_V987P_K986P_V987P_L18F_T20N_P26S_D138Y_R190S_K417T _E484K_N501Y_D614G_H655Y_T1027I)
gggaaauaagagagaaaagaagaguaagaagaaauauaagaccccggcgccgccaccauguucguguuccuggugcugcugccccuggugagcagccagugcgugaacuucaccaaccggacccagcugccaagcgccuacaccaacagcuucacccggggcgucuacuaccccgacaagguguuccggagcagcguccugcacagcacccaggaccuguuccugcccuucuucagcaacgugaccugguuccacgccauccacgugagcggcaccaacggcaccaagcgguucgacaaccccgugcugcccuucaacgacggcguguacuucgccagcaccgagaagagcaacaucauccggggcuggaucuucggcaccacccuggacagcaagacccagagccugcugaucgugaauaacgccaccaacguggugaucaaggugugcgaguuccaguucugcaacuaccccuuccugggcguguacuaccacaagaacaacaagagcuggauggagagcgaguuccggguguacagcagcgccaacaacugcaccuucgaguacgugagccagcccuuccugauggaccuggagggcaagcagggcaacuucaagaaccugagcgaguucguguucaagaacaucgacggcuacuucaagaucuacagcaagcacaccccaaucaaccuggugcgggaucugccccagggcuucucagcccuggagccccugguggaccugcccaucggcaucaacaucacccgguuccagacccugcuggcccugcaccggagcuaccugaccccaggcgacagcagcagcggguggacagcaggcgcggcugcuuacuacgugggcuaccugcagccccggaccuuccugcugaaguacaacgagaacggcaccaucaccgacgccguggacugcgcccuggacccucugagcgagaccaagugcacccugaagagcuucaccguggagaagggcaucuaccagaccagcaacuuccgggugcagcccaccgagagcaucgugcgguuccccaacaucaccaaccugugccccuucggcgagguguucaacgccacccgguucgccagcguguacgccuggaaccggaagcggaucagcaacugcguggccgacuacagcgugcuguacaacagcgccagcuucagcaccuucaagugcuacggcgugagccccaccaagcugaacgaccugugcuucaccaacguguacgccgacagcuucgugauccguggcgacgaggugcggcagaucgcacccggccagacaggcaccaucgccgacuacaacuacaagcugcccgacgacuucaccggcugcgugaucgccuggaacagcaacaaccucgacagcaaggugggcggcaacuacaacuaccuguaccggcuguuccggaagagcaaccugaagcccuucgagcgggacaucagcaccgagaucuaccaagccggcuccaccccuugcaacggcgugaagggcuucaacugcuacuucccucugcagagcuacggcuuccagcccaccuacggcgugggcuaccagcccuaccgggugguggugcugagcuucgagcugcugcacgccccagccaccguguguggccccaagaagagcaccaaccuggugaagaacaagugcgugaacuucaacuucaacggccuuaccggcaccggcgugcugaccgagagcaacaagaaauuccugcccuuucagcaguucggccgggacaucgccgacaccaccgacgcugugcgggauccccagacccuggagauccuggacaucaccccuugcagcuucggcggcgugagcgugaucaccccaggcaccaacaccagcaaccagguggccgugcuguaccagggcgugaacugcaccgaggugcccguggccauccacgccgaccagcugacacccaccuggcgggucuacagcaccggcagcaacguguuccagacccgggccgguugccugaucggcgccgaguacgugaacaacagcuacgagugcgacauccccaucggcgccggcaucugugccagcuaccagacccagaccaauucaccccggagggcaaggagcguggccagccagagcaucaucgccuacaccaugagccugggcgccgagaacagcguggccuacagcaacaacagcaucgccauccccaccaacuucaccaucagcgugaccaccgagauucugcccgugagcaugaccaagaccagcguggacugcaccauguacaucugcggcgacagcaccgagugcagcaaccugcugcugcaguacggcagcuucugcacccagcugaaccgggcccugaccggcaucgccguggagcaggacaagaacacccaggagguguucgcccaggugaagcagaucuacaagaccccucccaucaaggacuucggcggcuucaacuucagccagauccugcccgaccccagcaagcccagcaagcggagcuucaucgaggaccugcuguucaacaaggugacccuagccgacgccggcuucaucaagcaguacggcgacugccucggcgacauagccgcccgggaccugaucugcgcccagaaguucaacggccugaccgugcugccuccccugcugaccgacgagaugaucgcccaguacaccagcgcccuguuagccggaaccaucaccagcggcuggacuuucggcgcuggagccgcucugcagauccccuucgccaugcagauggccuaccgguucaacggcaucggcgugacccagaacgugcuguacgagaaccagaagcugaucgccaaccaguucaacagcgccaucggcaagauccaggacagccugagcagcaccgcuagcgcccugggcaagcugcaggacguggugaaccagaacgcccaggcccugaacacccuggugaagcagcugagcagcaacuucggcgccaucagcagcgugcugaacgacauccugagccggcuggacccucccgaggccgaggugcagaucgaccggcugaucacuggccggcugcagagccugcagaccuacgugacccagcagcugauccgggccgccgagauucgggccagcgccaaccuggccgccaucaagaugagcgagugcgugcugggccagagcaagcggguggacuucugcggcaagggcuaccaccugaugagcuuuccccagagcgcaccccacggagugguguuccugcacgugaccuacgugcccgcccaggagaagaacuucaccaccgccccagccaucugccacgacggcaaggcccacuuuccccgggagggcguguucgugagcaacggcacccacugguucgugacccagcggaacuucuacgagccccagaucaucaccaccgacaacaccuucgugagcggcaacugcgacguggugaucggcaucgugaacaacaccguguacgauccccugcagcccgagcuggacagcuucaaggaggagcuggacaaguacuucaagaaucacaccagccccgacguggaccugggcgacaucagcggcaucaacgccagcguggugaacauccagaaggagaucgaucggcugaacgagguggccaagaaccugaacgagagccugaucgaccugcaggagcugggcaaguacgagcaguacaucaaguggcccugguacaucuggcugggcuucaucgccggccugaucgccaucgugauggugaccaucaugcugugcugcaugaccagcugcugcagcugccugaagggcuguugcagcugcggcagcugcugcaaguucgacgaggacgacagcgagcccgugcugaagggcgugaagcugcacuacaccugauaauaggcuggagccucgguggccuagcuucuugccccuugggccuccccccagccccuccuccccuuccugcacccguacccccguggucuuugaauaaagucugagugggcggcaaaaaaaaaaaaaaaaaaaaaaaaaaaaaaaaaaaaaaaaaaaaaaaaaaaaaaaaaaaaaaaaaaaaaaaaaaaaaaaaaaaaaaaaaaaaaaaaaaaaucuag

SEQ ID NO: 26650 - RNA, 4100 nt, Artificial Sequence
  SARS-CoV-2/Wuhan/WIV05/2019__EPI_ISL_402128 spike protein mRNA gc (1-1273)(K986P_V987P_K986P_V987P_S13I_W152C_L452R_D614G)
gggaaauaagagagaaaagaagaguaagaagaaauauaagaccccggcgccgccaccauguucguguuccuggugcugcugccccuggugagcauccagugcgugaaccugaccacccggacccagcugccaccagccuacaccaacagcuucacccggggcgucuacuaccccgacaagguguuccggagcagcguccugcacagcacccaggaccuguuccugcccuucuucagcaacgugaccugguuccacgccauccacgugagcggcaccaacggcaccaagcgguucgacaaccccgugcugcccuucaacgacggcguguacuucgccagcaccgagaagagcaacaucauccggggcuggaucuucggcaccacccuggacagcaagacccagagccugcugaucgugaauaacgccaccaacguggugaucaaggugugcgaguuccaguucugcaacgaccccuuccugggcguguacuaccacaagaacaacaagagcugcauggagagcgaguuccggguguacagcagcgccaacaacugcaccuucgaguacgugagccagcccuuccugauggaccuggagggcaagcagggcaacuucaagaaccugcgggaguucguguucaagaacaucgacggcuacuucaagaucuacagcaagcacaccccaaucaaccuggugcgggaucugccccagggcuucucagcccuggagccccugguggaccugcccaucggcaucaacaucacccgguuccagacccugcuggcccugcaccggagcuaccugaccccaggcgacagcagcagcggguggacagcaggcgcggcugcuuacuacgugggcuaccugcagccccggaccuuccugcugaaguacaacgagaacggcaccaucaccgacgccguggacugcgcccuggacccucugagcgagaccaagugcacccugaagagcuucaccguggagaagggcaucuaccagaccagcaacuuccgggugcagcccaccgagagcaucgugcgguuccccaacaucaccaaccugugccccuucggcgagguguucaacgccacccgguucgccagcguguacgccuggaaccggaagcggaucagcaacugcguggccgacuacagcgugcuguacaacagcgccagcuucagcaccuucaagugcuacggcgugagccccaccaagcugaacgaccugugcuucaccaacguguacgccgacagcuucgugauccguggcgacgaggugcggcagaucgcacccggccagacaggcaagaucgccgacuacaacuacaagcugcccgacgacuucaccggcugcgugaucgccuggaacagcaacaaccucgacagcaaggugggcggcaacuacaacuaccgcuaccggcuguuccggaagagcaaccugaagcccuucgagcgggacaucagcaccgagaucuaccaagccggcuccaccccuugcaacggcguggagggcuucaacugcuacuucccucugcagagcuacggcuuccagcccaccaacggcgugggcuaccagcccuaccgggugguggugcugagcuucgagcugcugcacgccccagccaccguguguggccccaagaagagcaccaaccuggugaagaacaagugcgugaacuucaacuucaacggccuuaccggcaccggcgugcugaccgagagcaacaagaaauuccugcccuuucagcaguucggccgggacaucgccgacaccaccgacgcugugcgggauccccagacccuggagauccuggacaucaccccuugcagcuucggcggcgugagcgugaucaccccaggcaccaacaccagcaaccagguggccgugcuguaccagggcgugaacugcaccgaggugcccguggccauccacgccgaccagcugacacccaccuggcgggucuacagcaccggcagcaacguguuccagacccgggccgguugccugaucggcgccgagcacgugaacaacagcuacgagugcgacauccccaucggcgccggcaucugugccagcuaccagacccagaccaauucaccccggagggcaaggagcguggccagccagagcaucaucgccuacaccaugagccugggcgccgagaacagcguggccuacagcaacaacagcaucgccauccccaccaacuucaccaucagcgugaccaccgagauucugcccgugagcaugaccaagaccagcguggacugcaccauguacaucugcggcgacagcaccgagugcagcaaccugcugcugcaguacggcagcuucugcacccagcugaaccgggcccugaccggcaucgccguggagcaggacaagaacacccaggagguguucgcccaggugaagcagaucuacaagaccccucccaucaaggacuucggcggcuucaacuucagccagauccugcccgaccccagcaagcccagcaagcggagcuucaucgaggaccugcuguucaacaaggugacccuagccgacgccggcuucaucaagcaguacggcgacugccucggcgacauagccgcccgggaccugaucugcgcccagaaguucaacggccugaccgugcugccuccccugcugaccgacgagaugaucgcccaguacaccagcgcccuguuagccggaaccaucaccagcggcuggacuuucggcgcuggagccgcucugcagauccccuucgccaugcagauggccuaccgguucaacggcaucggcgugacccagaacgugcuguacgagaaccagaagcugaucgccaaccaguucaacagcgccaucggcaagauccaggacagccugagcagcaccgcuagcgcccugggcaagcugcaggacguggugaaccagaacgcccaggcccugaacacccuggugaagcagcugagcagcaacuucggcgccaucagcagcgugcugaacgacauccugagccggcuggacccucccgaggccgaggugcagaucgaccggcugaucacuggccggcugcagagccugcagaccuacgugacccagcagcugauccgggccgccgagauucgggccagcgccaaccuggccgccaccaagaugagcgagugcgugcugggccagagcaagcggguggacuucugcggcaagggcuaccaccugaugagcuuuccccagagcgcaccccacggagugguguuccugcacgugaccuacgugcccgcccaggagaagaacuucaccaccgccccagccaucugccacgacggcaaggcccacuuuccccgggagggcguguucgugagcaacggcacccacugguucgugacccagcggaacuucuacgagccccagaucaucaccaccgacaacaccuucgugagcggcaacugcgacguggugaucggcaucgugaacaacaccguguacgauccccugcagcccgagcuggacagcuucaaggaggagcuggacaaguacuucaagaaucacaccagccccgacguggaccugggcgacaucagcggcaucaacgccagcguggugaacauccagaaggagaucgaucggcugaacgagguggccaagaaccugaacgagagccugaucgaccugcaggagcugggcaaguacgagcaguacaucaaguggcccugguacaucuggcugggcuucaucgccggccugaucgccaucgugauggugaccaucaugcugugcugcaugaccagcugcugcagcugccugaagggcuguugcagcugcggcagcugcugcaaguucgacgaggacgacagcgagcccgugcugaagggcgugaagcugcacuacaccugauaauaggcuggagccucgguggccuagcuucuugccccuugggccuccccccagccccuccuccccuuccugcacccguacccccguggucuuugaauaaagucugagugggcggcaaaaaaaaaaaaaaaaaaaaaaaaaaaaaaaaaaaaaaaaaaaaaaaaaaaaaaaaaaaaaaaaaaaaaaaaaaaaaaaaaaaaaaaaaaaaaaaaaaaaucuag

SEQ ID NO: 26651 - RNA, 4100 nt, Artificial Sequence
  SARS-CoV-2/Wuhan/WIV05/2019__EPI_ISL_402128 spike protein mRNA gc (1-1273)(K986P_V987P)
gggaaauaagagagaaaagaagaguaagaagaaauauaagaccccggcgccgccaccauguucguguuccuggugcugcugccccuggugagcagccagugcgugaaccugaccacccggacccagcugcccccugccuacaccaacagcuucacccggggcguguacuaccccgacaagguguuccggagcagcgugcugcacagcacccaggaccuguuccugcccuucuucagcaacgugaccugguuccacgccauccacgugagcggcaccaacggcaccaagcgguucgacaacccagugcugcccuucaacgacggcguguacuucgccagcaccgagaagucaaacaucauccggggcuggaucuucggcaccacccuggacagcaagacacagagccugcugaucgugaacaacgccaccaacguggugaucaaggugugcgaguuucaguucugcaacgaccccuuccugggcguguacuaccacaagaacaacaagagcuggauggagagcgaguuccgggucuacagcagcgcuaacaauugcaccuucgaguacgugagccagcccuuccugauggaccucgagggcaagcagggcaacuucaagaaccugcgggaguucguguucaagaacaucgauggcuacuucaagaucuacagcaagcacacccccaucaaccuggugcgggaccugccccagggauucagcgcccuggagccucugguggaccugcccaucggcaucaacaucaccagguuccagacccugcuggcccugcaccggagcuaccugacccccggcgacagcagcagcggcuggaccgccggcgccgccgcauacuacgugggcuaccugcagccacggaccuuccugcugaaguacaacgagaacggcaccaucaccgacgccguggacugcgcccuggacccccugagcgagaccaagugcacccuaaagagcuucaccguggagaagggcaucuaccagaccagcaacuuccgggugcagcccacugagagcaucgugcgguuccccaacauuaccaaccugugucccuucggcgagguguucaacgccacccgguucgccagcguguacgccuggaaccggaagcggaucagcaacugcguggccgacuacagcgugcuguacaacagcgccagcuucagcaccuucaagugcuacggcgugagcccuaccaagcugaacgaccugugcuucaccaacguguacgcugacagcuucgugauccggggcgacgaggugcggcagaucgcccccggccagaccggcaagaucgccgacuacaacuacaagcugcccgacgacuucaccggcugcgugaucgccuggaacagcaacaaccuggacagcaaggugggcggcaacuacaacuaccuguaccggcuguuccguaagagcaaccugaagccauucgagcgggacaucagcaccgagaucuaccaggccggcagcacccccugcaacgguguggagggcuuuaacugcuacuucccccugcagagcuacggcuuccagcccaccaacggcgugggcuaccagcccuaccgggugguggugcugagcuucgagcugcugcacgcccccgccaccgugugcggcccuaaaaagagcaccaaccuggugaagaacaagugcgugaacuucaauuucaacggccugaccggcaccggcgugcugaccgagagcaacaagaaguuccugcccuuccagcaguucggccgggauaucgccgacaccaccgacgcagugcgggacccccagacccuggagauccuggacaucaccccaugcagcuucggcggcgugagcgucaucacccccggcacaaacaccagcaaccagguggccgugcuguaccaggacgugaacugcaccgaggugcccguggccauccacgccgaccagcugacccccaccuggcggguguacagcaccggaagcaacguguuccagacccgggccggcugccugaucggcgccgagcacgugaacaacuccuacgagugcgacauccccaucggcgcuggcaucugcgccagcuaccagacccagaccaacagcccccggcgggcccggagcguggccagccagagcaucaucgccuacaccaugagcuuaggcgccgagaacagcguggccuacagcaacaacagcaucgcgaucccuaccaacuucaccaucagcgugaccaccgagauacugcccgugagcaugaccaagaccagcguggacuguaccauguacaucugcggcgacagcaccgagugcagcaaccugcugcugcaguacggcagcuucugcacccagcugaaccgggcccugaccggcaucgccguggagcaggacaagaacacccaagagguguucgcccaggugaagcagaucuacaagacucccccaaucaaggacuucggcggcuucaacuucagccagauccugcccgaccccagcaagcccagcaagcggagcuucaucgaggaccugcuguucaacaaggugacccuggccgacgccggcuucaucaagcaguacggcgauugccugggcgacaucgccgcucgggaccugaucugcgcccagaaguucaacgggcugaccgugcugcccccucugcugaccgacgagaugaucgcccaguacaccagcgcccugcuugccggcaccaucaccagcggcuggaccuucggcgccggcgcagcccugcagauccccuucgccaugcagauggccuaccgguucaacggcaucggcgugacccagaacgugcuguacgagaaccagaagcugaucgccaaccaguucaacagcgccaucggcaagauccaggacagccugagcagcaccgccagcgcccugggcaagcugcaggacguggugaaccagaacgcucaggcccugaacacccuggugaagcagcugagcagcaacuucggcgccaucagcucagugcugaaugacauccugagcaggcuggaucccccagaggccgaggugcagaucgaccggcugaucaccggccggcugcagagccugcagaccuacgugacccagcagcugauccgggccgccgagauccgggccagcgccaaccuggcagccaccaagaugagcgagugcgugcugggccagagcaagcggguggacuuuugcggcaagggcuaccaccugaugagcuucccccagagcgcuccccacggcgugguguuccuccacgugacauacguccccgcccaggagaagaacuucaccaccgcccccgccauuugccacgacggcaaggcccacuucccccgggagggcguguucgugagcaacggaacccacugguucgugacccagcggaacuucuacgagccucagaucaucaccaccgacaacaccuucgugagcggcaacugcgacguggugaucggcaucgugaacaacaccguguacgacccccugcagcccgagcuggacagcuucaaggaggagcuggacaaguacuucaagaaccacaccagcccagacguggaccugggcgacaucagcggcaucaacgccagcguggugaacauccagaaggagaucgaccggcugaacgagguggccaagaaccugaacgagagccugaucgaccugcaggagcugggcaaguacgagcaguacaucaaguggcccugguacaucuggcugggcuucaucgccggccugaucgccaucgugauggugaccaucaugcugugcugcaugaccagcugcuguagcugccugaagggcugcugcagcugcggcagcugcugcaaguucgacgaggacgacagcgagcccgugcugaagggcgugaagcugcacuacaccugauaauaggcuggagccucgguggccuagcuucuugccccuugggccuccccccagccccuccuccccuuccugcacccguacccccguggucuuugaauaaagucugagugggcggcaaaaaaaaaaaaaaaaaaaaaaaaaaaaaaaaaaaaaaaaaaaaaaaaaaaaaaaaaaaaaaaaaaaaaaaaaaaaaaaaaaaaaaaaaaaaaaaaaaaaucuag

SEQ ID NO: 26652 - RNA, 4100 nt, Artificial Sequence
  SARS-CoV-2/Wuhan/WIV05/2019__EPI_ISL_402128 spike protein mRNA gc (1-1273)(K986P_V987P_ D614G)
gggaaauaagagagaaaagaagaguaagaagaaauauaagaccccggcgccgccaccauguucguguuccuggugcugcugccccuggugagcagccagugcgugaaccugaccacccggacccagcugcccccugccuacaccaacagcuucacccggggcguguacuaccccgacaagguguuccggagcagcgugcugcacagcacccaggaccuguuccugcccuucuucagcaacgugaccugguuccacgccauccacgugagcggcaccaacggcaccaagcgguucgacaacccagugcugcccuucaacgacggcguguacuucgccagcaccgagaagucaaacaucauccggggcuggaucuucggcaccacccuggacagcaagacacagagccugcugaucgugaacaacgccaccaacguggugaucaaggugugcgaguuucaguucugcaacgaccccuuccugggcguguacuaccacaagaacaacaagagcuggauggagagcgaguuccgggucuacagcagcgcuaacaauugcaccuucgaguacgugagccagcccuuccugauggaccucgagggcaagcagggcaacuucaagaaccugcgggaguucguguucaagaacaucgauggcuacuucaagaucuacagcaagcacacccccaucaaccuggugcgggaccugccccagggauucagcgcccuggagccucugguggaccugcccaucggcaucaacaucaccagguuccagacccugcuggcccugcaccggagcuaccugacccccggcgacagcagcagcggcuggaccgccggcgccgccgcauacuacgugggcuaccugcagccacggaccuuccugcugaaguacaacgagaacggcaccaucaccgacgccguggacugcgcccuggacccccugagcgagaccaagugcacccuaaagagcuucaccguggagaagggcaucuaccagaccagcaacuuccgggugcagcccacugagagcaucgugcgguuccccaacauuaccaaccugugucccuucggcgagguguucaacgccacccgguucgccagcguguacgccuggaaccggaagcggaucagcaacugcguggccgacuacagcgugcuguacaacagcgccagcuucagcaccuucaagugcuacggcgugagcccuaccaagcugaacgaccugugcuucaccaacguguacgcugacagcuucgugauccggggcgacgaggugcggcagaucgcccccggccagaccggcaagaucgccgacuacaacuacaagcugcccgacgacuucaccggcugcgugaucgccuggaacagcaacaaccuggacagcaaggugggcggcaacuacaacuaccuguaccggcuguuccguaagagcaaccugaagccauucgagcgggacaucagcaccgagaucuaccaggccggcagcacccccugcaacgguguggagggcuuuaacugcuacuucccccugcagagcuacggcuuccagcccaccaacggcgugggcuaccagcccuaccgggugguggugcugagcuucgagcugcugcacgcccccgccaccgugugcggcccuaaaaagagcaccaaccuggugaagaacaagugcgugaacuucaauuucaacggccugaccggcaccggcgugcugaccgagagcaacaagaaguuccugcccuuccagcaguucggccgggauaucgccgacaccaccgacgcagugcgggacccccagacccuggagauccuggacaucaccccaugcagcuucggcggcgugagcgucaucacccccggcacaaacaccagcaaccagguggccgugcuguaccagggagugaacugcaccgaggugcccguggccauccacgccgaccagcugacccccaccuggcggguguacagcaccggcagcaacguguuccagacccgggccggcugccugaucggcgccgagcacgugaacaacuccuacgagugcgacauccccaucggcgcuggcaucugcgccagcuaccagacccagaccaacagcccccggcgggcccggagcguggccagccagagcaucaucgccuacaccaugagcuuaggcgccgagaacagcguggccuacagcaacaacagcaucgcgaucccuaccaacuucaccaucagcgugaccaccgagauacugcccgugagcaugaccaagaccagcguggacuguaccauguacaucugcggcgacagcaccgagugcagcaaccugcugcugcaguacggcagcuucugcacccagcugaaccgggcccugaccggcaucgccguggagcaggacaagaacacccaagagguguucgcccaggugaagcagaucuacaagacucccccaaucaaggacuucggcggcuucaacuucagccagauccugcccgaccccagcaagcccagcaagcggagcuucaucgaggaccugcuguucaacaaggugacccuggccgacgccggcuucaucaagcaguacggcgacugccugggggauaucgccgcucgggaccugaucugcgcccagaaguucaacggccugaccgugcugcccccucugcugaccgacgagaugaucgcccaguacaccagcgcccugcuugccggcaccaucaccagcggcuggaccuucggcgccggcgcagcccugcagauccccuucgccaugcagauggccuaccgguucaacggcaucggcgugacccagaacgugcuguacgagaaccagaagcugaucgccaaccaguucaacagcgccaucggcaagauccaggacagccugagcagcaccgccagcgcccugggcaagcugcaggacguggugaaccagaacgcucaggcccugaacacccuggugaagcagcugagcagcaacuucggcgccaucagcucagugcugaaugacauccugagcaggcuggaucccccagaggccgaggugcagaucgaccggcugaucaccggccggcugcagagccugcagaccuacgugacccagcagcugauccgggccgccgagauccgggccagcgccaaccuggcagccaccaagaugagcgagugcgugcugggccagagcaagcggguggacuuuugcggcaagggcuaccaccugaugagcuucccccagagcgcuccccacggcgugguguuccuccacgugacauacguccccgcccaggagaagaacuucaccaccgcccccgccauuugccacgacggcaaggcccacuucccccgggagggaguguucgugagcaacggcacccacugguucgugacccagcggaacuucuacgagccucagaucaucaccaccgacaacaccuucgugagcggcaacugcgacguggugaucggcaucgugaacaacaccguguacgacccccugcagcccgagcuggacagcuucaaggaggagcuggacaaguacuucaagaaccacaccagcccagacguggaccugggcgacaucagcggcaucaacgccagcguggugaacauccagaaggagaucgaccggcugaacgagguggccaagaaccugaacgagagccugaucgaccugcaggagcugggcaaguacgagcaguacaucaaguggcccugguacaucuggcugggcuucaucgccggccugaucgccaucgugauggugaccaucaugcugugcugcaugaccagcugcuguagcugccugaagggcugcugcagcugcggcagcugcugcaaguucgacgaggacgacagcgagcccgugcugaagggcgugaagcugcacuacaccugauaauaggcuggagccucgguggccuagcuucuugccccuugggccuccccccagccccuccuccccuuccugcacccguacccccguggucuuugaauaaagucugagugggcggcaaaaaaaaaaaaaaaaaaaaaaaaaaaaaaaaaaaaaaaaaaaaaaaaaaaaaaaaaaaaaaaaaaaaaaaaaaaaaaaaaaaaaaaaaaaaaaaaaaaaucuag

SEQ ID NO: 26653 - RNA, 4100 nt, Artificial Sequence
  SARS-CoV-2/Wuhan/WIV05/2019__EPI_ISL_402128 spike protein mRNA gc (1-1273)(K986P_V987P_A222V_D614G)
gggaaauaagagagaaaagaagaguaagaagaaauauaagaccccggcgccgccaccauguucguguuccuggugcugcugccccuggugagcagccagugcgugaaccugaccacccggacccagcugcccccugccuacaccaacagcuucacccggggcguguacuaccccgacaagguguuccggagcagcgugcugcacagcacccaggaccuguuccugcccuucuucagcaacgugaccugguuccacgccauccacgugagcggcaccaacggcaccaagcgguucgacaacccagugcugcccuucaacgacggcguguacuucgccagcaccgagaagucaaacaucauccggggcuggaucuucggcaccacccuggacagcaagacacagagccugcugaucgugaacaacgccaccaacguggugaucaaggugugcgaguuucaguucugcaacgaccccuuccugggcguguacuaccacaagaacaacaagagcuggauggagagcgaguuccgggucuacagcagcgcuaacaauugcaccuucgaguacgugagccagcccuuccugauggaccucgagggcaagcagggcaacuucaagaaccugcgggaguucguguucaagaacaucgauggcuacuucaagaucuacagcaagcacacccccaucaaccuggugcgggaccugccccagggauucagcgugcuggagccucugguggaccugcccaucggcaucaacaucaccagguuccagacccugcuggcccugcaccggagcuaccugacccccggcgacagcagcagcggcuggaccgccggcgccgccgccuacuacgugggcuaccugcagccacggaccuuccugcugaaguacaacgagaacggcaccaucaccgacgcaguggacugcgcccuggacccccugagcgagaccaagugcacccuaaagagcuucaccguggagaagggcaucuaccagaccagcaacuuccgggugcagcccacugagagcaucgugcgguuccccaacauuaccaaccugugucccuucggcgagguguucaacgccacccgguucgccagcguguacgccuggaaccggaagcggaucagcaacugcguggccgacuacagcgugcuguacaacagcgccagcuucagcaccuucaagugcuacggcgugagcccuaccaagcugaacgaccugugcuucaccaacguguacgccgacagcuucgugauccggggcgacgaggugcggcagaucgcucccggccagaccggcaagaucgccgacuacaacuacaagcugcccgacgacuucaccggcugcgugaucgccuggaacagcaacaaccuggacagcaaggugggcggcaacuacaacuaccuguaccggcuguuccguaagagcaaccugaagccauucgagcgggacaucagcaccgagaucuaccaggccggcagcacccccugcaacgguguggagggcuuuaacugcuacuucccccugcagagcuacggcuuccagcccaccaacggcgugggcuaccagcccuaccgggugguggugcugagcuucgagcugcugcacgcccccgccaccgugugcggcccuaaaaagagcaccaaccuggugaagaacaagugcgugaacuucaauuucaacggccugaccggcaccggcgugcugaccgagagcaacaagaaguuccugcccuuccagcaguucggccgggauaucgccgacaccaccgacgccgugcgggacccccagacccuggagauccuggacaucaccccaugcagcuucggcggcgucagcgugaucacccccggcacaaacaccagcaaccagguggcagugcuguaccagggagugaacugcaccgaggugcccguggccauccacgccgaccagcugacccccaccuggcggguguacagcaccggcagcaacguguuccagacccgggccggcugccugaucggcgccgagcacgugaacaacuccuacgagugcgacauccccaucggcgccggcaucugcgcuagcuaccagacccagaccaacagcccccggcgggcccggagcguggccagccagagcaucaucgccuacaccaugagcuuaggcgccgagaacagcguggccuacagcaacaacagcaucgccaucccuaccaacuucaccaucagcgugaccaccgagauacugcccgugagcaugaccaagaccagcguggacuguaccauguacaucugcggcgacagcaccgagugcagcaaccugcugcugcaguacggcagcuucugcacccagcugaaccgggcgcugaccggcaucgccguggagcaggacaagaacacccaagagguguucgcccaggugaagcagaucuacaagacucccccaaucaaggacuucggcggcuucaacuucagccagauccugcccgaccccagcaagcccagcaagcggagcuucaucgaggaccugcuguucaacaaggugacccuggccgacgccggcuucaucaagcaguacggcgacugccugggggauaucgccgcccgggaccugaucugcgcucagaaguucaacggccugaccgugcugcccccucugcugaccgacgagaugaucgcccaguacaccagcgcccugcuugccggcaccaucaccagcggcuggaccuucggcgccggcgccgcacugcagauccccuucgccaugcagauggccuaccgguucaacggcaucggcgugacccagaacgugcuguacgagaaccagaagcugaucgccaaccaguucaacagcgccaucggcaagauccaggacagccugagcagcaccgccagcgcccugggcaagcugcaggacguggugaaccagaacgcccaggcucugaacacccuggugaagcagcugagcagcaacuucggcgccaucagcucagugcugaaugacauccugagcaggcuggaucccccagaggccgaggugcagaucgaccggcugaucaccggccggcugcagagccugcagaccuacgugacccagcagcugauccgggccgccgagauccgggccagcgccaaccuggccgcaaccaagaugagcgagugcgugcugggccagagcaagcggguggacuuuugcggcaagggcuaccaccugaugagcuucccccagagcgcuccccacggcgugguguuccuccacgucacauacgugcccgcccaggagaagaacuucaccaccgcccccgccauuugccacgacggcaaggcccacuucccccgggagggaguguucgugagcaacggcacccacugguucgugacccagcggaacuucuacgagccucagaucaucaccaccgacaacaccuucgugagcggcaacugcgacguggugaucggcaucgugaacaacaccguguacgacccccugcagcccgagcuggacagcuucaaggaggagcuggacaaguacuucaagaaccacaccagcccagacguggaccugggcgacaucagcggcaucaacgccagcguggugaacauccagaaggagaucgaccggcugaacgagguggccaagaaccugaacgagagccugaucgaccugcaggagcugggcaaguacgagcaguacaucaaguggcccugguacaucuggcugggcuucaucgccggccugaucgccaucgugauggugaccaucaugcugugcugcaugaccagcugcuguagcugccugaagggcugcugcagcugcggcagcugcugcaaguucgacgaggacgacagcgagcccgugcugaagggcgugaagcugcacuacaccugauaauaggcuggagccucgguggccuagcuucuugccccuugggccuccccccagccccuccuccccuuccugcacccguacccccguggucuuugaauaaagucugagugggcggcaaaaaaaaaaaaaaaaaaaaaaaaaaaaaaaaaaaaaaaaaaaaaaaaaaaaaaaaaaaaaaaaaaaaaaaaaaaaaaaaaaaaaaaaaaaaaaaaaaaaucuag

SEQ ID NO: 26654 - RNA, 4100 nt, Artificial Sequence
  SARS-CoV-2/Wuhan/WIV05/2019__EPI_ISL_402128 spike protein mRNA gc (1-1273)(K986P_V987P_N439K_D614G)
gggaaauaagagagaaaagaagaguaagaagaaauauaagaccccggcgccgccaccauguucguguuccuggugcugcugccccuggugagcagccagugcgugaaccugaccacccggacccagcugcccccugccuacaccaacagcuucacccggggcguguacuaccccgacaagguguuccggagcagcgugcugcacagcacccaggaccuguuccugcccuucuucagcaacgugaccugguuccacgccauccacgugagcggcaccaacggcaccaagcgguucgacaacccagugcugcccuucaacgacggcguguacuucgccagcaccgagaagucaaacaucauccggggcuggaucuucggcaccacccuggacagcaagacacagagccugcugaucgugaacaacgccaccaacguggugaucaaggugugcgaguuucaguucugcaacgaccccuuccugggcguguacuaccacaagaacaacaagagcuggauggagagcgaguuccgggucuacagcagcgcuaacaauugcaccuucgaguacgugagccagcccuuccugauggaccucgagggcaagcagggcaacuucaagaaccugcgggaguucguguucaagaacaucgauggcuacuucaagaucuacagcaagcacacccccaucaaccuggugcgggaccugccccagggauucagcgcccuggagccucugguggaccugcccaucggcaucaacaucaccagguuccagacccugcuggcccugcaccggagcuaccugacccccggcgacagcagcagcggcuggaccgccggcgccgccgcauacuacgugggcuaccugcagccacggaccuuccugcugaaguacaacgagaacggcaccaucaccgacgccguggacugcgcccuggacccccugagcgagaccaagugcacccuaaagagcuucaccguggagaagggcaucuaccagaccagcaacuuccgggugcagcccacugagagcaucgugcgguuccccaacauuaccaaccugugucccuucggcgagguguucaacgccacccgguucgccagcguguacgccuggaaccggaagcggaucagcaacugcguggccgacuacagcgugcuguacaacagcgccagcuucagcaccuucaagugcuacggcgugagcccuaccaagcugaacgaccugugcuucaccaacguguacgcugacagcuucgugauccggggcgacgaggugcggcagaucgcccccggccagaccggcaagaucgccgacuacaacuacaagcugcccgacgacuucaccggcugcgugaucgccuggaacagcaagaaccuggacagcaaggugggcggcaacuacaacuaccuguaccggcuguuccguaagagcaaccugaagccauucgagcgggacaucagcaccgagaucuaccaggccggcagcacccccugcaacgguguggagggcuuuaacugcuacuucccccugcagagcuacggcuuccagcccaccaacggcgugggcuaccagcccuaccgggugguggugcugagcuucgagcugcugcacgcccccgccaccgugugcggcccuaaaaagagcaccaaccuggugaagaacaagugcgugaacuucaacuucaauggccugaccggcaccggcgugcugaccgagagcaacaagaaguuccugcccuuccagcaguucggccgggauaucgccgacaccaccgacgcagugcgggacccccagacccuggagauccuggacaucaccccaugcagcuucggcggcgugagcgucaucacccccggcacaaacaccagcaaccagguggccgugcuguaccagggagugaacugcaccgaggugcccguggccauccacgccgaccagcugacccccaccuggcggguguacagcaccggcagcaacguguuccagacccgggccggcugccugaucggcgccgagcacgugaacaacuccuacgagugcgacauccccaucggcgcuggcaucugcgccagcuaccagacccagaccaacagcccccggcgggcccggagcguggccagccagagcaucaucgccuacaccaugagcuuaggcgccgagaacagcguggccuacagcaacaacagcaucgcgaucccuaccaacuucaccaucagcgugaccaccgagauacugcccgugagcaugaccaagaccagcguggacuguaccauguacaucugcggcgacagcaccgagugcagcaaccugcugcugcaguacggcagcuucugcacccagcugaaccgggcccugaccggcaucgccguggagcaggacaagaacacccaagagguguucgcccaggugaagcagaucuacaagacucccccaaucaaggacuucggcggcuucaacuucagccagauccugcccgaccccagcaagcccagcaagcggagcuucaucgaggaccugcuguucaacaaggugacccuggccgacgccggcuucaucaagcaguacggcgacugccugggggauaucgccgcucgggaccugaucugcgcccagaaguucaacggccugaccgugcugcccccucugcugaccgacgagaugaucgcccaguacaccagcgcccugcuugccggcaccaucaccagcggcuggaccuucggcgccggcgcagcccugcagauccccuucgccaugcagauggccuaccgguucaacggcaucggcgugacccagaacgugcuguacgagaaccagaagcugaucgccaaccaguucaacagcgccaucggcaagauccaggacagccugagcagcaccgccagcgcccugggcaagcugcaggacguggugaaccagaacgcucaggcccugaacacccuggugaagcagcugagcagcaacuucggcgccaucagcucagugcugaacgacauccugagcaggcuggaucccccagaggccgaggugcagaucgaccggcugaucaccggccggcugcagagccugcagaccuacgugacccagcagcugauccgggccgccgagauccgggccagcgccaaucuggcagccaccaagaugagcgagugcgugcugggccagagcaagcggguggacuuuugcggcaagggcuaccaccugaugagcuucccccagagcgcuccccacggcgugguguuccuccacgugacauacguccccgcccaggagaagaacuucaccaccgcccccgccauuugccacgacggcaaggcccacuucccccgggagggaguguucgugagcaacggcacccacugguucgugacccagcggaacuucuacgagccucagaucaucaccaccgacaacaccuucgugagcggcaacugcgacguggugaucggcaucgugaacaacaccguguacgacccccugcagcccgagcuggacagcuucaaggaggagcuggacaaguacuucaagaaccacaccagcccagacguggaccugggcgacaucagcggcaucaacgccagcguggugaacauccagaaggagaucgaccggcugaacgagguggccaagaaccugaacgagagccugaucgaccugcaggagcugggcaaguacgagcaguacaucaaguggcccugguacaucuggcugggcuucaucgccggccugaucgccaucgugauggugaccaucaugcugugcugcaugaccagcugcuguagcugccugaagggcugcugcagcugcggcagcugcugcaaguucgacgaggacgacagcgagcccgugcugaagggcgugaagcugcacuacaccugauaauaggcuggagccucgguggccuagcuucuugccccuugggccuccccccagccccuccuccccuuccugcacccguacccccguggucuuugaauaaagucugagugggcggcaaaaaaaaaaaaaaaaaaaaaaaaaaaaaaaaaaaaaaaaaaaaaaaaaaaaaaaaaaaaaaaaaaaaaaaaaaaaaaaaaaaaaaaaaaaaaaaaaaaaucuag

SEQ ID NO: 26655 - RNA, 4100 nt, Artificial Sequence
  SARS-CoV-2/Wuhan/WIV05/2019__EPI_ISL_402128 spike protein mRNA gc (1-1273)(K986P_V987P_S477N_D614G)
gggaaauaagagagaaaagaagaguaagaagaaauauaagaccccggcgccgccaccauguucguguuccuggugcugcugccccuggugagcagccagugcgugaaccugaccacccggacccagcugcccccugccuacaccaacagcuucacccggggcguguacuaccccgacaagguguuccggagcagcgugcugcacagcacccaggaccuguuccugcccuucuucagcaacgugaccugguuccacgccauccacgugagcggcaccaacggcaccaagcgguucgacaacccagugcugcccuucaacgacggcguguacuucgccagcaccgagaagucaaacaucauccggggcuggaucuucggcaccacccuggacagcaagacacagagccugcugaucgugaacaacgccaccaacguggugaucaaggugugcgaguuucaguucugcaacgaccccuuccugggcguguacuaccacaagaacaacaagagcuggauggagagcgaguuccgggucuacagcagcgcuaacaauugcaccuucgaguacgugagccagcccuuccugauggaccucgagggcaagcagggcaacuucaagaaccugcgggaguucguguucaagaacaucgauggcuacuucaagaucuacagcaagcacacccccaucaaccuggugcgggaccugccccagggauucagcgcccuggagccucugguggaccugcccaucggcaucaacaucaccagguuccagacccugcuggcccugcaccggagcuaccugacccccggcgacagcagcagcggcuggaccgccggcgccgccgcauacuacgugggcuaccugcagccacggaccuuccugcugaaguacaacgagaacggcaccaucaccgacgccguggacugcgcccuggacccccugagcgagaccaagugcacccuaaagagcuucaccguggagaagggcaucuaccagaccagcaacuuccgggugcagcccacugagagcaucgugcgguuccccaacauuaccaaccugugucccuucggcgagguguucaacgccacccgguucgccagcguguacgccuggaaccggaagcggaucagcaacugcguggccgacuacagcgugcuguacaacagcgccagcuucagcaccuucaagugcuacggcgugagcccuaccaagcugaacgaccugugcuucaccaacguguacgcugacagcuucgugauccggggcgacgaggugcggcagaucgcccccggccagaccggcaagaucgccgacuacaacuacaagcugcccgacgacuucaccggcugcgugaucgccuggaacagcaacaaccuggacagcaaggugggcggcaacuacaacuaccuguaccggcuguuccguaagagcaaccugaagccauucgagcgggacaucagcaccgagaucuaccaggccggcaacacccccugcaacgguguggagggcuuuaacugcuacuucccccugcagagcuacggcuuccagcccaccaacggcgugggcuaccagcccuaccgggugguggugcugagcuucgagcugcugcacgcccccgccaccgugugcggcccuaaaaagagcaccaaccuggugaagaacaagugcgugaauuucaacuucaacggccugaccggcaccggcgugcugaccgagagcaacaagaaguuccugcccuuccagcaguucggccgggauaucgccgacaccaccgacgcagugcgggacccccagacccuggagauccuggacaucaccccaugcagcuucggcggcgugagcgucaucacccccggcacaaacaccagcaaccagguggccgugcuguaccagggagugaacugcaccgaggugcccguggccauccacgccgaccagcugacccccaccuggcggguguacagcaccggcagcaacguguuccagacccgggccggcugccugaucggcgccgagcacgugaacaacagcuacgagugcgacauccccaucggcgcuggcaucugcgccuccuaccagacccagaccaacagcccccggcgggcccggagcguggccagccagagcaucaucgccuacaccaugagcuuaggcgccgagaacagcguggccuacagcaacaacagcaucgcgaucccuaccaacuucaccaucagcgugaccaccgagauacugcccgugagcaugaccaagaccagcguggacuguaccauguacaucugcggcgacagcaccgagugcagcaaccugcugcugcaguacggcagcuucugcacccagcugaaccgggcccugaccggcaucgccguggagcaggacaagaacacccaagagguguucgcccaggugaagcagaucuacaagacucccccaaucaaggacuucggcggcuucaacuucagccagauccugcccgaccccagcaagcccagcaagcggagcuucaucgaggaccugcuguucaacaaggugacccuggccgacgccggcuucaucaagcaguacggcgacugccugggggauaucgccgcucgggaccugaucugcgcccagaaguucaacggccugaccgugcugcccccucugcugaccgacgagaugaucgcccaguacaccagcgcccugcuugccggcaccaucaccagcggcuggaccuucggcgccggcgcagcccugcagauccccuucgccaugcagauggccuaccgguucaacggcaucggcgugacccagaacgugcuguacgagaaccagaagcugaucgccaaccaguucaacagcgccaucggcaagauccaggacagccugagcagcaccgccagcgcccugggcaagcugcaggacguggugaaccagaacgcucaggcccugaacacccuggugaagcagcugagcagcaauuucggcgccaucagcagcgugcugaacgacauccugucaaggcuggaucccccagaggccgaggugcagaucgaccggcugaucaccggccggcugcagagccugcagaccuacgugacccagcagcugauccgggccgccgagauccgggccagcgccaaccuggcagccaccaagaugagcgagugcgugcugggccagagcaagcggguggacuuuugcggcaagggcuaccaccugaugagcuucccccagagcgcuccccacggcgugguguuccuccacgugacauacguccccgcccaggagaagaacuucaccaccgcccccgccauuugccacgacggcaaggcccacuucccccgggagggaguguucgugagcaacggcacccacugguucgugacccagcggaacuucuacgagccucagaucaucaccaccgacaacaccuucgugagcggcaacugcgacguggugaucggcaucgugaacaacaccguguacgacccccugcagcccgagcuggacagcuucaaggaggagcuggacaaguacuucaagaaccacaccagcccagacguggaccugggcgacaucagcggcaucaacgccagcguggugaacauccagaaggagaucgaccggcugaacgagguggccaagaaccugaacgagagccugaucgaccugcaggagcugggcaaguacgagcaguacaucaaguggcccugguacaucuggcugggcuucaucgccggccugaucgccaucgugauggugaccaucaugcugugcugcaugaccagcugcuguagcugccugaagggcugcugcagcugcggcagcugcugcaaguucgacgaggacgacagcgagcccgugcugaagggcgugaagcugcacuacaccugauaauaggcuggagccucgguggccuagcuucuugccccuugggccuccccccagccccuccuccccuuccugcacccguacccccguggucuuugaauaaagucugagugggcggcaaaaaaaaaaaaaaaaaaaaaaaaaaaaaaaaaaaaaaaaaaaaaaaaaaaaaaaaaaaaaaaaaaaaaaaaaaaaaaaaaaaaaaaaaaaaaaaaaaaaucuag

SEQ ID NO: 26656 - RNA, 4100 nt, Artificial Sequence
  SARS-CoV-2/Wuhan/WIV05/2019__EPI_ISL_402128 spike protein mRNA gc (1-1273)(K986P_V987P_N501Y_D614G)
gggaaauaagagagaaaagaagaguaagaagaaauauaagaccccggcgccgccaccauguucguguuccuggugcugcugccccuggugagcagccagugcgugaaccugaccacccggacccagcugcccccugccuacaccaacagcuucacccggggcguguacuaccccgacaagguguuccggagcagcgugcugcacagcacccaggaccuguuccugcccuucuucagcaacgugaccugguuccacgccauccacgugagcggcaccaacggcaccaagcgguucgacaacccagugcugcccuucaacgacggcguguacuucgccagcaccgagaagucaaacaucauccggggcuggaucuucggcaccacccuggacagcaagacacagagccugcugaucgugaacaacgccaccaacguggugaucaaggugugcgaguuucaguucugcaacgaccccuuccugggcguguacuaccacaagaacaacaagagcuggauggagagcgaguuccgggucuacagcagcgcuaacaauugcaccuucgaguacgugagccagcccuuccugauggaccucgagggcaagcagggcaacuucaagaaccugcgggaguucguguucaagaacaucgauggcuacuucaagaucuacagcaagcacacccccaucaaccuggugcgggaccugccccagggauucagcgcccuggagccucugguggaccugcccaucggcaucaacaucaccagguuccagacccugcuggcccugcaccggagcuaccugacccccggcgacagcagcagcggcuggaccgccggcgccgccgcauacuacgugggcuaccugcagccacggaccuuccugcugaaguacaacgagaacggcaccaucaccgacgccguggacugcgcccuggacccccugagcgagaccaagugcacccuaaagagcuucaccguggagaagggcaucuaccagaccagcaacuuccgggugcagcccacugagagcaucgugcgguuccccaacauuaccaaccugugucccuucggcgagguguucaacgccacccgguucgccagcguguacgccuggaaccggaagcggaucagcaacugcguggccgacuacagcgugcuguacaacagcgccagcuucagcaccuucaagugcuacggcgugagcccuaccaagcugaacgaccugugcuucaccaacguguacgcugacagcuucgugauccggggcgacgaggugcggcagaucgcccccggccagaccggcaagaucgccgacuacaacuacaagcugcccgacgacuucaccggcugcgugaucgccuggaacagcaacaaccuggacagcaaggugggcggcaacuacaacuaccuguaccggcuguuccguaagagcaaccugaagccauucgagcgggacaucagcaccgagaucuaccaggccggcagcacccccugcaacgguguggagggcuuuaacugcuacuucccccugcagagcuacggcuuccagcccaccuacggcgugggcuaccagcccuaccgggugguggugcugagcuucgagcugcugcacgcccccgccaccgugugcggcccuaaaaagagcaccaaccuggugaagaacaagugcgugaacuucaacuucaauggccugaccggcaccggcgugcugaccgagagcaacaagaaguuccugcccuuccagcaguucggccgggauaucgccgacaccaccgacgcagugcgggacccccagacccuggagauccuggacaucaccccaugcagcuucggcggcgugagcgucaucacccccggcacaaacaccagcaaccagguggccgugcuguaccagggagugaacugcaccgaggugcccguggccauccacgccgaccagcugacccccaccuggcggguguacagcaccggcagcaacguguuccagacccgggccggcugccugaucggcgccgagcacgugaacaacuccuacgagugcgacauccccaucggcgcuggcaucugcgccagcuaccagacccagaccaacagcccccggcgggcccggagcguggccagccagagcaucaucgccuacaccaugagcuuaggcgccgagaacagcguggccuacagcaacaacagcaucgcgaucccuaccaacuucaccaucagcgugaccaccgagauacugcccgugagcaugaccaagaccagcguggacuguaccauguacaucugcggcgacagcaccgagugcagcaaccugcugcugcaguacggcagcuucugcacccagcugaaccgggcccugaccggcaucgccguggagcaggacaagaacacccaagagguguucgcccaggugaagcagaucuacaagacucccccaaucaaggacuucggcggcuucaacuucagccagauccugcccgaccccagcaagcccagcaagcggagcuucaucgaggaccugcuguucaacaaggugacccuggccgacgccggcuucaucaagcaguacggcgacugccugggggauaucgccgcucgggaccugaucugcgcccagaaguucaacggccugaccgugcugcccccucugcugaccgacgagaugaucgcccaguacaccagcgcccugcuugccggcaccaucaccagcggcuggaccuucggcgccggcgcagcccugcagauccccuucgccaugcagauggccuaccgguucaacggcaucggcgugacccagaacgugcuguacgagaaccagaagcugaucgccaaccaguucaacagcgccaucggcaagauccaggacagccugagcagcaccgccagcgcccugggcaagcugcaggacguggugaaccagaacgcucaggcccugaacacccuggugaagcagcugagcagcaacuucggcgccaucagcucagugcugaacgacauccugagcaggcuggaucccccagaggccgaggugcagaucgaccggcugaucaccggccggcugcagagccugcagaccuacgugacccagcagcugauccgggccgccgagauccgggccagcgccaaucuggcagccaccaagaugagcgagugcgugcugggccagagcaagcggguggacuuuugcggcaagggcuaccaccugaugagcuucccccagagcgcuccccacggcgugguguuccuccacgugacauacguccccgcccaggagaagaacuucaccaccgcccccgccauuugccacgacggcaaggcccacuucccccgggagggaguguucgugagcaacggcacccacugguucgugacccagcggaacuucuacgagccucagaucaucaccaccgacaacaccuucgugagcggcaacugcgacguggugaucggcaucgugaacaacaccguguacgacccccugcagcccgagcuggacagcuucaaggaggagcuggacaaguacuucaagaaccacaccagcccagacguggaccugggcgacaucagcggcaucaacgccagcguggugaacauccagaaggagaucgaccggcugaacgagguggccaagaaccugaacgagagccugaucgaccugcaggagcugggcaaguacgagcaguacaucaaguggcccugguacaucuggcugggcuucaucgccggccugaucgccaucgugauggugaccaucaugcugugcugcaugaccagcugcuguagcugccugaagggcugcugcagcugcggcagcugcugcaaguucgacgaggacgacagcgagcccgugcugaagggcgugaagcugcacuacaccugauaauaggcuggagccucgguggccuagcuucuugccccuugggccuccccccagccccuccuccccuuccugcacccguacccccguggucuuugaauaaagucugagugggcggcaaaaaaaaaaaaaaaaaaaaaaaaaaaaaaaaaaaaaaaaaaaaaaaaaaaaaaaaaaaaaaaaaaaaaaaaaaaaaaaaaaaaaaaaaaaaaaaaaaaaucuag

SEQ ID NO: 26657 - RNA, 4094 nt, Artificial Sequence
  SARS-CoV-2/Wuhan/WIV05/2019__EPI_ISL_402128 spike protein mRNA gc (1-1273)(K986P_V987P_H69del_V70del_D614G)
gggaaauaagagagaaaagaagaguaagaagaaauauaagaccccggcgccgccaccauguucguguuccuggugcugcugccccuggugagcagccagugcgugaaccugaccacccggacccagcugcccccugccuacaccaacagcuucacccggggcguguacuaccccgacaagguguuccggagcagcgugcugcacagcacccaggaccuguuccugcccuucuucagcaacgugaccugguuccacgccaucagcggcaccaacggcaccaagcgguucgacaacccagugcugcccuucaacgacggcguguacuucgccagcaccgagaagucaaacaucauccggggcuggaucuucggcaccacccuggacagcaagacacagagccugcugaucgugaacaacgccaccaacguggugaucaaggugugcgaguuucaguucugcaacgaccccuuccugggcguguacuaccacaagaacaacaagagcuggauggagagcgaguuccggguguacagcagcgcuaacaauugcaccuucgaguacgucagccagcccuuccugauggaccucgagggcaagcagggcaacuucaagaaccugcgggaguucguguucaagaacaucgauggcuacuucaagaucuacagcaagcacacccccaucaaccuggugcgggaccugccccagggauucagcgcccuggagccucugguggaccugcccaucggcaucaacaucaccagguuccagacccugcuggcccugcaccggagcuaccugacccccggcgacagcagcagcggcuggaccgccggcgccgccgcauacuacgugggcuaccugcagccacggaccuuccugcugaaguacaacgagaacggcaccaucaccgacgccguggacugcgcccuggacccccugagcgagaccaagugcacccuaaagagcuucaccguggagaagggcaucuaccagaccagcaacuuccgggugcagcccacugagagcaucgugcgguuccccaacauuaccaaccugugucccuucggcgagguguucaacgccacccgguucgccagcguguacgccuggaaccggaagcggaucagcaacugcguggccgacuacagcgugcuguacaacagcgccagcuucagcaccuucaagugcuacggcgugagcccuaccaagcugaacgaccugugcuucaccaacguguacgcugacagcuucgugauccggggcgacgaggugcggcagaucgcccccggccagaccggcaagaucgccgacuacaacuacaagcugcccgacgacuucaccggcugcgugaucgccuggaacagcaacaaccuggacagcaaggugggcggcaacuacaacuaccuguaccggcuguuccguaagagcaaccugaagccauucgagcgggacaucagcaccgagaucuaccaggccggcagcacccccugcaacgguguggagggcuuuaacugcuacuucccccugcagagcuacggcuuccagcccaccaacggcgugggcuaccagcccuaccgggugguggugcugagcuucgagcugcugcacgcccccgccaccgugugcggcccuaaaaagagcaccaaccuggugaagaacaagugcgugaacuucaauuucaacggccugaccggcaccggcgugcugaccgagagcaacaagaaguuccugcccuuccagcaguucggccgggauaucgccgacaccaccgacgcagugcgggacccccagacccuggagauccuggacaucaccccaugcagcuucggcggcgugagcgugaucacccccggcacaaacaccagcaaccaggucgccgugcuguaccagggagugaacugcaccgaggugcccguggccauccacgccgaccagcugacccccaccuggcggguguacagcaccggcagcaacguguuccagacccgggccggcugccugaucggcgccgagcacgugaacaacuccuacgagugcgacauccccaucggcgcuggcaucugcgccagcuaccagacccagaccaacagcccccggcgggcccggagcguggccagccagagcaucaucgccuacaccaugagcuuaggcgccgagaacagcguggccuacagcaacaacagcaucgcgaucccuaccaacuucaccaucagcgugaccaccgagauacugcccgugagcaugaccaagaccagcguggacuguaccauguacaucugcggcgacagcaccgagugcagcaaccugcugcugcaguacggcagcuucugcacccagcugaaccgggcccugaccggcaucgccguggagcaggacaagaacacccaagagguguucgcccaggugaagcagaucuacaagacucccccaaucaaggacuucggcggcuucaacuucagccagauccugcccgaccccagcaagcccagcaagcggagcuucaucgaggaccugcuguucaacaaggugacccuggccgacgccggcuucaucaagcaguacggcgacugccugggggauaucgccgcucgggaccugaucugcgcccagaaguucaacggccugaccgugcugcccccucugcugaccgacgagaugaucgcccaguacaccagcgcccugcuugccggcaccaucaccagcggcuggaccuucggcgccggcgcagcccugcagauccccuucgccaugcagauggccuaccgguucaacggcaucggcgugacccagaacgugcuguacgagaaccagaagcugaucgccaaccaguucaacagcgccaucggcaagauccaggacagccugagcagcaccgccagcgcccugggcaagcugcaggacguggugaaccagaacgcucaggcccugaacacccuggugaagcagcugagcagcaacuucggcgccaucagcucagugcugaaugacauccugagcaggcuggaucccccagaggccgaggugcagaucgaccggcugaucaccggccggcugcagagccugcagaccuacgugacccagcagcugauccgggccgccgagauccgggccagcgccaaccuggcagccaccaagaugagcgagugcgugcugggccagagcaagcggguggacuuuugcggcaagggcuaccaccugaugagcuucccccagagcgcuccccacggcgugguguuccuccacgugacauacgugcccgcccaggagaagaacuucaccaccgcccccgccauuugccacgacggcaaggcccacuucccccgggagggagucuucgugagcaacggcacccacugguucgugacccagcggaacuucuacgagccucagaucaucaccaccgacaacaccuucgugagcggcaacugcgacguggugaucggcaucgugaacaacaccguguacgacccccugcagcccgagcuggacagcuucaaggaggagcuggacaaguacuucaagaaccacaccagcccagacguggaccugggcgacaucagcggcaucaacgccagcguggugaacauccagaaggagaucgaccggcugaacgagguggccaagaaccugaacgagagccugaucgaccugcaggagcugggcaaguacgagcaguacaucaaguggcccugguacaucuggcugggcuucaucgccggccugaucgccaucgugauggugaccaucaugcugugcugcaugaccagcugcuguagcugccugaagggcugcugcagcugcggcagcugcugcaaguucgacgaggacgacagcgagcccgugcugaagggcgugaagcugcacuacaccugauaauaggcuggagccucgguggccuagcuucuugccccuugggccuccccccagccccuccuccccuuccugcacccguacccccguggucuuugaauaaagucugagugggcggcaaaaaaaaaaaaaaaaaaaaaaaaaaaaaaaaaaaaaaaaaaaaaaaaaaaaaaaaaaaaaaaaaaaaaaaaaaaaaaaaaaaaaaaaaaaaaaaaaaaaucuag

SEQ ID NO: 26658 - RNA, 4100 nt, Artificial Sequence
  SARS-CoV-2/Wuhan/WIV05/2019__EPI_ISL_402128 spike protein mRNA gc (1-1273)(K986P_V987P_Y453F_D614G)
gggaaauaagagagaaaagaagaguaagaagaaauauaagaccccggcgccgccaccauguucguguuccuggugcugcugccccuggugagcagccagugcgugaaccugaccacccggacccagcugcccccugccuacaccaacagcuucacccggggcguguacuaccccgacaagguguuccggagcagcgugcugcacagcacccaggaccuguuccugcccuucuucagcaacgugaccugguuccacgccauccacgugagcggcaccaacggcaccaagcgguucgacaacccagugcugcccuucaacgacggcguguacuucgccagcaccgagaagucaaacaucauccggggcuggaucuucggcaccacccuggacagcaagacacagagccugcugaucgugaacaacgccaccaacguggugaucaaggugugcgaguuucaguucugcaacgaccccuuccugggcguguacuaccacaagaacaacaagagcuggauggagagcgaguuccgggucuacagcagcgcuaacaauugcaccuucgaguacgugagccagcccuuccugauggaccucgagggcaagcagggcaacuucaagaaccugcgggaguucguguucaagaacaucgauggcuacuucaagaucuacagcaagcacacccccaucaaccuggugcgggaccugccccagggauucagcgcccuggagccucugguggaccugcccaucggcaucaacaucaccagguuccagacccugcuggcccugcaccggagcuaccugacccccggcgacagcagcagcggcuggaccgccggcgccgccgcauacuacgugggcuaccugcagccacggaccuuccugcugaaguacaacgagaacggcaccaucaccgacgccguggacugcgcccuggacccccugagcgagaccaagugcacccuaaagagcuucaccguggagaagggcaucuaccagaccagcaacuuccgggugcagcccacugagagcaucgugcgguuccccaacauuaccaaccugugucccuucggcgagguguucaacgccacccgguucgccagcguguacgccuggaaccggaagcggaucagcaacugcguggccgacuacagcgugcuguacaacagcgccagcuucagcaccuucaagugcuacggcgugagcccuaccaagcugaacgaccugugcuucaccaacguguacgcugacagcuucgugauccggggcgacgaggugcggcagaucgcccccggccagaccggcaagaucgccgacuacaacuacaagcugcccgacgacuucaccggcugcgugaucgccuggaacagcaacaaccuggacagcaaggugggcggcaacuacaacuaccuguuccggcuguuccguaagagcaaccugaagccauuugagcgggacaucagcaccgagaucuaccaggccggcagcacccccugcaacgguguggagggcuucaacugcuacuucccccugcagagcuacggcuuccagcccaccaacggcgugggcuaccagcccuaccgggugguggugcugagcuucgagcugcugcacgcccccgccaccgugugcggcccuaaaaagagcaccaaccuggugaagaacaagugcgugaacuucaauuucaacggccugaccggcaccggcgugcugaccgagagcaacaagaaguuccugcccuuccagcaguucggccgggauaucgccgacaccaccgacgcagugcgggacccccagacccuggagauccuggacaucaccccaugcagcuucggcggcgugagcgucaucacccccggcacaaacaccagcaaccagguggccgugcuguaccagggagugaacugcaccgaggugcccguggccauccacgccgaccagcugacccccaccuggcggguguacagcaccggcagcaacguguuccagacccgggccggcugccugaucggcgccgagcacgugaacaacuccuacgagugcgacauccccaucggcgcuggcaucugcgccagcuaccagacccagaccaacagcccccggcgggcccggagcguggccagccagagcaucaucgccuacaccaugagcuuaggcgccgagaacagcguggccuacagcaacaacagcaucgcgaucccuaccaacuucaccaucagcgugaccaccgagauacugcccgugagcaugaccaagaccagcguggacuguaccauguacaucugcggcgacagcaccgagugcagcaaccugcugcugcaguacggcagcuucugcacccagcugaaccgggcccugaccggcaucgccguggagcaggacaagaacacccaagagguguucgcccaggugaagcagaucuacaagacucccccaaucaaggacuucggcggcuucaacuucagccagauccugcccgaccccagcaagcccagcaagcggagcuucaucgaggaccugcuguucaacaaggugacccuggccgacgccggcuucaucaagcaguacggcgacugccugggggauaucgccgcucgggaccugaucugcgcccagaaguucaacggccugaccgugcugcccccucugcugaccgacgagaugaucgcccaguacaccagcgcccugcuugccggcaccaucaccagcggcuggaccuucggcgccggcgcagcccugcagauccccuucgccaugcagauggccuaccgguucaacggcaucggcgugacccagaacgugcuguacgagaaccagaagcugaucgccaaccaguucaacagcgccaucggcaagauccaggacagccugagcagcaccgccagcgcccugggcaagcugcaggacguggugaaccagaacgcucaggcccugaacacccuggugaagcagcugagcagcaacuuuggcgccaucagcucagugcugaaugacauccugagcaggcuggaucccccagaggccgaggugcagaucgaccggcugaucaccggccggcugcagagccugcagaccuacgugacccagcagcugauccgggccgccgagauccgggccagcgccaaccuggcagccaccaagaugagcgagugcgugcugggccagagcaagcggguggacuucugcggcaagggcuaccaccugaugagcuucccccagagcgcuccccacggcgugguguuccuccacgugacauacguccccgcccaggagaagaacuucaccaccgcccccgccauuugccacgacggcaaggcccacuucccccgggagggaguguucgugagcaacggcacccacugguucgugacccagcggaacuucuacgagccucagaucaucaccaccgacaacaccuucgugagcggcaacugcgacguggugaucggcaucgugaacaacaccguguacgacccccugcagcccgagcuggacagcuucaaggaggagcuggacaaguacuucaagaaccacaccagcccagacguggaccugggcgacaucagcggcaucaacgccagcguggugaacauccagaaggagaucgaccggcugaacgagguggccaagaaccugaacgagagccugaucgaccugcaggagcugggcaaguacgagcaguacaucaaguggcccugguacaucuggcugggcuucaucgccggccugaucgccaucgugauggugaccaucaugcugugcugcaugaccagcugcuguagcugccugaagggcugcugcagcugcggcagcugcugcaaguucgacgaggacgacagcgagcccgugcugaagggcgugaagcugcacuacaccugauaauaggcuggagccucgguggccuagcuucuugccccuugggccuccccccagccccuccuccccuuccugcacccguacccccguggucuuugaauaaagucugagugggcggcaaaaaaaaaaaaaaaaaaaaaaaaaaaaaaaaaaaaaaaaaaaaaaaaaaaaaaaaaaaaaaaaaaaaaaaaaaaaaaaaaaaaaaaaaaaaaaaaaaaaucuag

SEQ ID NO: 26659 - RNA, 4100 nt, Artificial Sequence
  SARS-CoV-2/Wuhan/WIV05/2019__EPI_ISL_402128 spike protein mRNA gc (1-1273)(K986P_V987P_D614G_I692V)
gggaaauaagagagaaaagaagaguaagaagaaauauaagaccccggcgccgccaccauguucguguuccuggugcugcugccccuggugagcagccagugcgugaaccugaccacccggacccagcugcccccugccuacaccaacagcuucacccggggcguguacuaccccgacaagguguuccggagcagcgugcugcacagcacccaggaccuguuccugcccuucuucagcaacgugaccugguuccacgccauccacgugagcggcaccaacggcaccaagcgguucgacaacccagugcugcccuucaacgacggcguguacuucgccagcaccgagaagucaaacaucauccggggcuggaucuucggcaccacccuggacagcaagacacagagccugcugaucgugaacaacgccaccaacguggugaucaaggugugcgaguuucaguucugcaacgaccccuuccugggcguguacuaccacaagaacaacaagagcuggauggagagcgaguuccgggucuacagcagcgcuaacaauugcaccuucgaguacgugagccagcccuuccugauggaccucgagggcaagcagggcaacuucaagaaccugcgggaguucguguucaagaacaucgauggcuacuucaagaucuacagcaagcacacccccaucaaccuggugcgggaccugccccagggauucagcgcccuggagccucugguggaccugcccaucggcaucaacaucaccagguuccagacccugcuggcccugcaccggagcuaccugacccccggcgacagcagcagcggcuggaccgccggcgccgccgcauacuacgugggcuaccugcagccacggaccuuccugcugaaguacaacgagaacggcaccaucaccgacgccguggacugcgcccuggacccccugagcgagaccaagugcacccuaaagagcuucaccguggagaagggcaucuaccagaccagcaacuuccgggugcagcccacugagagcaucgugcgguuccccaacauuaccaaccugugucccuucggcgagguguucaacgccacccgguucgccagcguguacgccuggaaccggaagcggaucagcaacugcguggccgacuacagcgugcuguacaacagcgccagcuucagcaccuucaagugcuacggcgugagcccuaccaagcugaacgaccugugcuucaccaacguguacgcugacagcuucgugauccggggcgacgaggugcggcagaucgcccccggccagaccggcaagaucgccgacuacaacuacaagcugcccgacgacuucaccggcugcgugaucgccuggaacagcaacaaccuggacagcaaggugggcggcaacuacaacuaccuguaccggcuguuccguaagagcaaccugaagccauucgagcgggacaucagcaccgagaucuaccaggccggcagcacccccugcaacgguguggagggcuuuaacugcuacuucccccugcagagcuacggcuuccagcccaccaacggcgugggcuaccagcccuaccgggugguggugcugagcuucgagcugcugcacgcccccgccaccgugugcggcccuaaaaagagcaccaaccuggugaagaacaagugcgugaacuucaauuucaacggccugaccggcaccggcgugcugaccgagagcaacaagaaguuccugcccuuccagcaguucggccgggauaucgccgacaccaccgacgcagugcgggacccccagacccuggagauccuggacaucaccccaugcagcuucggcggcgugagcgucaucacccccggcacaaacaccagcaaccagguggccgugcuguaccagggagugaacugcaccgaggugcccguggccauccacgccgaccagcugacccccaccuggcggguguacagcaccggcagcaacguguuccagacccgggccggcugccugaucggcgccgagcacgugaacaacuccuacgagugcgacauccccaucggcgcuggcaucugcgccagcuaccagacccagaccaacagcccccggcgggcccggagcguggccagccagagcgugaucgccuacaccaugagcuuaggcgccgagaacagcguggccuacagcaacaacagcaucgcgaucccuaccaacuucaccaucagcgugaccaccgagauccugcccgugagcaugaccaagaccagcguggacuguaccauguacauaugcggcgacagcaccgagugcagcaaccugcugcugcaguacggcagcuucugcacccagcugaaccgggcccugaccggcaucgccguggagcaggacaagaacacccaagagguguucgcccaggugaagcagaucuacaagacucccccaaucaaggacuucggcggcuucaacuucagccagauccugcccgaccccagcaagcccagcaagcggagcuucaucgaggaccugcuguucaacaaggugacccuggccgacgccggcuucaucaagcaguacggcgacugccugggggauaucgccgcucgggaccugaucugcgcccagaaguucaacggccugaccgugcugcccccucugcugaccgacgagaugaucgcccaguacaccagcgcccugcuugccggcaccaucaccagcggcuggaccuucggcgccggcgcagcccugcagauccccuucgccaugcagauggccuaccgguucaacggcaucggcgugacccagaacgugcuguacgagaaccagaagcugaucgccaaccaguucaacagcgccaucggcaagauccaggacagccugagcagcaccgccagcgcccugggcaagcugcaggacguggugaaccagaacgcucaggcccugaacacccuggugaagcagcugagcagcaacuucggcgccaucagcucagugcugaaugacauccugagcaggcuggaucccccagaggccgaggugcagaucgaccggcugaucaccggccggcugcagagccugcagaccuacgugacccagcagcugauccgggccgccgagauccgggccagcgccaaccuggcagccaccaagaugagcgagugcgugcugggccagagcaagcggguggacuuuugcggcaagggcuaccaccugaugagcuucccccagagcgcuccccacggcgugguguuccuccacgucacauacgugcccgcccaggagaagaacuucaccaccgcccccgccaucugccacgacggcaaggcccacuucccccgggagggaguguucgugagcaacggcacccacugguucgugacccagcggaacuucuacgagccucagauuaucaccaccgacaacaccuucgugagcggcaacugcgacguggugaucggcaucgugaacaacaccguguacgacccccugcagcccgagcuggacagcuucaaggaggagcuggacaaguacuucaagaaccacaccagcccagacguggaccugggcgacaucagcggcaucaacgccagcguggugaacauccagaaggagaucgaccggcugaacgagguggccaagaaccugaacgagagccugaucgaccugcaggagcugggcaaguacgagcaguacaucaaguggcccugguacaucuggcugggcuucaucgccggccugaucgccaucgugauggugaccaucaugcugugcugcaugaccagcugcuguagcugccugaagggcugcugcagcugcggcagcugcugcaaguucgacgaggacgacagcgagcccgugcugaagggcgugaagcugcacuacaccugauaauaggcuggagccucgguggccuagcuucuugccccuugggccuccccccagccccuccuccccuuccugcacccguacccccguggucuuugaauaaagucugagugggcggcaaaaaaaaaaaaaaaaaaaaaaaaaaaaaaaaaaaaaaaaaaaaaaaaaaaaaaaaaaaaaaaaaaaaaaaaaaaaaaaaaaaaaaaaaaaaaaaaaaaaucuag

SEQ ID NO: 26660 - RNA, 4100 nt, Artificial Sequence
  SARS-CoV-2/Wuhan/WIV05/2019__EPI_ISL_402128 spike protein mRNA gc (1-1273)(K986P_V987P_D614G_M1229I)
gggaaauaagagagaaaagaagaguaagaagaaauauaagaccccggcgccgccaccauguucguguuccuggugcugcugccccuggugagcagccagugcgugaaccugaccacccggacccagcugcccccugccuacaccaacagcuucacccggggcguguacuaccccgacaagguguuccggagcagcgugcugcacagcacccaggaccuguuccugcccuucuucagcaacgugaccugguuccacgccauccacgugagcggcaccaacggcaccaagcgguucgacaacccagugcugcccuucaacgacggcguguacuucgccagcaccgagaagucaaacaucauccggggcuggaucuucggcaccacccuggacagcaagacacagagccugcugaucgugaacaacgccaccaacguggugaucaaggugugcgaguuucaguucugcaacgaccccuuccugggcguguacuaccacaagaacaacaagagcuggauggagagcgaguuccgggucuacagcagcgcuaacaauugcaccuucgaguacgugagccagcccuuccugauggaccucgagggcaagcagggcaacuucaagaaccugcgggaguucguguucaagaacaucgauggcuacuucaagaucuacagcaagcacacccccaucaaccuggugcgggaccugccccagggauucagcgcccuggagccucugguggaccugcccaucggcaucaacaucaccagguuccagacccugcuggcccugcaccggagcuaccugacccccggcgacagcagcagcggcuggaccgccggcgccgccgcauacuacgugggcuaccugcagccacggaccuuccugcugaaguacaacgagaacggcaccaucaccgacgccguggacugcgcccuggacccccugagcgagaccaagugcacccuaaagagcuucaccguggagaagggcaucuaccagaccagcaacuuccgggugcagcccacugagagcaucgugcgguuccccaacauuaccaaccugugucccuucggcgagguguucaacgccacccgguucgccagcguguacgccuggaaccggaagcggaucagcaacugcguggccgacuacagcgugcuguacaacagcgccagcuucagcaccuucaagugcuacggcgugagcccuaccaagcugaacgaccugugcuucaccaacguguacgcugacagcuucgugauccggggcgacgaggugcggcagaucgcccccggccagaccggcaagaucgccgacuacaacuacaagcugcccgacgacuucaccggcugcgugaucgccuggaacagcaacaaccuggacagcaaggugggcggcaacuacaacuaccuguaccggcuguuccguaagagcaaccugaagccauucgagcgggacaucagcaccgagaucuaccaggccggcagcacccccugcaacgguguggagggcuuuaacugcuacuucccccugcagagcuacggcuuccagcccaccaacggcgugggcuaccagcccuaccgggugguggugcugagcuucgagcugcugcacgcccccgccaccgugugcggcccuaaaaagagcaccaaccuggugaagaacaagugcgugaacuucaauuucaacggccugaccggcaccggcgugcugaccgagagcaacaagaaguuccugcccuuccagcaguucggccgggauaucgccgacaccaccgacgcagugcgggacccccagacccuggagauccuggacaucaccccaugcagcuucggcggcgugagcgucaucacccccggcacaaacaccagcaaccagguggccgugcuguaccagggagugaacugcaccgaggugcccguggccauccacgccgaccagcugacccccaccuggcggguguacagcaccggcagcaacguguuccagacccgggccggcugccugaucggcgccgagcacgugaacaacuccuacgagugcgacauccccaucggcgcuggcaucugcgccagcuaccagacccagaccaacagcccccggcgggcccggagcguggccagccagagcaucaucgccuacaccaugagcuuaggcgccgagaacagcguggccuacagcaacaacagcaucgcgaucccuaccaacuucaccaucagcgugaccaccgagauacugcccgugagcaugaccaagaccagcguggacuguaccauguacaucugcggcgacagcaccgagugcagcaaccugcugcugcaguacggcagcuucugcacccagcugaaccgggcccugaccggcaucgccguggagcaggacaagaacacccaagagguguucgcccaggugaagcagaucuacaagacucccccaaucaaggacuucggcggcuucaacuucagccagauccugcccgaccccagcaagcccagcaagcggagcuucaucgaggaccugcuguucaacaaggugacccuggccgacgccggcuucaucaagcaguacggcgacugccugggggauaucgccgcucgggaccugaucugcgcccagaaguucaacggccugaccgugcugcccccucugcugaccgacgagaugaucgcccaguacaccagcgcccugcuugccggcaccaucaccagcggcuggaccuucggcgccggcgcagcccugcagauccccuucgccaugcagauggccuaccgguucaacggcaucggcgugacccagaacgugcuguacgagaaccagaagcugaucgccaaccaguucaacagcgccaucggcaagauccaggacagccugagcagcaccgccagcgcccugggcaagcugcaggacguggugaaccagaacgcucaggcccugaacacccuggugaagcagcugagcagcaacuucggcgccaucagcucagugcugaaugacauccugagcaggcuggaucccccagaggccgaggugcagaucgaccggcugaucaccggccggcugcagagccugcagaccuacgugacccagcagcugauccgggccgccgagauccgggccagcgccaaccuggcagccaccaagaugagcgagugcgugcugggccagagcaagcggguggacuuuugcggcaagggcuaccaccugaugagcuucccccagagcgcuccccacggcgugguguuccuccacgugacauacguccccgcccaggagaagaacuucaccaccgcccccgccauuugccacgacggcaaggcccacuucccccgggagggaguguucgugagcaacggcacccacugguucgugacccagcggaacuucuacgagccucagaucaucaccaccgacaacaccuucgugagcggcaacugcgacguggugaucggcaucgugaacaacaccguguacgacccccugcagcccgagcuggacagcuucaaggaggagcuggacaaguacuucaagaaccacaccagcccagacguggaccugggcgacaucagcggcaucaacgccagcguggugaacauccagaaggagaucgaccggcugaacgagguggccaagaaccugaacgagagccugaucgaccugcaggagcugggcaaguacgagcaguacaucaaguggcccugguacaucuggcugggcuucaucgccggccugaucgccaucgugaucgugaccaucaugcugugcugcaugaccagcugcuguagcugccugaagggcugcugcagcugcggcagcugcugcaaguucgacgaggacgacagcgagcccgugcugaagggcgugaagcugcacuacaccugauaauaggcuggagccucgguggccuagcuucuugccccuugggccuccccccagccccuccuccccuuccugcacccguacccccguggucuuugaauaaagucugagugggcggcaaaaaaaaaaaaaaaaaaaaaaaaaaaaaaaaaaaaaaaaaaaaaaaaaaaaaaaaaaaaaaaaaaaaaaaaaaaaaaaaaaaaaaaaaaaaaaaaaaaaucuag

SEQ ID NO: 26661 - RNA, 4094 nt, Artificial Sequence
  SARS-CoV-2/Wuhan/WIV05/2019__EPI_ISL_402128 spike protein mRNA gc (1-1273)(K986P_V987P_H69del_V70del_A222V_Y453F_S477N_D614G_I692V)
gggaaauaagagagaaaagaagaguaagaagaaauauaagaccccggcgccgccaccauguucguguuccuggugcugcugccccuggugagcagccagugcgugaaccugaccacccggacccagcugcccccugccuacaccaacagcuucacccggggcguguacuaccccgacaagguguuccggagcagcgugcugcacagcacccaggaccuguuccugcccuucuucagcaacgugaccugguuccacgccaucagcggcaccaacggcaccaagcgguucgacaacccagugcugcccuucaacgacggcguguacuucgccagcaccgagaagucaaacaucauccggggcuggaucuucggcaccacccuggacagcaagacacagagccugcugaucgugaacaacgccaccaacguggugaucaaggugugcgaguuucaguucugcaacgaccccuuccugggcguguacuaccacaagaacaacaagagcuggauggagagcgaguuccggguguacagcagcgcuaacaauugcaccuucgaguacgucagccagcccuuccugauggaccucgagggcaagcagggcaacuucaagaaccugcgggaguucguguucaagaacaucgauggcuacuucaagaucuacagcaagcacacccccaucaaccuggugcgggaccugccccagggauucagcgugcuggagccucugguggaccugcccaucggcaucaacaucaccagguuccagacccugcuggcccugcaccggagcuaccugacccccggcgacagcagcagcggcuggaccgccggcgccgccgccuacuacgugggcuaccugcagccacggaccuuccugcugaaguacaacgagaacggcaccaucaccgacgcaguggacugcgcccuggacccccugagcgagaccaagugcacccuaaagagcuucaccguggagaagggcaucuaccagaccagcaacuuccgggugcagcccacugagagcaucgugcgguuccccaacauuaccaaccugugucccuucggcgagguguucaacgccacccgguucgccagcguguacgccuggaaccggaagcggaucagcaacugcguggccgacuacagcgugcuguacaacagcgccagcuucagcaccuucaagugcuacggcgugagcccuaccaagcugaacgaccugugcuucaccaacguguacgccgacagcuucgugauccggggcgacgaggugcggcagaucgcucccggccagaccggcaagaucgccgacuacaacuacaagcugcccgacgacuucaccggcugcgugaucgccuggaacagcaacaaccuggacagcaaggugggcggcaacuacaacuaccuguuccggcuguuccguaagagcaaccugaagccauuugagcgggacaucagcaccgagaucuaccaggccggcaacacccccugcaacgguguggagggcuucaacugcuacuucccccugcagagcuacggcuuccagcccaccaacggcgugggcuaccagcccuaccgggugguggugcugagcuucgagcugcugcacgcccccgccaccgugugcggcccuaaaaagagcaccaaccuggugaagaacaagugcgugaauuucaacuucaacggccugaccggcaccggcgugcugaccgagagcaacaagaaguuccugcccuuccagcaguucggccgggauaucgccgacaccaccgacgccgugcgggacccccagacccuggagauccuggacaucaccccaugcagcuucggcggcgugagcgucaucacccccggcacaaacaccagcaaccagguggcagugcuguaccagggagugaacugcaccgaggugcccguggccauccacgccgaccagcugacccccaccuggcggguguacagcaccggcagcaacguguuccagacccgggccggcugccugaucggcgccgagcacgugaacaacagcuacgagugcgacauccccaucggcgccggcaucugcgcuuccuaccagacccagaccaacagcccccggcgggcccggagcguggccagccagagcgugaucgccuacaccaugagcuuaggcgccgagaacagcguggccuacagcaacaacagcaucgccaucccuaccaacuucaccaucagcgugaccaccgagauccugcccgugagcaugaccaagaccagcguggacuguaccauguacauaugcggcgacagcaccgagugcagcaaccugcugcugcaguacggcagcuucugcacccagcugaaccgggcgcugaccggcaucgccguggagcaggacaagaacacccaagagguguucgcccaggugaagcagaucuacaagacucccccaaucaaggacuucggcggcuucaacuucagccagauccugcccgaccccagcaagcccagcaagcggagcuucaucgaggaccugcuguucaacaaggugacccuggccgacgccggcuucaucaagcaguacggcgacugccugggggauaucgccgcccgggaccugaucugcgcucagaaguucaacggccugaccgugcugcccccucugcugaccgacgagaugaucgcccaguacaccagcgcccugcuugccggcaccaucaccagcggcuggaccuucggcgccggcgccgcacugcagauccccuucgccaugcagauggccuaccgguucaacggcaucggcgugacccagaacgugcuguacgagaaccagaagcugaucgccaaccaguucaacagcgccaucggcaagauccaggacagccugagcagcaccgccagcgcccugggcaagcugcaggacguggugaaccagaacgcccaggcucugaacacccuggugaagcagcugagcagcaauuuuggcgccaucagcagcgugcugaacgacauccugucaaggcuggaucccccagaggccgaggugcagaucgaccggcugaucaccggccggcugcagagccugcagaccuacgugacccagcagcugauccgggccgccgagauccgggccagcgccaaccuggccgcaaccaagaugagcgagugcgugcugggccagagcaagcggguggacuucugcggcaagggcuaccaccugaugagcuucccccagagcgcuccccacggcgugguguuccuccacgucacauacgugcccgcccaggagaagaacuucaccaccgcccccgccaucugccacgacggcaaggcccacuucccccgggagggaguguucgugagcaacggcacccacugguucgugacccagcggaacuucuacgagccucagauuaucaccaccgacaacaccuucgugagcggcaacugcgacguggugaucggcaucgugaacaacaccguguacgacccccugcagcccgagcuggacagcuucaaggaggagcuggacaaguacuucaagaaccacaccagcccagacguggaccugggcgacaucagcggcaucaacgccagcguggugaacauccagaaggagaucgaccggcugaacgagguggccaagaaccugaacgagagccugaucgaccugcaggagcugggcaaguacgagcaguacaucaaguggcccugguacaucuggcugggcuucaucgccggccugaucgccaucgugauggugaccaucaugcugugcugcaugaccagcugcuguagcugccugaagggcugcugcagcugcggcagcugcugcaaguucgacgaggacgacagcgagcccgugcugaagggcgugaagcugcacuacaccugauaauaggcuggagccucgguggccuagcuucuugccccuugggccuccccccagccccuccuccccuuccugcacccguacccccguggucuuugaauaaagucugagugggcggcaaaaaaaaaaaaaaaaaaaaaaaaaaaaaaaaaaaaaaaaaaaaaaaaaaaaaaaaaaaaaaaaaaaaaaaaaaaaaaaaaaaaaaaaaaaaaaaaaaaaucuag

SEQ ID NO: 26662 - RNA, 4094 nt, Artificial Sequence
  SARS-CoV-2/Wuhan/WIV05/2019__EPI_ISL_402128 spike protein mRNA gc (1-1273)(K986P_V987P_H69del_V70del_Y453F_D614G_I692V_M1229I)
gggaaauaagagagaaaagaagaguaagaagaaauauaagaccccggcgccgccaccauguucguguuccuggugcugcugccccuggugagcagccagugcgugaaccugaccacccggacccagcugcccccugccuacaccaacagcuucacccggggcguguacuaccccgacaagguguuccggagcagcgugcugcacagcacccaggaccuguuccugcccuucuucagcaacgugaccugguuccacgccaucagcggcaccaacggcaccaagcgguucgacaacccagugcugcccuucaacgacggcguguacuucgccagcaccgagaagucaaacaucauccggggcuggaucuucggcaccacccuggacagcaagacacagagccugcugaucgugaacaacgccaccaacguggugaucaaggugugcgaguuucaguucugcaacgaccccuuccugggcguguacuaccacaagaacaacaagagcuggauggagagcgaguuccggguguacagcagcgcuaacaauugcaccuucgaguacgucagccagcccuuccugauggaccucgagggcaagcagggcaacuucaagaaccugcgggaguucguguucaagaacaucgauggcuacuucaagaucuacagcaagcacacccccaucaaccuggugcgggaccugccccagggauucagcgcccuggagccucugguggaccugcccaucggcaucaacaucaccagguuccagacccugcuggcccugcaccggagcuaccugacccccggcgacagcagcagcggcuggaccgccggcgccgccgcauacuacgugggcuaccugcagccacggaccuuccugcugaaguacaacgagaacggcaccaucaccgacgccguggacugcgcccuggacccccugagcgagaccaagugcacccuaaagagcuucaccguggagaagggcaucuaccagaccagcaacuuccgggugcagcccacugagagcaucgugcgguuccccaacauuaccaaccugugucccuucggcgagguguucaacgccacccgguucgccagcguguacgccuggaaccggaagcggaucagcaacugcguggccgacuacagcgugcuguacaacagcgccagcuucagcaccuucaagugcuacggcgugagcccuaccaagcugaacgaccugugcuucaccaacguguacgcugacagcuucgugauccggggcgacgaggugcggcagaucgcccccggccagaccggcaagaucgccgacuacaacuacaagcugcccgacgacuucaccggcugcgugaucgccuggaacagcaacaaccuggacagcaaggugggcggcaacuacaacuaccuguuccggcuguuccguaagagcaaccugaagccauuugagcgggacaucagcaccgagaucuaccaggccggcagcacccccugcaacgguguggagggcuucaacugcuacuucccccugcagagcuacggcuuccagcccaccaacggcgugggcuaccagcccuaccgggugguggugcugagcuucgagcugcugcacgcccccgccaccgugugcggcccuaaaaagagcaccaaccuggugaagaacaagugcgugaacuucaauuucaacggccugaccggcaccggcgugcugaccgagagcaacaagaaguuccugcccuuccagcaguucggccgggauaucgccgacaccaccgacgcagugcgggacccccagacccuggagauccuggacaucaccccaugcagcuucggcggcgugagcgugaucacccccggcacaaacaccagcaaccaggucgccgugcuguaccagggagugaacugcaccgaggugcccguggccauccacgccgaccagcugacccccaccuggcggguguacagcaccggcagcaacguguuccagacccgggccggcugccugaucggcgccgagcacgugaacaacuccuacgagugcgacauccccaucggcgcuggcaucugcgccagcuaccagacccagaccaacagcccccggcgggcccggagcguggccagccagagcgugaucgccuacaccaugagcuuaggcgccgagaacagcguggccuacagcaacaacagcaucgcgaucccuaccaacuucaccaucagcgugaccaccgagauccugcccgugagcaugaccaagaccagcguggacuguaccauguacauaugcggcgacagcaccgagugcagcaaccugcugcugcaguacggcagcuucugcacccagcugaaccgggcccugaccggcaucgccguggagcaggacaagaacacccaagagguguucgcccaggugaagcagaucuacaagacucccccaaucaaggacuucggcggcuucaacuucagccagauccugcccgaccccagcaagcccagcaagcggagcuucaucgaggaccugcuguucaacaaggugacccuggccgacgccggcuucaucaagcaguacggcgacugccugggggauaucgccgcucgggaccugaucugcgcccagaaguucaacggccugaccgugcugcccccucugcugaccgacgagaugaucgcccaguacaccagcgcccugcuugccggcaccaucaccagcggcuggaccuucggcgccggcgcagcccugcagauccccuucgccaugcagauggccuaccgguucaacggcaucggcgugacccagaacgugcuguacgagaaccagaagcugaucgccaaccaguucaacagcgccaucggcaagauccaggacagccugagcagcaccgccagcgcccugggcaagcugcaggacguggugaaccagaacgcucaggcccugaacacccuggugaagcagcugagcagcaacuuuggcgccaucagcucagugcugaaugacauccugagcaggcuggaucccccagaggccgaggugcagaucgaccggcugaucaccggccggcugcagagccugcagaccuacgugacccagcagcugauccgggccgccgagauccgggccagcgccaaccuggcagccaccaagaugagcgagugcgugcugggccagagcaagcggguggacuucugcggcaagggcuaccaccugaugagcuucccccagagcgcuccccacggcgugguguuccuccacgugacauacguccccgcccaggagaagaacuucaccaccgcccccgccaucugccacgacggcaaggcccacuucccccgggagggaguguucgugagcaacggcacccacugguucgugacccagcggaacuucuacgagccucagauuaucaccaccgacaacaccuucgugagcggcaacugcgacguggugaucggcaucgugaacaacaccguguacgacccccugcagcccgagcuggacagcuucaaggaggagcuggacaaguacuucaagaaccacaccagcccagacguggaccugggcgacaucagcggcaucaacgccagcguggugaacauccagaaggagaucgaccggcugaacgagguggccaagaaccugaacgagagccugaucgaccugcaggagcugggcaaguacgagcaguacaucaaguggcccugguacaucuggcugggcuucaucgccggccugaucgccaucgugaucgugaccaucaugcugugcugcaugaccagcugcuguagcugccugaagggcugcugcagcugcggcagcugcugcaaguucgacgaggacgacagcgagcccgugcugaagggcgugaagcugcacuacaccugauaauaggcuggagccucgguggccuagcuucuugccccuugggccuccccccagccccuccuccccuuccugcacccguacccccguggucuuugaauaaagucugagugggcggcaaaaaaaaaaaaaaaaaaaaaaaaaaaaaaaaaaaaaaaaaaaaaaaaaaaaaaaaaaaaaaaaaaaaaaaaaaaaaaaaaaaaaaaaaaaaaaaaaaaaucuag

SEQ ID NO: 26663 - RNA, 4091 nt, Artificial Sequence
  SARS-CoV-2/Wuhan/WIV05/2019__EPI_ISL_402128 spike protein mRNA gc (1-1273)(K986P_V987P_K986P_V987P_H69del_V70del_Y144del_N501Y_A570 D_D614G_P681H_T716I_S982A_D1118H)
gggaaauaagagagaaaagaagaguaagaagaaauauaagaccccggcgccgccaccauguucguguuccuggugcugcugccccuggugagcagccagugcgugaaccugaccacccggacccagcugcccccugccuacaccaacagcuucacccggggcguguacuaccccgacaagguguuccggagcagcgugcugcacagcacccaggaccuguuccugcccuucuucagcaacgugaccugguuccacgccaucagcggcaccaacggcaccaagcgguucgacaacccagugcugcccuucaacgacggcguguacuucgccagcaccgagaagucaaacaucauccggggcuggaucuucggcaccacccuggacagcaagacacagagccugcugaucgugaacaacgccaccaacguggugaucaaggugugcgaguuucaguucugcaacgaccccuuccugggcguguaccacaagaacaacaagagcuggauggagagcgaguuccggguguacagcagcgcuaacaauugcaccuucgaguacgucagccagcccuuccugauggaccucgagggcaagcagggcaacuucaagaaccugcgggaguucguguucaagaacaucgauggcuacuucaagaucuacagcaagcacacccccaucaaccuggugcgggaccugccccagggauucagcgcccuggagccucugguggaccugcccaucggcaucaacaucaccagguuccagacccugcuggcccugcaccggagcuaccugacccccggcgacagcagcagcggcuggaccgccggcgccgccgcauacuacgugggcuaccugcagccacggaccuuccugcugaaguacaacgagaacggcaccaucaccgacgccguggacugcgcccuggacccccugagcgagaccaagugcacccuaaagagcuucaccguggagaagggcaucuaccagaccagcaacuuccgggugcagcccacugagagcaucgugcgguuccccaacauuaccaaccugugucccuucggcgagguguucaacgccacccgguucgccagcguguacgccuggaaccggaagcggaucagcaacugcguggccgacuacagcgugcuguacaacagcgccagcuucagcaccuucaagugcuacggcgugagcccuaccaagcugaacgaccugugcuucaccaacguguacgcugacagcuucgugauccggggcgacgaggugcggcagaucgcccccggccagaccggcaagaucgccgacuacaacuacaagcugcccgacgacuucaccggcugcgugaucgccuggaacagcaacaaccuggacagcaaggugggcggcaacuacaacuaccuguaccggcuguuccguaagagcaaccugaagccauucgagcgggacaucagcaccgagaucuaccaggccggcagcacccccugcaacgguguggagggcuuuaacugcuacuucccccugcagagcuacggcuuccagcccaccuacggcgugggcuaccagcccuaccgggugguggugcugagcuucgagcugcugcacgcccccgccaccgugugcggcccuaaaaagagcaccaaccuggugaagaacaagugcgugaacuucaacuucaauggccugaccggcaccggcgugcugaccgagagcaacaagaaguuccugcccuuccagcaguucggccgggauaucgacgacaccaccgacgccgugcgggacccccagacccuggagauccuggacaucaccccaugcagcuucggcggcgugagcgugaucacccccggcacaaacaccagcaaccaggucgcagugcuguaccagggagugaacugcaccgaggugcccguggccauccacgccgaccagcugacccccaccuggcggguguacagcaccggcagcaacguguuccagacccgggccggcugccugaucggcgccgagcacgugaacaacuccuacgagugcgacauccccaucggcgccggcaucugcgcuagcuaccagacccagaccaacagccaccggcgggcccggagcguggccagccagagcaucaucgccuacaccaugagcuuaggcgccgagaacagcguggccuacagcaacaacagcaucgccauccccaucaacuucaccauaagcgugaccaccgagauccugccugugagcaugaccaagaccagcguggacuguaccauguacaucugcggcgacagcaccgagugcagcaaccugcugcugcaguacggcagcuucugcacccagcugaaccgggcgcugaccggcaucgccguggagcaggacaagaacacccaagagguguucgcccaggugaagcagaucuacaagaccccacccaucaaggacuucggcggcuucaacuucagccagauccugcccgaccccagcaagcccagcaagcggagcuucaucgaggaccugcuguucaacaaggugacucuggccgacgccggcuucaucaagcaguacggcgauugccugggggacaucgccgcccgggaccugaucugcgcucagaaguucaacggccugaccgugcugccuccccugcugaccgacgagaugaucgcccaguacaccagcgcccugcuugccggcaccaucaccagcggcuggaccuucggcgccggcgccgcacugcagauccccuucgccaugcagauggccuaccgguucaacggcaucggcgugacccagaacgugcuguacgagaaccagaagcugaucgccaaccaguucaacagcgccaucggcaagauccaggacagccugagcagcaccgccagcgcccugggcaagcugcaggacguggugaaccagaacgcccaggcucugaacacccuggugaagcagcugagcagcaacuucggcgccaucagcucagugcugaacgacauccuggccaggcuggacccacccgaggccgaggugcagaucgaccggcugaucaccggccggcugcagagccugcagaccuacgugacccagcagcugauccgggccgccgagauucgggccagcgccaaucuggcagccaccaagaugagcgagugcgugcugggccagagcaagcggguggacuuuugcggcaagggcuaccaccugaugagcuucccccagagcgcuccccacggcgugguguuccuccacgugaccuacgugcccgcccaggagaagaacuucacaaccgcccccgccaucugccacgacggcaaggcccacuucccccgggagggagucuucgugagcaacggcacccacugguucgugacccagcggaacuucuacgagccccagaucaucaccacccacaacaccuucgugagcggcaacugcgacguggugaucggcaucgugaacaacaccguguacgacccucugcagcccgagcuggacagcuucaaggaggagcuggacaaguacuucaagaaccacaccagccccgacguggaucugggcgacaucagcggcaucaacgccagcguggugaacauccagaaggagaucgaccggcugaacgagguggccaagaaccugaacgagagccugaucgaccugcaggagcugggcaaguacgagcaguacaucaaguggccaugguacaucuggcugggcuucaucgccggccugaucgccaucgugauggugaccaucaugcugugcugcaugaccagcugcuguagcugccugaagggcugcugcagcugcggcagcugcugcaaguucgacgaggacgacagcgagcccgugcugaagggcgugaagcugcacuacaccugauaauaggcuggagccucgguggccuagcuucuugccccuugggccuccccccagccccuccuccccuuccugcacccguacccccguggucuuugaauaaagucugagugggcggcaaaaaaaaaaaaaaaaaaaaaaaaaaaaaaaaaaaaaaaaaaaaaaaaaaaaaaaaaaaaaaaaaaaaaaaaaaaaaaaaaaaaaaaaaaaaaaaaaaaaucuag

SEQ ID NO: 26664 - RNA, 4100 nt, Artificial Sequence
  SARS-CoV-2/Wuhan/WIV05/2019__EPI_ISL_402128 spike protein mRNA gc (1-1273)(K986P_V987P_K986P_V987P_K417N_E484K_N501Y_D614G)
gggaaauaagagagaaaagaagaguaagaagaaauauaagaccccggcgccgccaccauguucguguuccuggugcugcugccccuggugagcagccagugcgugaaccugaccacccggacccagcugcccccugccuacaccaacagcuucacccggggcguguacuaccccgacaagguguuccggagcagcgugcugcacagcacccaggaccuguuccugcccuucuucagcaacgugaccugguuccacgccauccacgugagcggcaccaacggcaccaagcgguucgacaacccagugcugcccuucaacgacggcguguacuucgccagcaccgagaagucaaacaucauccggggcuggaucuucggcaccacccuggacagcaagacacagagccugcugaucgugaacaacgccaccaacguggugaucaaggugugcgaguuucaguucugcaacgaccccuuccugggcguguacuaccacaagaacaacaagagcuggauggagagcgaguuccgggucuacagcagcgcuaacaauugcaccuucgaguacgugagccagcccuuccugauggaccucgagggcaagcagggcaacuucaagaaccugcgggaguucguguucaagaacaucgauggcuacuucaagaucuacagcaagcacacccccaucaaccuggugcgggaccugccccagggauucagcgcccuggagccucugguggaccugcccaucggcaucaacaucaccagguuccagacccugcuggcccugcaccggagcuaccugacccccggcgacagcagcagcggcuggaccgccggcgccgccgcauacuacgugggcuaccugcagccacggaccuuccugcugaaguacaacgagaacggcaccaucaccgacgccguggacugcgcccuggacccccugagcgagaccaagugcacccuaaagagcuucaccguggagaagggcaucuaccagaccagcaacuuccgggugcagcccacugagagcaucgugcgguuccccaacauuaccaaccugugucccuucggcgagguguucaacgccacccgguucgccagcguguacgccuggaaccggaagcggaucagcaacugcguggccgacuacagcgugcuguacaacagcgccagcuucagcaccuucaagugcuacggcgugagcccuaccaagcugaacgaccugugcuucaccaacguguacgcugacagcuucgugauccggggcgacgaggugcggcagaucgcccccggccagaccggcaacaucgccgacuacaacuacaagcugcccgacgacuucaccggcugcgugaucgccuggaacagcaacaaccuggacagcaaggugggcggcaacuacaacuaccuguaccggcuguuccguaagagcaaccugaagccauucgagcgggacaucagcaccgagaucuaccaggccggcagcacccccugcaacggugugaagggcuuuaacugcuacuucccccugcagagcuacggcuuccagcccaccuacggcgugggcuaccagcccuaccgggugguggugcugagcuucgagcugcugcacgcccccgccaccgugugcggcccuaaaaagagcaccaaccuggugaagaacaagugcgugaacuucaauuucaacggccugaccggcaccggcgugcugaccgagagcaacaagaaguuccugcccuuccagcaguucggccgggauaucgccgacaccaccgacgcagugcgggacccccagacccuggagauccuggacaucaccccaugcagcuucggcggcgugagcgucaucacccccggcacaaacaccagcaaccagguggccgugcuguaccagggagugaacugcaccgaggugcccguggccauccacgccgaccagcugacccccaccuggcggguguacagcaccggcagcaacguguuccagacccgggccggcugccugaucggcgccgagcacgugaacaacuccuacgagugcgacauccccaucggcgcuggcaucugcgccagcuaccagacccagaccaacagcccccggcgggcccggagcguggccagccagagcaucaucgccuacaccaugagcuuaggcgccgagaacagcguggccuacagcaacaacagcaucgcgaucccuaccaacuucaccaucagcgugaccaccgagauacugcccgugagcaugaccaagaccagcguggacuguaccauguacaucugcggcgacagcaccgagugcagcaaccugcugcugcaguacggcagcuucugcacccagcugaaccgggcccugaccggcaucgccguggagcaggacaagaacacccaagagguguucgcccaggugaagcagaucuacaagacucccccaaucaaggacuucggcggcuucaacuucagccagauccugcccgaccccagcaagcccagcaagcggagcuucaucgaggaccugcuguucaacaaggugacccuggccgacgccggcuucaucaagcaguacggcgacugccugggggauaucgccgcucgggaccugaucugcgcccagaaguucaacggccugaccgugcugcccccucugcugaccgacgagaugaucgcccaguacaccagcgcccugcuugccggcaccaucaccagcggcuggaccuucggcgccggcgcagcccugcagauccccuucgccaugcagauggccuaccgguucaacggcaucggcgugacccagaacgugcuguacgagaaccagaagcugaucgccaaccaguucaacagcgccaucggcaagauccaggacagccugagcagcaccgccagcgcccugggcaagcugcaggacguggugaaccagaacgcucaggcccugaacacccuggugaagcagcugagcagcaacuucggcgccaucagcucagugcugaaugacauccugagcaggcuggaucccccagaggccgaggugcagaucgaccggcugaucaccggccggcugcagagccugcagaccuacgugacccagcagcugauccgggccgccgagauccgggccagcgccaaccuggcagccaccaagaugagcgagugcgugcugggccagagcaagcggguggacuuuugcggcaagggcuaccaccugaugagcuucccccagagcgcuccccacggcgugguguuccuccacgugacauacguccccgcccaggagaagaacuucaccaccgcccccgccauuugccacgacggcaaggcccacuucccccgggagggaguguucgugagcaacggcacccacugguucgugacccagcggaacuucuacgagccucagaucaucaccaccgacaacaccuucgugagcggcaacugcgacguggugaucggcaucgugaacaacaccguguacgacccccugcagcccgagcuggacagcuucaaggaggagcuggacaaguacuucaagaaccacaccagcccagacguggaccugggcgacaucagcggcaucaacgccagcguggugaacauccagaaggagaucgaccggcugaacgagguggccaagaaccugaacgagagccugaucgaccugcaggagcugggcaaguacgagcaguacaucaaguggcccugguacaucuggcugggcuucaucgccggccugaucgccaucgugauggugaccaucaugcugugcugcaugaccagcugcuguagcugccugaagggcugcugcagcugcggcagcugcugcaaguucgacgaggacgacagcgagcccgugcugaagggcgugaagcugcacuacaccugauaauaggcuggagccucgguggccuagcuucuugccccuugggccuccccccagccccuccuccccuuccugcacccguacccccguggucuuugaauaaagucugagugggcggcaaaaaaaaaaaaaaaaaaaaaaaaaaaaaaaaaaaaaaaaaaaaaaaaaaaaaaaaaaaaaaaaaaaaaaaaaaaaaaaaaaaaaaaaaaaaaaaaaaaaucuag

SEQ ID NO: 26665 - RNA, 4091 nt, Artificial Sequence
  SARS-CoV-2/Wuhan/WIV05/2019__EPI_ISL_402128 spike protein mRNA gc (1-1273)(K986P_V987P_K986P_V987P_L18F_D80A_D215G_L242del_A243del_ L244del_R246I_K417N_E484K_N501Y_D614G_A701V)
gggaaauaagagagaaaagaagaguaagaagaaauauaagaccccggcgccgccaccauguucguguuccuggugcugcugccccuggugagcagccagugcgugaacuucaccacccggacccagcugcccccugccuacaccaacagcuucacccggggcguguacuaccccgacaagguguuccggagcagcgugcugcacagcacccaggaccuguuccugcccuucuucagcaacgugaccugguuccacgccauccacgugagcggcaccaacggcaccaagcgguucgccaacccagugcugcccuucaacgacggcguguacuucgccagcaccgagaagucaaacaucauccggggcuggaucuuuggcaccacccuggacagcaagacacagagccugcugaucgugaacaacgcuaccaacguggugaucaaggugugcgaguuccaguucugcaacgaccccuuccugggcguguacuaccacaagaacaacaagagcuggauggagagcgaguuccgggucuacagcagcgccaacaauugcaccuucgaguacgugagccagcccuuccugauggaccuggagggcaagcagggcaacuucaagaaccuccgggaguucguguucaagaacaucgacggcuacuucaagaucuacagcaagcacacccccaucaaccuggugcggggacugccccagggcuucagcgcccuggagccucugguggaucugcccaucggcaucaacaucaccagguuccagacccugcacaucagcuaccugacccccggcgacagcagcagcggcuggaccgccggcgccgccgcauacuacgugggcuaccugcagccacggaccuuccugcugaaguacaacgagaacggcaccaucaccgacgccguggacugcgcccuggacccccugagcgagaccaagugcacccuuaagagcuucaccguggagaagggcaucuaccagaccagcaacuuccgggugcagcccacugagagcauugugcgguuccccaacaucaccaaccugugucccuucggcgagguguucaacgccacccgguucgccagcguguacgccuggaaccggaagcggaucagcaacugcguggccgacuacagcgugcuguacaacagcgccagcuucagcaccuucaagugcuacggcgugagcccuaccaagcugaacgaccugugcuucaccaacguguacgcugacagcuucgugauccggggcgacgaggugcggcagaucgcccccggccagaccggcaacaucgccgacuacaacuacaagcugcccgacgacuucaccggcugcgugaucgccuggaacagcaacaaccuggacagcaaggugggcggcaacuacaacuaccuguaccggcuauuccguaagagcaaccugaagccauuugagcgggacaucagcaccgagaucuaccaggccgguagcacccccugcaacggcgugaagggcuucaacugcuacuucccccugcagagcuacggcuuccagcccaccuacggcgugggcuaccagcccuaccgggugguggugcugagcuucgagcugcugcacgcccccgccaccgugugcggcccuaaaaagagcaccaaccuggugaagaacaagugcgugaacuucaauuucaacggccugaccggcaccggcgugcugaccgagagcaacaagaaguuccugcccuuccagcaguucggccgggacaucgccgacaccaccgaugcagugcgggacccccagacccuggagauccuggacaucaccccaugcagcuucggcggcgugagcgucaucacccccggaacaaacaccagcaaccagguggccgugcuguaccagggcgugaacugcaccgaggugcccguggccauccacgccgaccagcugacccccaccuggcggguguacagcaccggcagcaacguguuccagacccgggccggcugccugaucggcgccgagcacgugaacaacuccuacgagugcgacauccccaucggcgcuggcaucugcgccagcuaccagacccagaccaacagcccccggcgggcccggagcguggccagccagagcaucaucgccuacaccaugagccugggcguggagaacagcguggccuacagcaacaacagcaucgccaucccuaccaacuucaccauaagcgugaccaccgagauccugcccgugagcaugaccaagaccagcguggacuguaccauguacaucugcggcgacagcaccgagugcagcaaccuguuacugcaguacggcagcuucugcacccagcugaaccgggcgcugaccggcaucgccguggagcaggacaagaacacccaagagguguucgcccaggugaagcagaucuacaagacucccccaaucaaggacuucggcggcuucaacuucagccagauccugcccgaccccagcaagcccagcaagcggagcuucaucgaggaccugcuguucaacaaggugacccuggccgacgccggcuucaucaagcaguacggggacugccugggcgacaucgccgcccgggaccugaucugcgcucagaaguucaacggccugaccgugcugcccccucugcugaccgaugagaugaucgcccaguacaccagcgcccugcuggccggcaccaucaccagcggcuggaccuucggcgccggcgccgcacugcagauccccuucgccaugcagauggccuaccgguucaacggcaucggcgugacccagaacgugcuguacgagaaccagaagcugaucgccaaccaguucaacagcgccaucggcaagauccaggacagccugagcagcaccgccagcgcccugggcaagcugcaggacguggugaaccagaacgcccaggcucugaacacccuggugaagcagcugagcagcaacuuuggcgccaucagcucagugcugaaugacauccugagccggcuggaucccccagaggccgaggugcagaucgacaggcugaucaccggccggcugcagagccugcagaccuacgugacccagcagcugauccgggccgccgagauucgggccagcgccaaccuggccgcaaccaagaugagcgagugcgugcugggccagagcaagcggguggacuucugcggcaagggcuaccaccugaugagcuucccccagagcgcuccccacggcgugguguuccugcacgucacauacgugcccgcccaggagaagaacuucaccaccgcccccgccaucugccacgacggaaaggcccacuucccccgggagggcguguucgugagcaacggcacccacugguucgugacccagcggaacuucuacgagccucagaucaucaccaccgacaacaccuucgugagcggcaacugcgacguggugaucggcaucgugaacaacaccguguacgacccccugcagcccgagcuggacagcuucaaggaggagcucgacaaguacuucaagaaccacaccagcccagacguggaccugggcgacaucagcggcaucaacgccagcguggugaacauccagaaggagaucgaccggcugaacgagguggccaagaaccugaacgagagccugaucgaccugcaggagcugggcaaguacgagcaguacaucaaguggcccugguacaucuggcugggcuucaucgccggccugaucgccaucgugauggugaccaucaugcugugcugcaugaccagcugcuguagcugccugaagggcugcugcagcugcggcagcugcugcaaguucgacgaggacgacagcgagcccgugcugaagggcgugaagcugcacuacaccugauaauaggcuggagccucgguggccuagcuucuugccccuugggccuccccccagccccuccuccccuuccugcacccguacccccguggucuuugaauaaagucugagugggcggcaaaaaaaaaaaaaaaaaaaaaaaaaaaaaaaaaaaaaaaaaaaaaaaaaaaaaaaaaaaaaaaaaaaaaaaaaaaaaaaaaaaaaaaaaaaaaaaaaaaaucuag

SEQ ID NO: 26666 - RNA, 4100 nt, Artificial Sequence
  SARS-CoV-2/Wuhan/WIV05/2019__EPI_ISL_402128 spike protein mRNA gc (1-1273)(K986P_V987P_K986P_V987P_E484K_D614G)
gggaaauaagagagaaaagaagaguaagaagaaauauaagaccccggcgccgccaccauguucguguuccuggugcugcugccccuggugagcagccagugcgugaaccugaccacccggacccagcugcccccugccuacaccaacagcuucacccggggcguguacuaccccgacaagguguuccggagcagcgugcugcacagcacccaggaccuguuccugcccuucuucagcaacgugaccugguuccacgccauccacgugagcggcaccaacggcaccaagcgguucgacaacccagugcugcccuucaacgacggcguguacuucgccagcaccgagaagucaaacaucauccggggcuggaucuucggcaccacccuggacagcaagacacagagccugcugaucgugaacaacgccaccaacguggugaucaaggugugcgaguuucaguucugcaacgaccccuuccugggcguguacuaccacaagaacaacaagagcuggauggagagcgaguuccgggucuacagcagcgcuaacaauugcaccuucgaguacgugagccagcccuuccugauggaccucgagggcaagcagggcaacuucaagaaccugcgggaguucguguucaagaacaucgauggcuacuucaagaucuacagcaagcacacccccaucaaccuggugcgggaccugccccagggauucagcgcccuggagccucugguggaccugcccaucggcaucaacaucaccagguuccagacccugcuggcccugcaccggagcuaccugacccccggcgacagcagcagcggcuggaccgccggcgccgccgcauacuacgugggcuaccugcagccacggaccuuccugcugaaguacaacgagaacggcaccaucaccgacgccguggacugcgcccuggacccccugagcgagaccaagugcacccuaaagagcuucaccguggagaagggcaucuaccagaccagcaacuuccgggugcagcccacugagagcaucgugcgguuccccaacauuaccaaccugugucccuucggcgagguguucaacgccacccgguucgccagcguguacgccuggaaccggaagcggaucagcaacugcguggccgacuacagcgugcuguacaacagcgccagcuucagcaccuucaagugcuacggcgugagcccuaccaagcugaacgaccugugcuucaccaacguguacgcugacagcuucgugauccggggcgacgaggugcggcagaucgcccccggccagaccggcaagaucgccgacuacaacuacaagcugcccgacgacuucaccggcugcgugaucgccuggaacagcaacaaccuggacagcaaggugggcggcaacuacaacuaccuguaccggcuguuccguaagagcaaccugaagccauucgagcgggacaucagcaccgagaucuaccaggccggcagcacccccugcaacggugugaagggcuuuaacugcuacuucccccugcagagcuacggcuuccagcccaccaacggcgugggcuaccagcccuaccgggugguggugcugagcuucgagcugcugcacgcccccgccaccgugugcggcccuaaaaagagcaccaaccuggugaagaacaagugcgugaacuucaauuucaacggccugaccggcaccggcgugcugaccgagagcaacaagaaguuccugcccuuccagcaguucggccgggauaucgccgacaccaccgacgcagugcgggacccccagacccuggagauccuggacaucaccccaugcagcuucggcggcgugagcgucaucacccccggcacaaacaccagcaaccagguggccgugcuguaccagggagugaacugcaccgaggugcccguggccauccacgccgaccagcugacccccaccuggcggguguacagcaccggcagcaacguguuccagacccgggccggcugccugaucggcgccgagcacgugaacaacuccuacgagugcgacauccccaucggcgcuggcaucugcgccagcuaccagacccagaccaacagcccccggcgggcccggagcguggccagccagagcaucaucgccuacaccaugagcuuaggcgccgagaacagcguggccuacagcaacaacagcaucgcgaucccuaccaacuucaccaucagcgugaccaccgagauacugcccgugagcaugaccaagaccagcguggacuguaccauguacaucugcggcgacagcaccgagugcagcaaccugcugcugcaguacggcagcuucugcacccagcugaaccgggcccugaccggcaucgccguggagcaggacaagaacacccaagagguguucgcccaggugaagcagaucuacaagacucccccaaucaaggacuucggcggcuucaacuucagccagauccugcccgaccccagcaagcccagcaagcggagcuucaucgaggaccugcuguucaacaaggugacccuggccgacgccggcuucaucaagcaguacggcgacugccugggggauaucgccgcucgggaccugaucugcgcccagaaguucaacggccugaccgugcugcccccucugcugaccgacgagaugaucgcccaguacaccagcgcccugcuugccggcaccaucaccagcggcuggaccuucggcgccggcgcagcccugcagauccccuucgccaugcagauggccuaccgguucaacggcaucggcgugacccagaacgugcuguacgagaaccagaagcugaucgccaaccaguucaacagcgccaucggcaagauccaggacagccugagcagcaccgccagcgcccugggcaagcugcaggacguggugaaccagaacgcucaggcccugaacacccuggugaagcagcugagcagcaacuucggcgccaucagcucagugcugaaugacauccugagcaggcuggaucccccagaggccgaggugcagaucgaccggcugaucaccggccggcugcagagccugcagaccuacgugacccagcagcugauccgggccgccgagauccgggccagcgccaaccuggcagccaccaagaugagcgagugcgugcugggccagagcaagcggguggacuuuugcggcaagggcuaccaccugaugagcuucccccagagcgcuccccacggcgugguguuccuccacgugacauacguccccgcccaggagaagaacuucaccaccgcccccgccauuugccacgacggcaaggcccacuucccccgggagggaguguucgugagcaacggcacccacugguucgugacccagcggaacuucuacgagccucagaucaucaccaccgacaacaccuucgugagcggcaacugcgacguggugaucggcaucgugaacaacaccguguacgacccccugcagcccgagcuggacagcuucaaggaggagcuggacaaguacuucaagaaccacaccagcccagacguggaccugggcgacaucagcggcaucaacgccagcguggugaacauccagaaggagaucgaccggcugaacgagguggccaagaaccugaacgagagccugaucgaccugcaggagcugggcaaguacgagcaguacaucaaguggcccugguacaucuggcugggcuucaucgccggccugaucgccaucgugauggugaccaucaugcugugcugcaugaccagcugcuguagcugccugaagggcugcugcagcugcggcagcugcugcaaguucgacgaggacgacagcgagcccgugcugaagggcgugaagcugcacuacaccugauaauaggcuggagccucgguggccuagcuucuugccccuugggccuccccccagccccuccuccccuuccugcacccguacccccguggucuuugaauaaagucugagugggcggcaaaaaaaaaaaaaaaaaaaaaaaaaaaaaaaaaaaaaaaaaaaaaaaaaaaaaaaaaaaaaaaaaaaaaaaaaaaaaaaaaaaaaaaaaaaaaaaaaaaaucuag

SEQ ID NO: 26667 - RNA, 4100 nt, Artificial Sequence
  SARS-CoV-2/Wuhan/WIV05/2019__EPI_ISL_402128 spike protein mRNA gc (1-1273)(K986P_V987P_K986P_V987P_L18F_T20N_P26S_D138Y_R190S_K417T _E484K_N501Y_D614G_H655Y_T1027I)
gggaaauaagagagaaaagaagaguaagaagaaauauaagaccccggcgccgccaccauguucguguuccuggugcugcugccccuggugagcagccagugcgugaacuucaccaaccggacccagcugcccagcgccuacaccaacagcuucacccggggcguguacuacccugacaagguguuccggagcagcgugcugcacagcacccaggaccuguuccugcccuucuucagcaacgugaccugguuccacgccauccacgugagcggcaccaacggcaccaagcgguucgacaaccccgugcugccauucaacgacggcguguacuucgccagcaccgagaagucaaacaucauccggggcuggaucuuuggcaccacccuggacagcaagacccagagccugcugaucgugaacaacgccacaaacguggugaucaaggugugcgaguuccaguucugcaacuaccccuuccugggcguguacuaccacaagaacaacaagagcuggauggagagcgaguuccgggucuacagcagcgcuaauaacugcaccuucgaguacgugagccagcccuuccugauggaccuggagggcaagcagggcaacuucaagaaccucagcgaguucguguucaagaacaucgacggcuacuucaagaucuacagcaagcacacccccaucaaccuggugcgggaucugccccagggauucagcgcccuggagccccugguggaccugccuaucggcaucaacaucacccgguuccagacccugcuggcccugcacaggagcuaccugacccccggcgacagcagcagcggcuggaccgccggcgccgccgcauacuacgugggcuaccugcagccccggaccuuccugcugaaguacaacgagaacggcaccaucaccgacgccguggacugcgcccuggacccacugagcgagaccaagugcacccuaaagagcuucaccguggagaagggcaucuaccagaccagcaacuuccgggugcagcccaccgagagcaucgugcgguuccccaacauuacuaaccugugucccuucggcgagguguucaacgccacccgguucgccagcguguacgccuggaaccggaagcggaucagcaacugcguggccgacuacagcgugcuguacaacagcgccagcuucagcaccuucaagugcuacggcgugagccccaccaagcugaacgaccugugcuucaccaacguguacgcugacagcuucgugauccggggcgacgaggugcggcagaucgccccuggccagaccggcaccaucgccgacuacaacuacaagcugcccgacgacuucaccggcugcgugaucgccuggaacagcaacaaccuggacagcaaggugggcggcaacuacaacuaccuguaccggcuguuccguaagagcaaccugaagcccuuugagcgggacaucagcaccgagaucuaccaggccggcagcaccccaugcaacggugugaagggcuucaacugcuacuucccccugcagagcuacggcuuccagcccaccuacggcgugggcuaccagcccuaccgggugguggugcugagcuucgagcugcugcacgcccccgccaccgugugcggccccaaaaagagcaccaaccuggugaagaacaagugcgugaacuucaauuucaacggccugaccggcaccggcgugcugaccgagagcaacaagaaguuccugccuuuccagcaguucggccgggacaucgccgauaccaccgacgcagugcgggacccccagacccuggagauccuggacaucacccccugcagcuucggcggcgugagcgucaucaccccaggcacaaacaccagcaaccagguggccgugcuguaccagggagugaacugcaccgaggugcccguggccauccacgccgaccagcugacccccaccuggcggguguacuccaccggcagcaacguguuccagacccgggccggcugccugaucggcgccgaguacgugaacaacagcuacgagugcgacauccccaucggcgcuggcaucugcgccagcuaccagacccagaccaacagcccccggcgggcccggagcguggccagccagagcaucaucgccuacaccaugagccugggcgccgagaacagcguggccuacagcaacaacagcaucgcgauccccaccaacuucaccaucagcgugaccaccgagauauuaccugugagcaugaccaagaccagcguggacuguaccauguacaucugcggcgacagcaccgagugcagcaaccugcugcugcaguacggcagcuucugcacccagcugaaccgggcccugaccggcaucgccguggagcaggacaagaacacccaagagguguucgcccaggugaagcagaucuacaagacuccacccaucaaggacuucggcggcuucaacuucagccagauccugcccgaccccagcaagcccagcaagcggagcuucaucgaggaccugcuguucaacaaggugacccuggccgacgccggcuucaucaagcaguacggcgacugccugggggacaucgccgcucgggaucugaucugcgcccagaaguucaacggccugaccgugcugccuccccugcugaccgacgagaugaucgcccaguacaccagcgcccugcuggccggcaccaucaccagcggcuggaccuucggcgccggcgcagcccuucagauccccuucgccaugcagauggccuaccgguucaacggcaucggcgugacccagaacgugcuguacgagaaccagaagcugaucgccaaccaguucaacagcgccaucggcaagauccaggacagccugagcagcaccgccagcgcccugggcaagcugcaggacguggugaaccagaacgcucaggcccugaacacccuggugaagcagcugagcucaaacuuuggcgccaucagcagcgugcugaaugacauccugagccggcuggacccacccgaggccgaggugcagaucgacaggcugaucaccggccggcugcagagccugcagaccuacgugacccagcagcugauccgggccgccgagauccgggccagcgccaaccuggcagccauuaagaugagcgagugcgugcugggccagagcaagcggguggacuucugcggcaagggcuaccaccugaugagcuucccccagagcgcuccccacggcgugguguuccugcacgugaccuacguccccgcccaggagaagaacuucacaaccgcccccgccaucugccacgacggcaaggcccacuucccccgggagggaguguucgugagcaacggcacccacugguucgugacccagcggaacuucuacgagccccagaucaucaccaccgacaacaccuucgugagcggcaacugcgacguggugaucggcaucgugaacaacaccguguacgacccucuccagcccgagcuggacagcuucaaggaggagcuggacaaguacuucaagaaccacaccagccccgacguggaccugggcgauaucagcggcaucaacgccagcguggugaacauccagaaggagaucgaccggcugaacgagguggccaagaaccugaacgagagccugaucgaccugcaggagcugggcaaguacgagcaguacaucaaguggccaugguacaucuggcugggcuucaucgccggccugaucgccaucgugauggugaccaucaugcugugcugcaugaccagcugcuguagcugccugaagggcugcugcagcugcggcagcugcugcaaguucgacgaggacgacagcgagcccgugcugaagggcgugaagcugcacuacaccugauaauaggcuggagccucgguggccuagcuucuugccccuugggccuccccccagccccuccuccccuuccugcacccguacccccguggucuuugaauaaagucugagugggcggcaaaaaaaaaaaaaaaaaaaaaaaaaaaaaaaaaaaaaaaaaaaaaaaaaaaaaaaaaaaaaaaaaaaaaaaaaaaaaaaaaaaaaaaaaaaaaaaaaaaaucuag

SEQ ID NO: 26668 - RNA, 4100 nt, Artificial Sequence
  SARS-CoV-2/Wuhan/WIV05/2019__EPI_ISL_402128 spike protein mRNA gc (1-1273)(K986P_V987P_K986P_V987P_S13I_W152C_L452R_D614G)
gggaaauaagagagaaaagaagaguaagaagaaauauaagaccccggcgccgccaccauguucguguuccuggugcugcugccccuggugagcauccagugcgugaaccugaccacccggacccagcugcccccugccuacaccaacagcuucacccggggcguguacuaccccgacaagguguuccggagcagcgugcugcacagcacccaggaccuguuccugcccuucuucagcaacgugaccugguuccacgccauccacgugagcggcaccaacggcaccaagcgguucgacaacccagugcugcccuucaacgacggcguguacuucgccagcaccgagaagucaaacaucauccggggcuggaucuucggcaccacccuggacagcaagacacagagccugcugaucgugaacaacgccaccaacguggugaucaaggugugcgaguuucaguucugcaacgaccccuuccugggcguguacuaccacaagaacaacaagagcugcauggagagcgaguuccgggucuacagcagcgcuaacaauugcaccuucgaguacgugagccagcccuuccugauggaccucgagggcaagcagggcaacuucaagaaccugcgggaguucguguucaagaacaucgauggcuacuucaagaucuacagcaagcacacccccaucaaccuggugcgggaccugccccagggauucagcgcccuggagccucugguggaccugcccaucggcaucaacaucaccagguuccagacccugcuggcccugcaccggagcuaccugacccccggcgacagcagcagcggcuggaccgccggcgccgccgcauacuacgugggcuaccugcagccacggaccuuccugcugaaguacaacgagaacggcaccaucaccgacgccguggacugcgcccuggacccccugagcgagaccaaguguacccuaaagagcuucaccguggagaagggcaucuaccagaccagcaacuuccgggugcagcccacugagagcauugugcgguuccccaacaucaccaaccugugccccuucggcgagguguucaacgccacccgguucgccagcguguacgccuggaaccggaagcggaucagcaacugcguggccgacuacagcgugcuguacaacagcgccagcuucagcaccuucaagugcuacggcgugagcccuaccaagcugaacgaccugugcuucaccaacguguacgcugacagcuucgugauccggggcgacgaggugcggcagaucgcccccggccagaccggcaagaucgccgacuacaacuacaagcugcccgacgacuucaccggcugcgugaucgccuggaacagcaacaaccuggacagcaaggugggcggcaacuacaacuaccgguaccggcuguuccguaagagcaaccugaagccauucgagcgggacaucagcaccgagaucuaccaggccggcagcacccccugcaacgguguggagggcuuuaacugcuacuucccccugcagagcuacggcuuccagcccaccaacggcgugggcuaccagcccuaccgggugguggugcugagcuucgagcugcugcacgcccccgccaccgugugcggcccuaaaaagagcaccaaccuggugaagaacaagugcgugaacuucaauuucaacggccugaccggcaccggcgugcugaccgagagcaacaagaaguuccugcccuuccagcaguucggccgggauaucgccgacaccaccgacgcagugcgggacccccagacccuggagauccuggacaucaccccaugcagcuucggcggcgugagcgucaucacccccggcacaaacaccagcaaccagguggccgugcuguaccagggagugaacugcaccgaggugcccguggccauccacgccgaccagcugacccccaccuggcggguguacagcaccggcagcaacguguuccagacccgggccggcugccugaucggcgccgagcacgugaacaacagcuacgagugcgacauccccaucggcgcuggcaucugugccuccuaccagacccagaccaacagcccccggcgggcccggagcguggccagccagagcaucaucgccuacaccaugagccugggcgccgagaacagcguggccuacagcaacaacagcaucgcgaucccuaccaacuucaccauaagcgugaccaccgagaucuuacccgugagcaugaccaagaccagcguggacugcaccauguacaucugcggcgacagcaccgagugcagcaaccugcugcugcaguacggcagcuucugcacccagcugaaccgggcccugaccggcaucgccguggagcaggacaagaacacccaagagguguucgcccaggugaagcagaucuacaagacucccccaaucaaggacuucggcggcuucaacuucagccagauccugcccgaccccagcaagcccagcaagcggagcuucaucgaggaccugcuguucaacaaggugacccuggccgacgccggcuucaucaagcaguacggcgacugccugggggauaucgccgcucgggaccugaucugcgcccagaaguucaacggccugaccgugcugcccccucugcugaccgacgagaugaucgcccaguacaccagcgcccugcuggccggcaccaucaccagcggcuggaccuucggcgccggcgcagcccuucagauccccuucgccaugcagauggccuacagguucaacggcaucggcgugacccagaacgugcuguacgagaaccagaagcugaucgccaaccaguucaacagcgccaucggcaagauccaggacagccugagcagcaccgccagcgcccugggcaagcugcaggacguggugaaccagaacgcucaggcccugaacacccuggugaagcagcugagcagcaacuucggcgccaucagcagcgugcugaaugacauccugucacggcuggaucccccagaggccgaggugcagaucgaccggcugaucaccggccggcugcagagccugcagaccuacgugacccagcagcugauccgggccgccgagauucgggccagcgccaaccuggcagccaccaagaugagcgagugcgugcugggccagagcaagcggguggacuuuugcggcaagggcuaccaccugaugagcuucccccagagcgcuccccacggcgugguguuccugcacgugacauacguccccgcccaggagaagaacuucaccaccgcccccgccaucugccacgacggcaaggcccacuucccccgggagggaguguucgugagcaacggcacccacugguucgugacccagcggaacuucuacgagccucagaucaucaccaccgacaacaccuucgugagcggcaacugcgacguggugaucggcaucgugaacaacaccguguacgacccccuccagcccgagcuggacagcuucaaggaggagcuggacaaguacuucaagaaccacaccagcccagacguggaccugggcgacaucagcggcaucaacgccagcguggugaacauccagaaggagaucgaccggcugaacgagguggccaagaaccugaacgagagccugaucgaccugcaggagcugggcaaguacgagcaguacaucaaguggcccugguacaucuggcugggcuucaucgccggccugaucgccaucgugauggugaccaucaugcugugcugcaugaccagcuguugcagcugccugaagggcugcugcagcugcggcagcugcugcaaguucgacgaggacgacagcgagcccgugcugaagggcgugaagcugcacuacaccugauaauaggcuggagccucgguggccuagcuucuugccccuugggccuccccccagccccuccuccccuuccugcacccguacccccguggucuuugaauaaagucugagugggcggcaaaaaaaaaaaaaaaaaaaaaaaaaaaaaaaaaaaaaaaaaaaaaaaaaaaaaaaaaaaaaaaaaaaaaaaaaaaaaaaaaaaaaaaaaaaaaaaaaaaaucuag

SEQ ID NO: 26669 - RNA, 4100 nt, Artificial Sequence
  SARS-CoV-2/Wuhan/WIV05/2019__EPI_ISL_402128 spike protein mRNA gc mod (1-1273)(K986P_V987P)
gggaaauaagagagaaaagaagaguaagaagaaauauaagaccccggcgccgccaccauguucguguuucuggugcugcugccccugguguccagccagugugugaaccugaccaccagaacacagcugccuccagccuacaccaacagcuucaccagaggcguguacuaccccgacaagguguucagauccagcgugcugcacucuacccaggaccuguuccugccuuucuucagcaacgugaccugguuccacgccauccacguguccggcaccaauggcaccaagagauucgacaaccccgugcugcccuucaacgacgggguguacuuugccagcaccgagaaguccaacaucaucagaggcuggaucuucggcaccacacuggacagcaagacccagagccugcugaucgugaacaacgccaccaacguggucaucaaagugugcgaguuccaguucugcaacgaccccuuccugggcgucuacuaccacaagaacaacaagagcuggauggaaagcgaguuccggguguacagcagcgccaacaacugcaccuucgaguacgugucccagccuuuccugauggaccuggaaggcaagcagggcaacuucaagaaccugcgcgaguucguguucaagaacaucgacggcuacuucaaaaucuacagcaagcacaccccuaucaaccucgugcgggaucugccucagggcuucucugcucuggaaccccugguggaucugcccaucggcaucaacaucacccgguuucagacacugcuggcccugcacagaagcuaccugacaccuggcgauagcagcagcggauggacagcuggugccgccgcuuacuaugugggcuaccugcagccuagaaccuuccugcugaaguacaacgagaacggcaccaucaccgacgccguggauugugcucuggauccucugagcgagacaaagugcacccugaaguccuucaccguggaaaagggcaucuaccagaccagcaacuuccgggugcagcccaccgaauccaucgugcgguuccccaauaucaccaaucugugccccuucggcgagguguucaaugccaccagauucgccucuguguacgccuggaaccggaagcggaucagcaauugcguggccgacuacuccgugcuguacaacuccgccagcuucagcaccuucaagugcuacggcguguccccuaccaagcugaacgaccugugcuucacaaacguguacgccgacagcuucgugauccggggagaugaagugcggcagauugccccuggacagacaggcaagaucgccgacuacaacuacaagcugcccgacgacuucaccggcugugugauugccuggaacagcaacaaccuggacuccaaagucggcggcaacuacaauuaccuguaccggcuguuccggaaguccaaucugaagcccuucgagcgggacaucagcaccgaaaucuaucaggccggcagcaccccuugcaacggcguggaaggcuucaacugcuacuucccacugcaguccuacggcuuucagcccacaaauggcgugggcuaucagcccuacagagugguggugcugagcuucgaacugcugcaugcuccugccacagugugcggcccuaagaaaagcaccaaucucgugaagaacaaaugcgugaacuucaacuucaacggccugaccggcaccggcgugcugacagagagcaacaagaaguuccugccauuccagcaguuuggccgggauaucgccgauaccacagacgccguuagagauccccagacacuggaaauccuggacaucaccccaugcagcuucggcggagugucugugaucaccccuggcaccaacaccagcaaucagguggcagugcuguaccaggacgugaacuguaccgaagugcccguggccauucacgccgaucagcugacaccuacauggcggguguacuccaccggcagcaauguguuucagaccagagccggcugucugaucggagccgagcacgugaacaauagcuacgagugcgacauccccaucggcgcuggcaucugugccagcuaccagacacagacaaacagccccagacgggcuagaagcguggccagccagagcaucauugccuacacaaugucucugggcgccgagaacagcguggccuacuccaacaacucuaucgcuauccccaccaacuucaccaucagcgugaccaccgagauccugccuguguccaugaccaagaccagcguggacugcaccauguacaucugcggcgauuccaccgagugcuccaaccugcugcugcaguacggcagcuucugcacccagcugaauagagcccugacagggaucgccguggaacaggacaagaacacccaagagguguucgcccaagugaagcaaaucuacaagaccccuccuaucaaggacuucggcggcuucaauuucagccagauucugcccgauccuagcaagcccagcaagcggagcuucaucgaggaccugcuguucaacaaagugacacuggccgacgccggcuucaucaagcaguauggcgauugucugggcgacauugccgccagggaucugauuugcgcccagaaguuuaacggacugacagugcugccuccucugcugaccgaugagaugaucgcccaguacacaucugcccugcuggccggcacaaucacaagcggcuggacauuuggagcuggcgccgcucugcagauccccuuugcuaugcagauggccuaccgguucaacggcaucggagugacccagaaugugcuguacgagaaccagaagcugaucgccaaccaguucaacagcgccaucggcaagauccaggacagccugagcagcacagcaagcgcccugggaaagcugcaggacguggucaaccagaaugcccaggcacugaacacccuggucaagcagcuguccuccaacuucggcgccaucagcucugugcugaacgauauccugagcagacuggacccuccugaggccgaggugcagaucgacagacugaucacaggcagacugcagagccuccagacauacgugacccagcagcugaucagagccgccgagauuagagccucugccaaucuggccgccaccaagaugucugagugugugcugggccagagcaagagaguggacuuuugcggcaagggcuaccaccugaugagcuucccucagucugccccucacggcgugguguuucugcacgugacauaugugcccgcucaagagaagaauuucaccaccgcuccagccaucugccacgacggcaaagcccacuuuccuagagaaggcguguucguguccaacggcacccauugguucgugacacagcggaacuucuacgagccccagaucaucaccaccgacaacaccuucgugucuggcaacugcgacguugugaucggcauugugaacaauaccguguacgacccucugcagcccgagcuggacagcuucaaagaggaacuggacaaguacuuuaagaaccacacaagccccgacguggaccugggcgauaucagcggaaucaaugccagcgucgugaacauccagaaagagaucgaccggcugaacgagguggccaagaaucugaacgagagccugaucgaccugcaagaacuggggaaguacgagcaguacaucaaguggcccugguacaucuggcugggcuuuaucgccggacugauugccaucgugauggucacaaucaugcuguguugcaugaccagcugcuguagcugccugaagggcuguuguagcuguggcagcugcugcaaguucgacgaggacgauucugagcccgugcugaagggcgugaaacugcacuacaccugauaauaggcuggagccucgguggccuagcuucuugccccuugggccuccccccagccccuccuccccuuccugcacccguacccccguggucuuugaauaaagucugagugggcggcaaaaaaaaaaaaaaaaaaaaaaaaaaaaaaaaaaaaaaaaaaaaaaaaaaaaaaaaaaaaaaaaaaaaaaaaaaaaaaaaaaaaaaaaaaaaaaaaaaaaucuag

SEQ ID NO: 26670 - RNA, 4100 nt, Artificial Sequence
  SARS-CoV-2/Wuhan/WIV05/2019__EPI_ISL_402128 spike protein mRNA gc mod (1-1273)(K986P_V987P_ D614G)
gggaaauaagagagaaaagaagaguaagaagaaauauaagaccccggcgccgccaccauguucguguuucuggugcugcugccccugguguccagccagugugugaaccugaccaccagaacacagcugccuccagccuacaccaacagcuucaccagaggcguguacuaccccgacaagguguucagauccagcgugcugcacucuacccaggaccuguuccugccuuucuucagcaacgugaccugguuccacgccauccacguguccggcaccaauggcaccaagagauucgacaaccccgugcugcccuucaacgacgggguguacuuugccagcaccgagaaguccaacaucaucagaggcuggaucuucggcaccacacuggacagcaagacccagagccugcugaucgugaacaacgccaccaacguggucaucaaagugugcgaguuccaguucugcaacgaccccuuccugggcgucuacuaccacaagaacaacaagagcuggauggaaagcgaguuccggguguacagcagcgccaacaacugcaccuucgaguacgugucccagccuuuccugauggaccuggaaggcaagcagggcaacuucaagaaccugcgcgaguucguguucaagaacaucgacggcuacuucaaaaucuacagcaagcacaccccuaucaaccucgugcgggaucugccucagggcuucucugcucuggaaccccugguggaucugcccaucggcaucaacaucacccgguuucagacacugcuggcccugcacagaagcuaccugacaccuggcgauagcagcagcggauggacagcuggugccgccgcuuacuaugugggcuaccugcagccuagaaccuuccugcugaaguacaacgagaacggcaccaucaccgacgccguggauugugcucuggauccucugagcgagacaaagugcacccugaaguccuucaccguggaaaagggcaucuaccagaccagcaacuuccgggugcagcccaccgaauccaucgugcgguuccccaauaucaccaaucugugccccuucggcgagguguucaaugccaccagauucgccucuguguacgccuggaaccggaagcggaucagcaauugcguggccgacuacuccgugcuguacaacuccgccagcuucagcaccuucaagugcuacggcguguccccuaccaagcugaacgaccugugcuucacaaacguguacgccgacagcuucgugauccggggagaugaagugcggcagauugccccuggacagacaggcaagaucgccgacuacaacuacaagcugcccgacgacuucaccggcugugugauugccuggaacagcaacaaccuggacuccaaagucggcggcaacuacaauuaccuguaccggcuguuccggaaguccaaucugaagcccuucgagcgggacaucagcaccgaaaucuaucaggccggcagcaccccuugcaacggcguggaaggcuucaacugcuacuucccacugcaguccuacggcuuucagcccacaaauggcgugggcuaucagcccuacagagugguggugcugagcuucgaacugcugcaugcuccugccacagugugcggcccuaagaaaagcaccaaucucgugaagaacaaaugcgugaacuucaacuucaacggccugaccggcaccggcgugcugacagagagcaacaagaaguuccugccauuccagcaguuuggccgggauaucgccgauaccacagacgccguuagagauccccagacacuggaaauccuggacaucaccccaugcagcuucggcggagugucugugaucaccccuggcaccaacaccagcaaucagguggcagugcuguaccagggcgugaacuguaccgaagugcccguggccauucacgccgaucagcugacaccuacauggcggguguacuccaccggcagcaauguguuucagaccagagccggcugucugaucggagccgagcacgugaacaauagcuacgagugcgacauccccaucggcgcuggcaucugugccagcuaccagacacagacaaacagccccagacgggcuagaagcguggccagccagagcaucauugccuacacaaugucucugggcgccgagaacagcguggccuacuccaacaacucuaucgcuauccccaccaacuucaccaucagcgugaccaccgagauccugccuguguccaugaccaagaccagcguggacugcaccauguacaucugcggcgauuccaccgagugcuccaaccugcugcugcaguacggcagcuucugcacccagcugaauagagcccugacagggaucgccguggaacaggacaagaacacccaagagguguucgcccaagugaagcaaaucuacaagaccccuccuaucaaggacuucggcggcuucaauuucagccagauucugcccgauccuagcaagcccagcaagcggagcuucaucgaggaccugcuguucaacaaagugacacuggccgacgccggcuucaucaagcaguauggcgauugucugggcgacauugccgccagggaucugauuugcgcccagaaguuuaacggacugacagugcugccuccucugcugaccgaugagaugaucgcccaguacacaucugcccugcuggccggcacaaucacaagcggcuggacauuuggagcuggcgccgcucugcagauccccuuugcuaugcagauggccuaccgguucaacggcaucggagugacccagaaugugcuguacgagaaccagaagcugaucgccaaccaguucaacagcgccaucggcaagauccaggacagccugagcagcacagcaagcgcccugggaaagcugcaggacguggucaaccagaaugcccaggcacugaacacccuggucaagcagcuguccuccaacuucggcgccaucagcucugugcugaacgauauccugagcagacuggacccuccugaggccgaggugcagaucgacagacugaucacaggcagacugcagagccuccagacauacgugacccagcagcugaucagagccgccgagauuagagccucugccaaucuggccgccaccaagaugucugagugugugcugggccagagcaagagaguggacuuuugcggcaagggcuaccaccugaugagcuucccucagucugccccucacggcgugguguuucugcacgugacauaugugcccgcucaagagaagaauuucaccaccgcuccagccaucugccacgacggcaaagcccacuuuccuagagaaggcguguucguguccaacggcacccauugguucgugacacagcggaacuucuacgagccccagaucaucaccaccgacaacaccuucgugucuggcaacugcgacguugugaucggcauugugaacaauaccguguacgacccucugcagcccgagcuggacagcuucaaagaggaacuggacaaguacuuuaagaaccacacaagccccgacguggaccugggcgauaucagcggaaucaaugccagcgucgugaacauccagaaagagaucgaccggcugaacgagguggccaagaaucugaacgagagccugaucgaccugcaagaacuggggaaguacgagcaguacaucaaguggcccugguacaucuggcugggcuuuaucgccggacugauugccaucgugauggucacaaucaugcuguguugcaugaccagcugcuguagcugccugaagggcuguuguagcuguggcagcugcugcaaguucgacgaggacgauucugagcccgugcugaagggcgugaaacugcacuacaccugauaauaggcuggagccucgguggccuagcuucuugccccuugggccuccccccagccccuccuccccuuccugcacccguacccccguggucuuugaauaaagucugagugggcggcaaaaaaaaaaaaaaaaaaaaaaaaaaaaaaaaaaaaaaaaaaaaaaaaaaaaaaaaaaaaaaaaaaaaaaaaaaaaaaaaaaaaaaaaaaaaaaaaaaaaucuag

SEQ ID NO: 26671 - RNA, 4100 nt, Artificial Sequence
  SARS-CoV-2/Wuhan/WIV05/2019__EPI_ISL_402128 spike protein mRNA gc mod (1-1273)(K986P_V987P_A222V_D614G)
gggaaauaagagagaaaagaagaguaagaagaaauauaagaccccggcgccgccaccauguucguguuucuggugcugcugccccugguguccagccagugugugaaccugaccaccagaacacagcugccuccagccuacaccaacagcuucaccagaggcguguacuaccccgacaagguguucagauccagcgugcugcacucuacccaggaccuguuccugccuuucuucagcaacgugaccugguuccacgccauccacguguccggcaccaauggcaccaagagauucgacaaccccgugcugcccuucaacgacgggguguacuuugccagcaccgagaaguccaacaucaucagaggcuggaucuucggcaccacacuggacagcaagacccagagccugcugaucgugaacaacgccaccaacguggucaucaaagugugcgaguuccaguucugcaacgaccccuuccugggcgucuacuaccacaagaacaacaagagcuggauggaaagcgaguuccggguguacagcagcgccaacaacugcaccuucgaguacgugucccagccuuuccugauggaccuggaaggcaagcagggcaacuucaagaaccugcgcgaguucguguucaagaacaucgacggcuacuucaaaaucuacagcaagcacaccccuaucaaccucgugcgggaucugccucagggcuucucugugcuggaaccccugguggaucugcccaucggcaucaacaucacccgguuucagacacugcuggcccugcacagaagcuaccugacaccuggcgauagcagcagcggauggacagcuggugccgccgcuuacuaugugggcuaccugcagccuagaaccuuccugcugaaguacaacgagaacggcaccaucaccgacgccguggauugugcucuggauccucugagcgagacaaagugcacccugaaguccuucaccguggaaaagggcaucuaccagaccagcaacuuccgggugcagcccaccgaauccaucgugcgguuccccaauaucaccaaucugugccccuucggcgagguguucaaugccaccagauucgccucuguguacgccuggaaccggaagcggaucagcaauugcguggccgacuacuccgugcuguacaacuccgccagcuucagcaccuucaagugcuacggcguguccccuaccaagcugaacgaccugugcuucacaaacguguacgccgacagcuucgugauccggggagaugaagugcggcagauugccccuggacagacaggcaagaucgccgacuacaacuacaagcugcccgacgacuucaccggcugugugauugccuggaacagcaacaaccuggacuccaaagucggcggcaacuacaauuaccuguaccggcuguuccggaaguccaaucugaagcccuucgagcgggacaucagcaccgaaaucuaucaggccggcagcaccccuugcaacggcguggaaggcuucaacugcuacuucccacugcaguccuacggcuuucagcccacaaauggcgugggcuaucagcccuacagagugguggugcugagcuucgaacugcugcaugcuccugccacagugugcggcccuaagaaaagcaccaaucucgugaagaacaaaugcgugaacuucaacuucaacggccugaccggcaccggcgugcugacagagagcaacaagaaguuccugccauuccagcaguuuggccgggauaucgccgauaccacagacgccguuagagauccccagacacuggaaauccuggacaucaccccaugcagcuucggcggagugucugugaucaccccuggcaccaacaccagcaaucagguggcagugcuguaccagggcgugaacuguaccgaagugcccguggccauucacgccgaucagcugacaccuacauggcggguguacuccaccggcagcaauguguuucagaccagagccggcugucugaucggagccgagcacgugaacaauagcuacgagugcgacauccccaucggcgcuggcaucugugccagcuaccagacacagacaaacagccccagacgggcuagaagcguggccagccagagcaucauugccuacacaaugucucugggcgccgagaacagcguggccuacuccaacaacucuaucgcuauccccaccaacuucaccaucagcgugaccaccgagauccugccuguguccaugaccaagaccagcguggacugcaccauguacaucugcggcgauuccaccgagugcuccaaccugcugcugcaguacggcagcuucugcacccagcugaauagagcccugacagggaucgccguggaacaggacaagaacacccaagagguguucgcccaagugaagcaaaucuacaagaccccuccuaucaaggacuucggcggcuucaauuucagccagauucugcccgauccuagcaagcccagcaagcggagcuucaucgaggaccugcuguucaacaaagugacacuggccgacgccggcuucaucaagcaguauggcgauugucugggcgacauugccgccagggaucugauuugcgcccagaaguuuaacggacugacagugcugccuccucugcugaccgaugagaugaucgcccaguacacaucugcccugcuggccggcacaaucacaagcggcuggacauuuggagcuggcgccgcucugcagauccccuuugcuaugcagauggccuaccgguucaacggcaucggagugacccagaaugugcuguacgagaaccagaagcugaucgccaaccaguucaacagcgccaucggcaagauccaggacagccugagcagcacagcaagcgcccugggaaagcugcaggacguggucaaccagaaugcccaggcacugaacacccuggucaagcagcuguccuccaacuucggcgccaucagcucugugcugaacgauauccugagcagacuggacccuccugaggccgaggugcagaucgacagacugaucacaggcagacugcagagccuccagacauacgugacccagcagcugaucagagccgccgagauuagagccucugccaaucuggccgccaccaagaugucugagugugugcugggccagagcaagagaguggacuuuugcggcaagggcuaccaccugaugagcuucccucagucugccccucacggcgugguguuucugcacgugacauaugugcccgcucaagagaagaauuucaccaccgcuccagccaucugccacgacggcaaagcccacuuuccuagagaaggcguguucguguccaacggcacccauugguucgugacacagcggaacuucuacgagccccagaucaucaccaccgacaacaccuucgugucuggcaacugcgacguugugaucggcauugugaacaauaccguguacgacccucugcagcccgagcuggacagcuucaaagaggaacuggacaaguacuuuaagaaccacacaagccccgacguggaccugggcgauaucagcggaaucaaugccagcgucgugaacauccagaaagagaucgaccggcugaacgagguggccaagaaucugaacgagagccugaucgaccugcaagaacuggggaaguacgagcaguacaucaaguggcccugguacaucuggcugggcuuuaucgccggacugauugccaucgugauggucacaaucaugcuguguugcaugaccagcugcuguagcugccugaagggcuguuguagcuguggcagcugcugcaaguucgacgaggacgauucugagcccgugcugaagggcgugaaacugcacuacaccugauaauaggcuggagccucgguggccuagcuucuugccccuugggccuccccccagccccuccuccccuuccugcacccguacccccguggucuuugaauaaagucugagugggcggcaaaaaaaaaaaaaaaaaaaaaaaaaaaaaaaaaaaaaaaaaaaaaaaaaaaaaaaaaaaaaaaaaaaaaaaaaaaaaaaaaaaaaaaaaaaaaaaaaaaaucuag

SEQ ID NO: 26672 - RNA, 4100 nt, Artificial Sequence
  SARS-CoV-2/Wuhan/WIV05/2019__EPI_ISL_402128 spike protein mRNA gc mod (1-1273)(K986P_V987P_N439K_D614G)
gggaaauaagagagaaaagaagaguaagaagaaauauaagaccccggcgccgccaccauguucguguuucuggugcugcugccccugguguccagccagugugugaaccugaccaccagaacacagcugccuccagccuacaccaacagcuucaccagaggcguguacuaccccgacaagguguucagauccagcgugcugcacucuacccaggaccuguuccugccuuucuucagcaacgugaccugguuccacgccauccacguguccggcaccaauggcaccaagagauucgacaaccccgugcugcccuucaacgacgggguguacuuugccagcaccgagaaguccaacaucaucagaggcuggaucuucggcaccacacuggacagcaagacccagagccugcugaucgugaacaacgccaccaacguggucaucaaagugugcgaguuccaguucugcaacgaccccuuccugggcgucuacuaccacaagaacaacaagagcuggauggaaagcgaguuccggguguacagcagcgccaacaacugcaccuucgaguacgugucccagccuuuccugauggaccuggaaggcaagcagggcaacuucaagaaccugcgcgaguucguguucaagaacaucgacggcuacuucaaaaucuacagcaagcacaccccuaucaaccucgugcgggaucugccucagggcuucucugcucuggaaccccugguggaucugcccaucggcaucaacaucacccgguuucagacacugcuggcccugcacagaagcuaccugacaccuggcgauagcagcagcggauggacagcuggugccgccgcuuacuaugugggcuaccugcagccuagaaccuuccugcugaaguacaacgagaacggcaccaucaccgacgccguggauugugcucuggauccucugagcgagacaaagugcacccugaaguccuucaccguggaaaagggcaucuaccagaccagcaacuuccgggugcagcccaccgaauccaucgugcgguuccccaauaucaccaaucugugccccuucggcgagguguucaaugccaccagauucgccucuguguacgccuggaaccggaagcggaucagcaauugcguggccgacuacuccgugcuguacaacuccgccagcuucagcaccuucaagugcuacggcguguccccuaccaagcugaacgaccugugcuucacaaacguguacgccgacagcuucgugauccggggagaugaagugcggcagauugccccuggacagacaggcaagaucgccgacuacaacuacaagcugcccgacgacuucaccggcugugugauugccuggaacagcaagaaccuggacuccaaagucggcggcaacuacaauuaccuguaccggcuguuccggaaguccaaucugaagcccuucgagcgggacaucagcaccgaaaucuaucaggccggcagcaccccuugcaacggcguggaaggcuucaacugcuacuucccacugcaguccuacggcuuucagcccacaaauggcgugggcuaucagcccuacagagugguggugcugagcuucgaacugcugcaugcuccugccacagugugcggcccuaagaaaagcaccaaucucgugaagaacaaaugcgugaacuucaacuucaacggccugaccggcaccggcgugcugacagagagcaacaagaaguuccugccauuccagcaguuuggccgggauaucgccgauaccacagacgccguuagagauccccagacacuggaaauccuggacaucaccccaugcagcuucggcggagugucugugaucaccccuggcaccaacaccagcaaucagguggcagugcuguaccagggcgugaacuguaccgaagugcccguggccauucacgccgaucagcugacaccuacauggcggguguacuccaccggcagcaauguguuucagaccagagccggcugucugaucggagccgagcacgugaacaauagcuacgagugcgacauccccaucggcgcuggcaucugugccagcuaccagacacagacaaacagccccagacgggcuagaagcguggccagccagagcaucauugccuacacaaugucucugggcgccgagaacagcguggccuacuccaacaacucuaucgcuauccccaccaacuucaccaucagcgugaccaccgagauccugccuguguccaugaccaagaccagcguggacugcaccauguacaucugcggcgauuccaccgagugcuccaaccugcugcugcaguacggcagcuucugcacccagcugaauagagcccugacagggaucgccguggaacaggacaagaacacccaagagguguucgcccaagugaagcaaaucuacaagaccccuccuaucaaggacuucggcggcuucaauuucagccagauucugcccgauccuagcaagcccagcaagcggagcuucaucgaggaccugcuguucaacaaagugacacuggccgacgccggcuucaucaagcaguauggcgauugucugggcgacauugccgccagggaucugauuugcgcccagaaguuuaacggacugacagugcugccuccucugcugaccgaugagaugaucgcccaguacacaucugcccugcuggccggcacaaucacaagcggcuggacauuuggagcuggcgccgcucugcagauccccuuugcuaugcagauggccuaccgguucaacggcaucggagugacccagaaugugcuguacgagaaccagaagcugaucgccaaccaguucaacagcgccaucggcaagauccaggacagccugagcagcacagcaagcgcccugggaaagcugcaggacguggucaaccagaaugcccaggcacugaacacccuggucaagcagcuguccuccaacuucggcgccaucagcucugugcugaacgauauccugagcagacuggacccuccugaggccgaggugcagaucgacagacugaucacaggcagacugcagagccuccagacauacgugacccagcagcugaucagagccgccgagauuagagccucugccaaucuggccgccaccaagaugucugagugugugcugggccagagcaagagaguggacuuuugcggcaagggcuaccaccugaugagcuucccucagucugccccucacggcgugguguuucugcacgugacauaugugcccgcucaagagaagaauuucaccaccgcuccagccaucugccacgacggcaaagcccacuuuccuagagaaggcguguucguguccaacggcacccauugguucgugacacagcggaacuucuacgagccccagaucaucaccaccgacaacaccuucgugucuggcaacugcgacguugugaucggcauugugaacaauaccguguacgacccucugcagcccgagcuggacagcuucaaagaggaacuggacaaguacuuuaagaaccacacaagccccgacguggaccugggcgauaucagcggaaucaaugccagcgucgugaacauccagaaagagaucgaccggcugaacgagguggccaagaaucugaacgagagccugaucgaccugcaagaacuggggaaguacgagcaguacaucaaguggcccugguacaucuggcugggcuuuaucgccggacugauugccaucgugauggucacaaucaugcuguguugcaugaccagcugcuguagcugccugaagggcuguuguagcuguggcagcugcugcaaguucgacgaggacgauucugagcccgugcugaagggcgugaaacugcacuacaccugauaauaggcuggagccucgguggccuagcuucuugccccuugggccuccccccagccccuccuccccuuccugcacccguacccccguggucuuugaauaaagucugagugggcggcaaaaaaaaaaaaaaaaaaaaaaaaaaaaaaaaaaaaaaaaaaaaaaaaaaaaaaaaaaaaaaaaaaaaaaaaaaaaaaaaaaaaaaaaaaaaaaaaaaaaucuag

SEQ ID NO: 26673 - RNA, 4100 nt, Artificial Sequence
  SARS-CoV-2/Wuhan/WIV05/2019__EPI_ISL_402128 spike protein mRNA gc mod (1-1273)(K986P_V987P_S477N_D614G)
gggaaauaagagagaaaagaagaguaagaagaaauauaagaccccggcgccgccaccauguucguguuucuggugcugcugccccugguguccagccagugugugaaccugaccaccagaacacagcugccuccagccuacaccaacagcuucaccagaggcguguacuaccccgacaagguguucagauccagcgugcugcacucuacccaggaccuguuccugccuuucuucagcaacgugaccugguuccacgccauccacguguccggcaccaauggcaccaagagauucgacaaccccgugcugcccuucaacgacgggguguacuuugccagcaccgagaaguccaacaucaucagaggcuggaucuucggcaccacacuggacagcaagacccagagccugcugaucgugaacaacgccaccaacguggucaucaaagugugcgaguuccaguucugcaacgaccccuuccugggcgucuacuaccacaagaacaacaagagcuggauggaaagcgaguuccggguguacagcagcgccaacaacugcaccuucgaguacgugucccagccuuuccugauggaccuggaaggcaagcagggcaacuucaagaaccugcgcgaguucguguucaagaacaucgacggcuacuucaaaaucuacagcaagcacaccccuaucaaccucgugcgggaucugccucagggcuucucugcucuggaaccccugguggaucugcccaucggcaucaacaucacccgguuucagacacugcuggcccugcacagaagcuaccugacaccuggcgauagcagcagcggauggacagcuggugccgccgcuuacuaugugggcuaccugcagccuagaaccuuccugcugaaguacaacgagaacggcaccaucaccgacgccguggauugugcucuggauccucugagcgagacaaagugcacccugaaguccuucaccguggaaaagggcaucuaccagaccagcaacuuccgggugcagcccaccgaauccaucgugcgguuccccaauaucaccaaucugugccccuucggcgagguguucaaugccaccagauucgccucuguguacgccuggaaccggaagcggaucagcaauugcguggccgacuacuccgugcuguacaacuccgccagcuucagcaccuucaagugcuacggcguguccccuaccaagcugaacgaccugugcuucacaaacguguacgccgacagcuucgugauccggggagaugaagugcggcagauugccccuggacagacaggcaagaucgccgacuacaacuacaagcugcccgacgacuucaccggcugugugauugccuggaacagcaacaaccuggacuccaaagucggcggcaacuacaauuaccuguaccggcuguuccggaaguccaaucugaagcccuucgagcgggacaucagcaccgaaaucuaucaggccggcaacaccccuugcaacggcguggaaggcuucaacugcuacuucccacugcaguccuacggcuuucagcccacaaauggcgugggcuaucagcccuacagagugguggugcugagcuucgaacugcugcaugcuccugccacagugugcggcccuaagaaaagcaccaaucucgugaagaacaaaugcgugaacuucaacuucaacggccugaccggcaccggcgugcugacagagagcaacaagaaguuccugccauuccagcaguuuggccgggauaucgccgauaccacagacgccguuagagauccccagacacuggaaauccuggacaucaccccaugcagcuucggcggagugucugugaucaccccuggcaccaacaccagcaaucagguggcagugcuguaccagggcgugaacuguaccgaagugcccguggccauucacgccgaucagcugacaccuacauggcggguguacuccaccggcagcaauguguuucagaccagagccggcugucugaucggagccgagcacgugaacaauagcuacgagugcgacauccccaucggcgcuggcaucugugccagcuaccagacacagacaaacagccccagacgggcuagaagcguggccagccagagcaucauugccuacacaaugucucugggcgccgagaacagcguggccuacuccaacaacucuaucgcuauccccaccaacuucaccaucagcgugaccaccgagauccugccuguguccaugaccaagaccagcguggacugcaccauguacaucugcggcgauuccaccgagugcuccaaccugcugcugcaguacggcagcuucugcacccagcugaauagagcccugacagggaucgccguggaacaggacaagaacacccaagagguguucgcccaagugaagcaaaucuacaagaccccuccuaucaaggacuucggcggcuucaauuucagccagauucugcccgauccuagcaagcccagcaagcggagcuucaucgaggaccugcuguucaacaaagugacacuggccgacgccggcuucaucaagcaguauggcgauugucugggcgacauugccgccagggaucugauuugcgcccagaaguuuaacggacugacagugcugccuccucugcugaccgaugagaugaucgcccaguacacaucugcccugcuggccggcacaaucacaagcggcuggacauuuggagcuggcgccgcucugcagauccccuuugcuaugcagauggccuaccgguucaacggcaucggagugacccagaaugugcuguacgagaaccagaagcugaucgccaaccaguucaacagcgccaucggcaagauccaggacagccugagcagcacagcaagcgcccugggaaagcugcaggacguggucaaccagaaugcccaggcacugaacacccuggucaagcagcuguccuccaacuucggcgccaucagcucugugcugaacgauauccugagcagacuggacccuccugaggccgaggugcagaucgacagacugaucacaggcagacugcagagccuccagacauacgugacccagcagcugaucagagccgccgagauuagagccucugccaaucuggccgccaccaagaugucugagugugugcugggccagagcaagagaguggacuuuugcggcaagggcuaccaccugaugagcuucccucagucugccccucacggcgugguguuucugcacgugacauaugugcccgcucaagagaagaauuucaccaccgcuccagccaucugccacgacggcaaagcccacuuuccuagagaaggcguguucguguccaacggcacccauugguucgugacacagcggaacuucuacgagccccagaucaucaccaccgacaacaccuucgugucuggcaacugcgacguugugaucggcauugugaacaauaccguguacgacccucugcagcccgagcuggacagcuucaaagaggaacuggacaaguacuuuaagaaccacacaagccccgacguggaccugggcgauaucagcggaaucaaugccagcgucgugaacauccagaaagagaucgaccggcugaacgagguggccaagaaucugaacgagagccugaucgaccugcaagaacuggggaaguacgagcaguacaucaaguggcccugguacaucuggcugggcuuuaucgccggacugauugccaucgugauggucacaaucaugcuguguugcaugaccagcugcuguagcugccugaagggcuguuguagcuguggcagcugcugcaaguucgacgaggacgauucugagcccgugcugaagggcgugaaacugcacuacaccugauaauaggcuggagccucgguggccuagcuucuugccccuugggccuccccccagccccuccuccccuuccugcacccguacccccguggucuuugaauaaagucugagugggcggcaaaaaaaaaaaaaaaaaaaaaaaaaaaaaaaaaaaaaaaaaaaaaaaaaaaaaaaaaaaaaaaaaaaaaaaaaaaaaaaaaaaaaaaaaaaaaaaaaaaaucuag

SEQ ID NO: 26674 - RNA, 4100 nt, Artificial Sequence
  SARS-CoV-2/Wuhan/WIV05/2019__EPI_ISL_402128 spike protein mRNA gc mod (1-1273)(K986P_V987P_N501Y_D614G)
gggaaauaagagagaaaagaagaguaagaagaaauauaagaccccggcgccgccaccauguucguguuucuggugcugcugccccugguguccagccagugugugaaccugaccaccagaacacagcugccuccagccuacaccaacagcuucaccagaggcguguacuaccccgacaagguguucagauccagcgugcugcacucuacccaggaccuguuccugccuuucuucagcaacgugaccugguuccacgccauccacguguccggcaccaauggcaccaagagauucgacaaccccgugcugcccuucaacgacgggguguacuuugccagcaccgagaaguccaacaucaucagaggcuggaucuucggcaccacacuggacagcaagacccagagccugcugaucgugaacaacgccaccaacguggucaucaaagugugcgaguuccaguucugcaacgaccccuuccugggcgucuacuaccacaagaacaacaagagcuggauggaaagcgaguuccggguguacagcagcgccaacaacugcaccuucgaguacgugucccagccuuuccugauggaccuggaaggcaagcagggcaacuucaagaaccugcgcgaguucguguucaagaacaucgacggcuacuucaaaaucuacagcaagcacaccccuaucaaccucgugcgggaucugccucagggcuucucugcucuggaaccccugguggaucugcccaucggcaucaacaucacccgguuucagacacugcuggcccugcacagaagcuaccugacaccuggcgauagcagcagcggauggacagcuggugccgccgcuuacuaugugggcuaccugcagccuagaaccuuccugcugaaguacaacgagaacggcaccaucaccgacgccguggauugugcucuggauccucugagcgagacaaagugcacccugaaguccuucaccguggaaaagggcaucuaccagaccagcaacuuccgggugcagcccaccgaauccaucgugcgguuccccaauaucaccaaucugugccccuucggcgagguguucaaugccaccagauucgccucuguguacgccuggaaccggaagcggaucagcaauugcguggccgacuacuccgugcuguacaacuccgccagcuucagcaccuucaagugcuacggcguguccccuaccaagcugaacgaccugugcuucacaaacguguacgccgacagcuucgugauccggggagaugaagugcggcagauugccccuggacagacaggcaagaucgccgacuacaacuacaagcugcccgacgacuucaccggcugugugauugccuggaacagcaacaaccuggacuccaaagucggcggcaacuacaauuaccuguaccggcuguuccggaaguccaaucugaagcccuucgagcgggacaucagcaccgaaaucuaucaggccggcagcaccccuugcaacggcguggaaggcuucaacugcuacuucccacugcaguccuacggcuuucagcccacauacggcgugggcuaucagcccuacagagugguggugcugagcuucgaacugcugcaugcuccugccacagugugcggcccuaagaaaagcaccaaucucgugaagaacaaaugcgugaacuucaacuucaacggccugaccggcaccggcgugcugacagagagcaacaagaaguuccugccauuccagcaguuuggccgggauaucgccgauaccacagacgccguuagagauccccagacacuggaaauccuggacaucaccccaugcagcuucggcggagugucugugaucaccccuggcaccaacaccagcaaucagguggcagugcuguaccagggcgugaacuguaccgaagugcccguggccauucacgccgaucagcugacaccuacauggcggguguacuccaccggcagcaauguguuucagaccagagccggcugucugaucggagccgagcacgugaacaauagcuacgagugcgacauccccaucggcgcuggcaucugugccagcuaccagacacagacaaacagccccagacgggcuagaagcguggccagccagagcaucauugccuacacaaugucucugggcgccgagaacagcguggccuacuccaacaacucuaucgcuauccccaccaacuucaccaucagcgugaccaccgagauccugccuguguccaugaccaagaccagcguggacugcaccauguacaucugcggcgauuccaccgagugcuccaaccugcugcugcaguacggcagcuucugcacccagcugaauagagcccugacagggaucgccguggaacaggacaagaacacccaagagguguucgcccaagugaagcaaaucuacaagaccccuccuaucaaggacuucggcggcuucaauuucagccagauucugcccgauccuagcaagcccagcaagcggagcuucaucgaggaccugcuguucaacaaagugacacuggccgacgccggcuucaucaagcaguauggcgauugucugggcgacauugccgccagggaucugauuugcgcccagaaguuuaacggacugacagugcugccuccucugcugaccgaugagaugaucgcccaguacacaucugcccugcuggccggcacaaucacaagcggcuggacauuuggagcuggcgccgcucugcagauccccuuugcuaugcagauggccuaccgguucaacggcaucggagugacccagaaugugcuguacgagaaccagaagcugaucgccaaccaguucaacagcgccaucggcaagauccaggacagccugagcagcacagcaagcgcccugggaaagcugcaggacguggucaaccagaaugcccaggcacugaacacccuggucaagcagcuguccuccaacuucggcgccaucagcucugugcugaacgauauccugagcagacuggacccuccugaggccgaggugcagaucgacagacugaucacaggcagacugcagagccuccagacauacgugacccagcagcugaucagagccgccgagauuagagccucugccaaucuggccgccaccaagaugucugagugugugcugggccagagcaagagaguggacuuuugcggcaagggcuaccaccugaugagcuucccucagucugccccucacggcgugguguuucugcacgugacauaugugcccgcucaagagaagaauuucaccaccgcuccagccaucugccacgacggcaaagcccacuuuccuagagaaggcguguucguguccaacggcacccauugguucgugacacagcggaacuucuacgagccccagaucaucaccaccgacaacaccuucgugucuggcaacugcgacguugugaucggcauugugaacaauaccguguacgacccucugcagcccgagcuggacagcuucaaagaggaacuggacaaguacuuuaagaaccacacaagccccgacguggaccugggcgauaucagcggaaucaaugccagcgucgugaacauccagaaagagaucgaccggcugaacgagguggccaagaaucugaacgagagccugaucgaccugcaagaacuggggaaguacgagcaguacaucaaguggcccugguacaucuggcugggcuuuaucgccggacugauugccaucgugauggucacaaucaugcuguguugcaugaccagcugcuguagcugccugaagggcuguuguagcuguggcagcugcugcaaguucgacgaggacgauucugagcccgugcugaagggcgugaaacugcacuacaccugauaauaggcuggagccucgguggccuagcuucuugccccuugggccuccccccagccccuccuccccuuccugcacccguacccccguggucuuugaauaaagucugagugggcggcaaaaaaaaaaaaaaaaaaaaaaaaaaaaaaaaaaaaaaaaaaaaaaaaaaaaaaaaaaaaaaaaaaaaaaaaaaaaaaaaaaaaaaaaaaaaaaaaaaaaucuag

SEQ ID NO: 26675 - RNA, 4094 nt, Artificial Sequence
  SARS-CoV-2/Wuhan/WIV05/2019__EPI_ISL_402128 spike protein mRNA gc mod (1-1273)(K986P_V987P_H69del_V70del_D614G)
gggaaauaagagagaaaagaagaguaagaagaaauauaagaccccggcgccgccaccauguucguguuucuggugcugcugccccugguguccagccagugugugaaccugaccaccagaacacagcugccuccagccuacaccaacagcuucaccagaggcguguacuaccccgacaagguguucagauccagcgugcugcacucuacccaggaccuguuccugccuuucuucagcaacgugaccugguuccacgccaucuccggcaccaauggcaccaagagauucgacaaccccgugcugcccuucaacgacgggguguacuuugccagcaccgagaaguccaacaucaucagaggcuggaucuucggcaccacacuggacagcaagacccagagccugcugaucgugaacaacgccaccaacguggucaucaaagugugcgaguuccaguucugcaacgaccccuuccugggcgucuacuaccacaagaacaacaagagcuggauggaaagcgaguuccggguguacagcagcgccaacaacugcaccuucgaguacgugucccagccuuuccugauggaccuggaaggcaagcagggcaacuucaagaaccugcgcgaguucguguucaagaacaucgacggcuacuucaaaaucuacagcaagcacaccccuaucaaccucgugcgggaucugccucagggcuucucugcucuggaaccccugguggaucugcccaucggcaucaacaucacccgguuucagacacugcuggcccugcacagaagcuaccugacaccuggcgauagcagcagcggauggacagcuggugccgccgcuuacuaugugggcuaccugcagccuagaaccuuccugcugaaguacaacgagaacggcaccaucaccgacgccguggauugugcucuggauccucugagcgagacaaagugcacccugaaguccuucaccguggaaaagggcaucuaccagaccagcaacuuccgggugcagcccaccgaauccaucgugcgguuccccaauaucaccaaucugugccccuucggcgagguguucaaugccaccagauucgccucuguguacgccuggaaccggaagcggaucagcaauugcguggccgacuacuccgugcuguacaacuccgccagcuucagcaccuucaagugcuacggcguguccccuaccaagcugaacgaccugugcuucacaaacguguacgccgacagcuucgugauccggggagaugaagugcggcagauugccccuggacagacaggcaagaucgccgacuacaacuacaagcugcccgacgacuucaccggcugugugauugccuggaacagcaacaaccuggacuccaaagucggcggcaacuacaauuaccuguaccggcuguuccggaaguccaaucugaagcccuucgagcgggacaucagcaccgaaaucuaucaggccggcagcaccccuugcaacggcguggaaggcuucaacugcuacuucccacugcaguccuacggcuuucagcccacaaauggcgugggcuaucagcccuacagagugguggugcugagcuucgaacugcugcaugcuccugccacagugugcggcccuaagaaaagcaccaaucucgugaagaacaaaugcgugaacuucaacuucaacggccugaccggcaccggcgugcugacagagagcaacaagaaguuccugccauuccagcaguuuggccgggauaucgccgauaccacagacgccguuagagauccccagacacuggaaauccuggacaucaccccaugcagcuucggcggagugucugugaucaccccuggcaccaacaccagcaaucagguggcagugcuguaccagggcgugaacuguaccgaagugcccguggccauucacgccgaucagcugacaccuacauggcggguguacuccaccggcagcaauguguuucagaccagagccggcugucugaucggagccgagcacgugaacaauagcuacgagugcgacauccccaucggcgcuggcaucugugccagcuaccagacacagacaaacagccccagacgggcuagaagcguggccagccagagcaucauugccuacacaaugucucugggcgccgagaacagcguggccuacuccaacaacucuaucgcuauccccaccaacuucaccaucagcgugaccaccgagauccugccuguguccaugaccaagaccagcguggacugcaccauguacaucugcggcgauuccaccgagugcuccaaccugcugcugcaguacggcagcuucugcacccagcugaauagagcccugacagggaucgccguggaacaggacaagaacacccaagagguguucgcccaagugaagcaaaucuacaagaccccuccuaucaaggacuucggcggcuucaauuucagccagauucugcccgauccuagcaagcccagcaagcggagcuucaucgaggaccugcuguucaacaaagugacacuggccgacgccggcuucaucaagcaguauggcgauugucugggcgacauugccgccagggaucugauuugcgcccagaaguuuaacggacugacagugcugccuccucugcugaccgaugagaugaucgcccaguacacaucugcccugcuggccggcacaaucacaagcggcuggacauuuggagcuggcgccgcucugcagauccccuuugcuaugcagauggccuaccgguucaacggcaucggagugacccagaaugugcuguacgagaaccagaagcugaucgccaaccaguucaacagcgccaucggcaagauccaggacagccugagcagcacagcaagcgcccugggaaagcugcaggacguggucaaccagaaugcccaggcacugaacacccuggucaagcagcuguccuccaacuucggcgccaucagcucugugcugaacgauauccugagcagacuggacccuccugaggccgaggugcagaucgacagacugaucacaggcagacugcagagccuccagacauacgugacccagcagcugaucagagccgccgagauuagagccucugccaaucuggccgccaccaagaugucugagugugugcugggccagagcaagagaguggacuuuugcggcaagggcuaccaccugaugagcuucccucagucugccccucacggcgugguguuucugcacgugacauaugugcccgcucaagagaagaauuucaccaccgcuccagccaucugccacgacggcaaagcccacuuuccuagagaaggcguguucguguccaacggcacccauugguucgugacacagcggaacuucuacgagccccagaucaucaccaccgacaacaccuucgugucuggcaacugcgacguugugaucggcauugugaacaauaccguguacgacccucugcagcccgagcuggacagcuucaaagaggaacuggacaaguacuuuaagaaccacacaagccccgacguggaccugggcgauaucagcggaaucaaugccagcgucgugaacauccagaaagagaucgaccggcugaacgagguggccaagaaucugaacgagagccugaucgaccugcaagaacuggggaaguacgagcaguacaucaaguggcccugguacaucuggcugggcuuuaucgccggacugauugccaucgugauggucacaaucaugcuguguugcaugaccagcugcuguagcugccugaagggcuguuguagcuguggcagcugcugcaaguucgacgaggacgauucugagcccgugcugaagggcgugaaacugcacuacaccugauaauaggcuggagccucgguggccuagcuucuugccccuugggccuccccccagccccuccuccccuuccugcacccguacccccguggucuuugaauaaagucugagugggcggcaaaaaaaaaaaaaaaaaaaaaaaaaaaaaaaaaaaaaaaaaaaaaaaaaaaaaaaaaaaaaaaaaaaaaaaaaaaaaaaaaaaaaaaaaaaaaaaaaaaaucuag

SEQ ID NO: 26676 - RNA, 4100 nt, Artificial Sequence
  SARS-CoV-2/Wuhan/WIV05/2019__EPI_ISL_402128 spike protein mRNA gc mod (1-1273)(K986P_V987P_Y453F_D614G)
gggaaauaagagagaaaagaagaguaagaagaaauauaagaccccggcgccgccaccauguucguguuucuggugcugcugccccugguguccagccagugugugaaccugaccaccagaacacagcugccuccagccuacaccaacagcuucaccagaggcguguacuaccccgacaagguguucagauccagcgugcugcacucuacccaggaccuguuccugccuuucuucagcaacgugaccugguuccacgccauccacguguccggcaccaauggcaccaagagauucgacaaccccgugcugcccuucaacgacgggguguacuuugccagcaccgagaaguccaacaucaucagaggcuggaucuucggcaccacacuggacagcaagacccagagccugcugaucgugaacaacgccaccaacguggucaucaaagugugcgaguuccaguucugcaacgaccccuuccugggcgucuacuaccacaagaacaacaagagcuggauggaaagcgaguuccggguguacagcagcgccaacaacugcaccuucgaguacgugucccagccuuuccugauggaccuggaaggcaagcagggcaacuucaagaaccugcgcgaguucguguucaagaacaucgacggcuacuucaaaaucuacagcaagcacaccccuaucaaccucgugcgggaucugccucagggcuucucugcucuggaaccccugguggaucugcccaucggcaucaacaucacccgguuucagacacugcuggcccugcacagaagcuaccugacaccuggcgauagcagcagcggauggacagcuggugccgccgcuuacuaugugggcuaccugcagccuagaaccuuccugcugaaguacaacgagaacggcaccaucaccgacgccguggauugugcucuggauccucugagcgagacaaagugcacccugaaguccuucaccguggaaaagggcaucuaccagaccagcaacuuccgggugcagcccaccgaauccaucgugcgguuccccaauaucaccaaucugugccccuucggcgagguguucaaugccaccagauucgccucuguguacgccuggaaccggaagcggaucagcaauugcguggccgacuacuccgugcuguacaacuccgccagcuucagcaccuucaagugcuacggcguguccccuaccaagcugaacgaccugugcuucacaaacguguacgccgacagcuucgugauccggggagaugaagugcggcagauugccccuggacagacaggcaagaucgccgacuacaacuacaagcugcccgacgacuucaccggcugugugauugccuggaacagcaacaaccuggacuccaaagucggcggcaacuacaauuaccuguuccggcuguuccggaaguccaaucugaagcccuucgagcgggacaucagcaccgaaaucuaucaggccggcagcaccccuugcaacggcguggaaggcuucaacugcuacuucccacugcaguccuacggcuuucagcccacaaauggcgugggcuaucagcccuacagagugguggugcugagcuucgaacugcugcaugcuccugccacagugugcggcccuaagaaaagcaccaaucucgugaagaacaaaugcgugaacuucaacuucaacggccugaccggcaccggcgugcugacagagagcaacaagaaguuccugccauuccagcaguuuggccgggauaucgccgauaccacagacgccguuagagauccccagacacuggaaauccuggacaucaccccaugcagcuucggcggagugucugugaucaccccuggcaccaacaccagcaaucagguggcagugcuguaccagggcgugaacuguaccgaagugcccguggccauucacgccgaucagcugacaccuacauggcggguguacuccaccggcagcaauguguuucagaccagagccggcugucugaucggagccgagcacgugaacaauagcuacgagugcgacauccccaucggcgcuggcaucugugccagcuaccagacacagacaaacagccccagacgggcuagaagcguggccagccagagcaucauugccuacacaaugucucugggcgccgagaacagcguggccuacuccaacaacucuaucgcuauccccaccaacuucaccaucagcgugaccaccgagauccugccuguguccaugaccaagaccagcguggacugcaccauguacaucugcggcgauuccaccgagugcuccaaccugcugcugcaguacggcagcuucugcacccagcugaauagagcccugacagggaucgccguggaacaggacaagaacacccaagagguguucgcccaagugaagcaaaucuacaagaccccuccuaucaaggacuucggcggcuucaauuucagccagauucugcccgauccuagcaagcccagcaagcggagcuucaucgaggaccugcuguucaacaaagugacacuggccgacgccggcuucaucaagcaguauggcgauugucugggcgacauugccgccagggaucugauuugcgcccagaaguuuaacggacugacagugcugccuccucugcugaccgaugagaugaucgcccaguacacaucugcccugcuggccggcacaaucacaagcggcuggacauuuggagcuggcgccgcucugcagauccccuuugcuaugcagauggccuaccgguucaacggcaucggagugacccagaaugugcuguacgagaaccagaagcugaucgccaaccaguucaacagcgccaucggcaagauccaggacagccugagcagcacagcaagcgcccugggaaagcugcaggacguggucaaccagaaugcccaggcacugaacacccuggucaagcagcuguccuccaacuucggcgccaucagcucugugcugaacgauauccugagcagacuggacccuccugaggccgaggugcagaucgacagacugaucacaggcagacugcagagccuccagacauacgugacccagcagcugaucagagccgccgagauuagagccucugccaaucuggccgccaccaagaugucugagugugugcugggccagagcaagagaguggacuuuugcggcaagggcuaccaccugaugagcuucccucagucugccccucacggcgugguguuucugcacgugacauaugugcccgcucaagagaagaauuucaccaccgcuccagccaucugccacgacggcaaagcccacuuuccuagagaaggcguguucguguccaacggcacccauugguucgugacacagcggaacuucuacgagccccagaucaucaccaccgacaacaccuucgugucuggcaacugcgacguugugaucggcauugugaacaauaccguguacgacccucugcagcccgagcuggacagcuucaaagaggaacuggacaaguacuuuaagaaccacacaagccccgacguggaccugggcgauaucagcggaaucaaugccagcgucgugaacauccagaaagagaucgaccggcugaacgagguggccaagaaucugaacgagagccugaucgaccugcaagaacuggggaaguacgagcaguacaucaaguggcccugguacaucuggcugggcuuuaucgccggacugauugccaucgugauggucacaaucaugcuguguugcaugaccagcugcuguagcugccugaagggcuguuguagcuguggcagcugcugcaaguucgacgaggacgauucugagcccgugcugaagggcgugaaacugcacuacaccugauaauaggcuggagccucgguggccuagcuucuugccccuugggccuccccccagccccuccuccccuuccugcacccguacccccguggucuuugaauaaagucugagugggcggcaaaaaaaaaaaaaaaaaaaaaaaaaaaaaaaaaaaaaaaaaaaaaaaaaaaaaaaaaaaaaaaaaaaaaaaaaaaaaaaaaaaaaaaaaaaaaaaaaaaaucuag

SEQ ID NO: 26677 - RNA, 4100 nt, Artificial Sequence
  SARS-CoV-2/Wuhan/WIV05/2019__EPI_ISL_402128 spike protein mRNA gc mod (1-1273)(K986P_V987P_D614G_I692V)
gggaaauaagagagaaaagaagaguaagaagaaauauaagaccccggcgccgccaccauguucguguuucuggugcugcugccccugguguccagccagugugugaaccugaccaccagaacacagcugccuccagccuacaccaacagcuucaccagaggcguguacuaccccgacaagguguucagauccagcgugcugcacucuacccaggaccuguuccugccuuucuucagcaacgugaccugguuccacgccauccacguguccggcaccaauggcaccaagagauucgacaaccccgugcugcccuucaacgacgggguguacuuugccagcaccgagaaguccaacaucaucagaggcuggaucuucggcaccacacuggacagcaagacccagagccugcugaucgugaacaacgccaccaacguggucaucaaagugugcgaguuccaguucugcaacgaccccuuccugggcgucuacuaccacaagaacaacaagagcuggauggaaagcgaguuccggguguacagcagcgccaacaacugcaccuucgaguacgugucccagccuuuccugauggaccuggaaggcaagcagggcaacuucaagaaccugcgcgaguucguguucaagaacaucgacggcuacuucaaaaucuacagcaagcacaccccuaucaaccucgugcgggaucugccucagggcuucucugcucuggaaccccugguggaucugcccaucggcaucaacaucacccgguuucagacacugcuggcccugcacagaagcuaccugacaccuggcgauagcagcagcggauggacagcuggugccgccgcuuacuaugugggcuaccugcagccuagaaccuuccugcugaaguacaacgagaacggcaccaucaccgacgccguggauugugcucuggauccucugagcgagacaaagugcacccugaaguccuucaccguggaaaagggcaucuaccagaccagcaacuuccgggugcagcccaccgaauccaucgugcgguuccccaauaucaccaaucugugccccuucggcgagguguucaaugccaccagauucgccucuguguacgccuggaaccggaagcggaucagcaauugcguggccgacuacuccgugcuguacaacuccgccagcuucagcaccuucaagugcuacggcguguccccuaccaagcugaacgaccugugcuucacaaacguguacgccgacagcuucgugauccggggagaugaagugcggcagauugccccuggacagacaggcaagaucgccgacuacaacuacaagcugcccgacgacuucaccggcugugugauugccuggaacagcaacaaccuggacuccaaagucggcggcaacuacaauuaccuguaccggcuguuccggaaguccaaucugaagcccuucgagcgggacaucagcaccgaaaucuaucaggccggcagcaccccuugcaacggcguggaaggcuucaacugcuacuucccacugcaguccuacggcuuucagcccacaaauggcgugggcuaucagcccuacagagugguggugcugagcuucgaacugcugcaugcuccugccacagugugcggcccuaagaaaagcaccaaucucgugaagaacaaaugcgugaacuucaacuucaacggccugaccggcaccggcgugcugacagagagcaacaagaaguuccugccauuccagcaguuuggccgggauaucgccgauaccacagacgccguuagagauccccagacacuggaaauccuggacaucaccccaugcagcuucggcggagugucugugaucaccccuggcaccaacaccagcaaucagguggcagugcuguaccagggcgugaacuguaccgaagugcccguggccauucacgccgaucagcugacaccuacauggcggguguacuccaccggcagcaauguguuucagaccagagccggcugucugaucggagccgagcacgugaacaauagcuacgagugcgacauccccaucggcgcuggcaucugugccagcuaccagacacagacaaacagccccagacgggcuagaagcguggccagccagagcgugauugccuacacaaugucucugggcgccgagaacagcguggccuacuccaacaacucuaucgcuauccccaccaacuucaccaucagcgugaccaccgagauccugccuguguccaugaccaagaccagcguggacugcaccauguacaucugcggcgauuccaccgagugcuccaaccugcugcugcaguacggcagcuucugcacccagcugaauagagcccugacagggaucgccguggaacaggacaagaacacccaagagguguucgcccaagugaagcaaaucuacaagaccccuccuaucaaggacuucggcggcuucaauuucagccagauucugcccgauccuagcaagcccagcaagcggagcuucaucgaggaccugcuguucaacaaagugacacuggccgacgccggcuucaucaagcaguauggcgauugucugggcgacauugccgccagggaucugauuugcgcccagaaguuuaacggacugacagugcugccuccucugcugaccgaugagaugaucgcccaguacacaucugcccugcuggccggcacaaucacaagcggcuggacauuuggagcuggcgccgcucugcagauccccuuugcuaugcagauggccuaccgguucaacggcaucggagugacccagaaugugcuguacgagaaccagaagcugaucgccaaccaguucaacagcgccaucggcaagauccaggacagccugagcagcacagcaagcgcccugggaaagcugcaggacguggucaaccagaaugcccaggcacugaacacccuggucaagcagcuguccuccaacuucggcgccaucagcucugugcugaacgauauccugagcagacuggacccuccugaggccgaggugcagaucgacagacugaucacaggcagacugcagagccuccagacauacgugacccagcagcugaucagagccgccgagauuagagccucugccaaucuggccgccaccaagaugucugagugugugcugggccagagcaagagaguggacuuuugcggcaagggcuaccaccugaugagcuucccucagucugccccucacggcgugguguuucugcacgugacauaugugcccgcucaagagaagaauuucaccaccgcuccagccaucugccacgacggcaaagcccacuuuccuagagaaggcguguucguguccaacggcacccauugguucgugacacagcggaacuucuacgagccccagaucaucaccaccgacaacaccuucgugucuggcaacugcgacguugugaucggcauugugaacaauaccguguacgacccucugcagcccgagcuggacagcuucaaagaggaacuggacaaguacuuuaagaaccacacaagccccgacguggaccugggcgauaucagcggaaucaaugccagcgucgugaacauccagaaagagaucgaccggcugaacgagguggccaagaaucugaacgagagccugaucgaccugcaagaacuggggaaguacgagcaguacaucaaguggcccugguacaucuggcugggcuuuaucgccggacugauugccaucgugauggucacaaucaugcuguguugcaugaccagcugcuguagcugccugaagggcuguuguagcuguggcagcugcugcaaguucgacgaggacgauucugagcccgugcugaagggcgugaaacugcacuacaccugauaauaggcuggagccucgguggccuagcuucuugccccuugggccuccccccagccccuccuccccuuccugcacccguacccccguggucuuugaauaaagucugagugggcggcaaaaaaaaaaaaaaaaaaaaaaaaaaaaaaaaaaaaaaaaaaaaaaaaaaaaaaaaaaaaaaaaaaaaaaaaaaaaaaaaaaaaaaaaaaaaaaaaaaaaucuag

SEQ ID NO: 26678 - RNA, 4100 nt, Artificial Sequence
  SARS-CoV-2/Wuhan/WIV05/2019__EPI_ISL_402128 spike protein mRNA gc mod (1-1273)(K986P_V987P_D614G_M1229I)
gggaaauaagagagaaaagaagaguaagaagaaauauaagaccccggcgccgccaccauguucguguuucuggugcugcugccccugguguccagccagugugugaaccugaccaccagaacacagcugccuccagccuacaccaacagcuucaccagaggcguguacuaccccgacaagguguucagauccagcgugcugcacucuacccaggaccuguuccugccuuucuucagcaacgugaccugguuccacgccauccacguguccggcaccaauggcaccaagagauucgacaaccccgugcugcccuucaacgacgggguguacuuugccagcaccgagaaguccaacaucaucagaggcuggaucuucggcaccacacuggacagcaagacccagagccugcugaucgugaacaacgccaccaacguggucaucaaagugugcgaguuccaguucugcaacgaccccuuccugggcgucuacuaccacaagaacaacaagagcuggauggaaagcgaguuccggguguacagcagcgccaacaacugcaccuucgaguacgugucccagccuuuccugauggaccuggaaggcaagcagggcaacuucaagaaccugcgcgaguucguguucaagaacaucgacggcuacuucaaaaucuacagcaagcacaccccuaucaaccucgugcgggaucugccucagggcuucucugcucuggaaccccugguggaucugcccaucggcaucaacaucacccgguuucagacacugcuggcccugcacagaagcuaccugacaccuggcgauagcagcagcggauggacagcuggugccgccgcuuacuaugugggcuaccugcagccuagaaccuuccugcugaaguacaacgagaacggcaccaucaccgacgccguggauugugcucuggauccucugagcgagacaaagugcacccugaaguccuucaccguggaaaagggcaucuaccagaccagcaacuuccgggugcagcccaccgaauccaucgugcgguuccccaauaucaccaaucugugccccuucggcgagguguucaaugccaccagauucgccucuguguacgccuggaaccggaagcggaucagcaauugcguggccgacuacuccgugcuguacaacuccgccagcuucagcaccuucaagugcuacggcguguccccuaccaagcugaacgaccugugcuucacaaacguguacgccgacagcuucgugauccggggagaugaagugcggcagauugccccuggacagacaggcaagaucgccgacuacaacuacaagcugcccgacgacuucaccggcugugugauugccuggaacagcaacaaccuggacuccaaagucggcggcaacuacaauuaccuguaccggcuguuccggaaguccaaucugaagcccuucgagcgggacaucagcaccgaaaucuaucaggccggcagcaccccuugcaacggcguggaaggcuucaacugcuacuucccacugcaguccuacggcuuucagcccacaaauggcgugggcuaucagcccuacagagugguggugcugagcuucgaacugcugcaugcuccugccacagugugcggcccuaagaaaagcaccaaucucgugaagaacaaaugcgugaacuucaacuucaacggccugaccggcaccggcgugcugacagagagcaacaagaaguuccugccauuccagcaguuuggccgggauaucgccgauaccacagacgccguuagagauccccagacacuggaaauccuggacaucaccccaugcagcuucggcggagugucugugaucaccccuggcaccaacaccagcaaucagguggcagugcuguaccagggcgugaacuguaccgaagugcccguggccauucacgccgaucagcugacaccuacauggcggguguacuccaccggcagcaauguguuucagaccagagccggcugucugaucggagccgagcacgugaacaauagcuacgagugcgacauccccaucggcgcuggcaucugugccagcuaccagacacagacaaacagccccagacgggcuagaagcguggccagccagagcaucauugccuacacaaugucucugggcgccgagaacagcguggccuacuccaacaacucuaucgcuauccccaccaacuucaccaucagcgugaccaccgagauccugccuguguccaugaccaagaccagcguggacugcaccauguacaucugcggcgauuccaccgagugcuccaaccugcugcugcaguacggcagcuucugcacccagcugaauagagcccugacagggaucgccguggaacaggacaagaacacccaagagguguucgcccaagugaagcaaaucuacaagaccccuccuaucaaggacuucggcggcuucaauuucagccagauucugcccgauccuagcaagcccagcaagcggagcuucaucgaggaccugcuguucaacaaagugacacuggccgacgccggcuucaucaagcaguauggcgauugucugggcgacauugccgccagggaucugauuugcgcccagaaguuuaacggacugacagugcugccuccucugcugaccgaugagaugaucgcccaguacacaucugcccugcuggccggcacaaucacaagcggcuggacauuuggagcuggcgccgcucugcagauccccuuugcuaugcagauggccuaccgguucaacggcaucggagugacccagaaugugcuguacgagaaccagaagcugaucgccaaccaguucaacagcgccaucggcaagauccaggacagccugagcagcacagcaagcgcccugggaaagcugcaggacguggucaaccagaaugcccaggcacugaacacccuggucaagcagcuguccuccaacuucggcgccaucagcucugugcugaacgauauccugagcagacuggacccuccugaggccgaggugcagaucgacagacugaucacaggcagacugcagagccuccagacauacgugacccagcagcugaucagagccgccgagauuagagccucugccaaucuggccgccaccaagaugucugagugugugcugggccagagcaagagaguggacuuuugcggcaagggcuaccaccugaugagcuucccucagucugccccucacggcgugguguuucugcacgugacauaugugcccgcucaagagaagaauuucaccaccgcuccagccaucugccacgacggcaaagcccacuuuccuagagaaggcguguucguguccaacggcacccauugguucgugacacagcggaacuucuacgagccccagaucaucaccaccgacaacaccuucgugucuggcaacugcgacguugugaucggcauugugaacaauaccguguacgacccucugcagcccgagcuggacagcuucaaagaggaacuggacaaguacuuuaagaaccacacaagccccgacguggaccugggcgauaucagcggaaucaaugccagcgucgugaacauccagaaagagaucgaccggcugaacgagguggccaagaaucugaacgagagccugaucgaccugcaagaacuggggaaguacgagcaguacaucaaguggcccugguacaucuggcugggcuuuaucgccggacugauugccaucgugaucgucacaaucaugcuguguugcaugaccagcugcuguagcugccugaagggcuguuguagcuguggcagcugcugcaaguucgacgaggacgauucugagcccgugcugaagggcgugaaacugcacuacaccugauaauaggcuggagccucgguggccuagcuucuugccccuugggccuccccccagccccuccuccccuuccugcacccguacccccguggucuuugaauaaagucugagugggcggcaaaaaaaaaaaaaaaaaaaaaaaaaaaaaaaaaaaaaaaaaaaaaaaaaaaaaaaaaaaaaaaaaaaaaaaaaaaaaaaaaaaaaaaaaaaaaaaaaaaaucuag

SEQ ID NO: 26679 - RNA, 4094 nt, Artificial Sequence
  SARS-CoV-2/Wuhan/WIV05/2019__EPI_ISL_402128 spike protein mRNA gc mod (1-1273)(K986P_V987P_H69del_V70del_A222V_Y453F_S477N_D614G_I692V)
gggaaauaagagagaaaagaagaguaagaagaaauauaagaccccggcgccgccaccauguucguguuucuggugcugcugccccugguguccagccagugugugaaccugaccaccagaacacagcugccuccagccuacaccaacagcuucaccagaggcguguacuaccccgacaagguguucagauccagcgugcugcacucuacccaggaccuguuccugccuuucuucagcaacgugaccugguuccacgccaucuccggcaccaauggcaccaagagauucgacaaccccgugcugcccuucaacgacgggguguacuuugccagcaccgagaaguccaacaucaucagaggcuggaucuucggcaccacacuggacagcaagacccagagccugcugaucgugaacaacgccaccaacguggucaucaaagugugcgaguuccaguucugcaacgaccccuuccugggcgucuacuaccacaagaacaacaagagcuggauggaaagcgaguuccggguguacagcagcgccaacaacugcaccuucgaguacgugucccagccuuuccugauggaccuggaaggcaagcagggcaacuucaagaaccugcgcgaguucguguucaagaacaucgacggcuacuucaaaaucuacagcaagcacaccccuaucaaccucgugcgggaucugccucagggcuucucugugcuggaaccccugguggaucugcccaucggcaucaacaucacccgguuucagacacugcuggcccugcacagaagcuaccugacaccuggcgauagcagcagcggauggacagcuggugccgccgcuuacuaugugggcuaccugcagccuagaaccuuccugcugaaguacaacgagaacggcaccaucaccgacgccguggauugugcucuggauccucugagcgagacaaagugcacccugaaguccuucaccguggaaaagggcaucuaccagaccagcaacuuccgggugcagcccaccgaauccaucgugcgguuccccaauaucaccaaucugugccccuucggcgagguguucaaugccaccagauucgccucuguguacgccuggaaccggaagcggaucagcaauugcguggccgacuacuccgugcuguacaacuccgccagcuucagcaccuucaagugcuacggcguguccccuaccaagcugaacgaccugugcuucacaaacguguacgccgacagcuucgugauccggggagaugaagugcggcagauugccccuggacagacaggcaagaucgccgacuacaacuacaagcugcccgacgacuucaccggcugugugauugccuggaacagcaacaaccuggacuccaaagucggcggcaacuacaauuaccuguuccggcuguuccggaaguccaaucugaagcccuucgagcgggacaucagcaccgaaaucuaucaggccggcaacaccccuugcaacggcguggaaggcuucaacugcuacuucccacugcaguccuacggcuuucagcccacaaauggcgugggcuaucagcccuacagagugguggugcugagcuucgaacugcugcaugcuccugccacagugugcggcccuaagaaaagcaccaaucucgugaagaacaaaugcgugaacuucaacuucaacggccugaccggcaccggcgugcugacagagagcaacaagaaguuccugccauuccagcaguuuggccgggauaucgccgauaccacagacgccguuagagauccccagacacuggaaauccuggacaucaccccaugcagcuucggcggagugucugugaucaccccuggcaccaacaccagcaaucagguggcagugcuguaccagggcgugaacuguaccgaagugcccguggccauucacgccgaucagcugacaccuacauggcggguguacuccaccggcagcaauguguuucagaccagagccggcugucugaucggagccgagcacgugaacaauagcuacgagugcgacauccccaucggcgcuggcaucugugccagcuaccagacacagacaaacagccccagacgggcuagaagcguggccagccagagcgugauugccuacacaaugucucugggcgccgagaacagcguggccuacuccaacaacucuaucgcuauccccaccaacuucaccaucagcgugaccaccgagauccugccuguguccaugaccaagaccagcguggacugcaccauguacaucugcggcgauuccaccgagugcuccaaccugcugcugcaguacggcagcuucugcacccagcugaauagagcccugacagggaucgccguggaacaggacaagaacacccaagagguguucgcccaagugaagcaaaucuacaagaccccuccuaucaaggacuucggcggcuucaauuucagccagauucugcccgauccuagcaagcccagcaagcggagcuucaucgaggaccugcuguucaacaaagugacacuggccgacgccggcuucaucaagcaguauggcgauugucugggcgacauugccgccagggaucugauuugcgcccagaaguuuaacggacugacagugcugccuccucugcugaccgaugagaugaucgcccaguacacaucugcccugcuggccggcacaaucacaagcggcuggacauuuggagcuggcgccgcucugcagauccccuuugcuaugcagauggccuaccgguucaacggcaucggagugacccagaaugugcuguacgagaaccagaagcugaucgccaaccaguucaacagcgccaucggcaagauccaggacagccugagcagcacagcaagcgcccugggaaagcugcaggacguggucaaccagaaugcccaggcacugaacacccuggucaagcagcuguccuccaacuucggcgccaucagcucugugcugaacgauauccugagcagacuggacccuccugaggccgaggugcagaucgacagacugaucacaggcagacugcagagccuccagacauacgugacccagcagcugaucagagccgccgagauuagagccucugccaaucuggccgccaccaagaugucugagugugugcugggccagagcaagagaguggacuuuugcggcaagggcuaccaccugaugagcuucccucagucugccccucacggcgugguguuucugcacgugacauaugugcccgcucaagagaagaauuucaccaccgcuccagccaucugccacgacggcaaagcccacuuuccuagagaaggcguguucguguccaacggcacccauugguucgugacacagcggaacuucuacgagccccagaucaucaccaccgacaacaccuucgugucuggcaacugcgacguugugaucggcauugugaacaauaccguguacgacccucugcagcccgagcuggacagcuucaaagaggaacuggacaaguacuuuaagaaccacacaagccccgacguggaccugggcgauaucagcggaaucaaugccagcgucgugaacauccagaaagagaucgaccggcugaacgagguggccaagaaucugaacgagagccugaucgaccugcaagaacuggggaaguacgagcaguacaucaaguggcccugguacaucuggcugggcuuuaucgccggacugauugccaucgugauggucacaaucaugcuguguugcaugaccagcugcuguagcugccugaagggcuguuguagcuguggcagcugcugcaaguucgacgaggacgauucugagcccgugcugaagggcgugaaacugcacuacaccugauaauaggcuggagccucgguggccuagcuucuugccccuugggccuccccccagccccuccuccccuuccugcacccguacccccguggucuuugaauaaagucugagugggcggcaaaaaaaaaaaaaaaaaaaaaaaaaaaaaaaaaaaaaaaaaaaaaaaaaaaaaaaaaaaaaaaaaaaaaaaaaaaaaaaaaaaaaaaaaaaaaaaaaaaaucuag

SEQ ID NO: 26680 - RNA, 4094 nt, Artificial Sequence
  SARS-CoV-2/Wuhan/WIV05/2019__EPI_ISL_402128 spike protein mRNA gc mod (1-1273)(K986P_V987P_H69del_V70del_Y453F_D614G_I692V_M1229I)
gggaaauaagagagaaaagaagaguaagaagaaauauaagaccccggcgccgccaccauguucguguuucuggugcugcugccccugguguccagccagugugugaaccugaccaccagaacacagcugccuccagccuacaccaacagcuucaccagaggcguguacuaccccgacaagguguucagauccagcgugcugcacucuacccaggaccuguuccugccuuucuucagcaacgugaccugguuccacgccaucuccggcaccaauggcaccaagagauucgacaaccccgugcugcccuucaacgacgggguguacuuugccagcaccgagaaguccaacaucaucagaggcuggaucuucggcaccacacuggacagcaagacccagagccugcugaucgugaacaacgccaccaacguggucaucaaagugugcgaguuccaguucugcaacgaccccuuccugggcgucuacuaccacaagaacaacaagagcuggauggaaagcgaguuccggguguacagcagcgccaacaacugcaccuucgaguacgugucccagccuuuccugauggaccuggaaggcaagcagggcaacuucaagaaccugcgcgaguucguguucaagaacaucgacggcuacuucaaaaucuacagcaagcacaccccuaucaaccucgugcgggaucugccucagggcuucucugcucuggaaccccugguggaucugcccaucggcaucaacaucacccgguuucagacacugcuggcccugcacagaagcuaccugacaccuggcgauagcagcagcggauggacagcuggugccgccgcuuacuaugugggcuaccugcagccuagaaccuuccugcugaaguacaacgagaacggcaccaucaccgacgccguggauugugcucuggauccucugagcgagacaaagugcacccugaaguccuucaccguggaaaagggcaucuaccagaccagcaacuuccgggugcagcccaccgaauccaucgugcgguuccccaauaucaccaaucugugccccuucggcgagguguucaaugccaccagauucgccucuguguacgccuggaaccggaagcggaucagcaauugcguggccgacuacuccgugcuguacaacuccgccagcuucagcaccuucaagugcuacggcguguccccuaccaagcugaacgaccugugcuucacaaacguguacgccgacagcuucgugauccggggagaugaagugcggcagauugccccuggacagacaggcaagaucgccgacuacaacuacaagcugcccgacgacuucaccggcugugugauugccuggaacagcaacaaccuggacuccaaagucggcggcaacuacaauuaccuguuccggcuguuccggaaguccaaucugaagcccuucgagcgggacaucagcaccgaaaucuaucaggccggcagcaccccuugcaacggcguggaaggcuucaacugcuacuucccacugcaguccuacggcuuucagcccacaaauggcgugggcuaucagcccuacagagugguggugcugagcuucgaacugcugcaugcuccugccacagugugcggcccuaagaaaagcaccaaucucgugaagaacaaaugcgugaacuucaacuucaacggccugaccggcaccggcgugcugacagagagcaacaagaaguuccugccauuccagcaguuuggccgggauaucgccgauaccacagacgccguuagagauccccagacacuggaaauccuggacaucaccccaugcagcuucggcggagugucugugaucaccccuggcaccaacaccagcaaucagguggcagugcuguaccagggcgugaacuguaccgaagugcccguggccauucacgccgaucagcugacaccuacauggcggguguacuccaccggcagcaauguguuucagaccagagccggcugucugaucggagccgagcacgugaacaauagcuacgagugcgacauccccaucggcgcuggcaucugugccagcuaccagacacagacaaacagccccagacgggcuagaagcguggccagccagagcgugauugccuacacaaugucucugggcgccgagaacagcguggccuacuccaacaacucuaucgcuauccccaccaacuucaccaucagcgugaccaccgagauccugccuguguccaugaccaagaccagcguggacugcaccauguacaucugcggcgauuccaccgagugcuccaaccugcugcugcaguacggcagcuucugcacccagcugaauagagcccugacagggaucgccguggaacaggacaagaacacccaagagguguucgcccaagugaagcaaaucuacaagaccccuccuaucaaggacuucggcggcuucaauuucagccagauucugcccgauccuagcaagcccagcaagcggagcuucaucgaggaccugcuguucaacaaagugacacuggccgacgccggcuucaucaagcaguauggcgauugucugggcgacauugccgccagggaucugauuugcgcccagaaguuuaacggacugacagugcugccuccucugcugaccgaugagaugaucgcccaguacacaucugcccugcuggccggcacaaucacaagcggcuggacauuuggagcuggcgccgcucugcagauccccuuugcuaugcagauggccuaccgguucaacggcaucggagugacccagaaugugcuguacgagaaccagaagcugaucgccaaccaguucaacagcgccaucggcaagauccaggacagccugagcagcacagcaagcgcccugggaaagcugcaggacguggucaaccagaaugcccaggcacugaacacccuggucaagcagcuguccuccaacuucggcgccaucagcucugugcugaacgauauccugagcagacuggacccuccugaggccgaggugcagaucgacagacugaucacaggcagacugcagagccuccagacauacgugacccagcagcugaucagagccgccgagauuagagccucugccaaucuggccgccaccaagaugucugagugugugcugggccagagcaagagaguggacuuuugcggcaagggcuaccaccugaugagcuucccucagucugccccucacggcgugguguuucugcacgugacauaugugcccgcucaagagaagaauuucaccaccgcuccagccaucugccacgacggcaaagcccacuuuccuagagaaggcguguucguguccaacggcacccauugguucgugacacagcggaacuucuacgagccccagaucaucaccaccgacaacaccuucgugucuggcaacugcgacguugugaucggcauugugaacaauaccguguacgacccucugcagcccgagcuggacagcuucaaagaggaacuggacaaguacuuuaagaaccacacaagccccgacguggaccugggcgauaucagcggaaucaaugccagcgucgugaacauccagaaagagaucgaccggcugaacgagguggccaagaaucugaacgagagccugaucgaccugcaagaacuggggaaguacgagcaguacaucaaguggcccugguacaucuggcugggcuuuaucgccggacugauugccaucgugaucgucacaaucaugcuguguugcaugaccagcugcuguagcugccugaagggcuguuguagcuguggcagcugcugcaaguucgacgaggacgauucugagcccgugcugaagggcgugaaacugcacuacaccugauaauaggcuggagccucgguggccuagcuucuugccccuugggccuccccccagccccuccuccccuuccugcacccguacccccguggucuuugaauaaagucugagugggcggcaaaaaaaaaaaaaaaaaaaaaaaaaaaaaaaaaaaaaaaaaaaaaaaaaaaaaaaaaaaaaaaaaaaaaaaaaaaaaaaaaaaaaaaaaaaaaaaaaaaaucuag

SEQ ID NO: 26681 - RNA, 4091 nt, Artificial Sequence
  SARS-CoV-2/Wuhan/WIV05/2019__EPI_ISL_402128 spike protein mRNA gc mod (1-1273)(K986P_V987P_K986P_V987P_H69del_V70del_Y144del_N501Y_A570 D_D614G_P681H_T716I_S982A_D1118H)
gggaaauaagagagaaaagaagaguaagaagaaauauaagaccccggcgccgccaccauguucguguuucuggugcugcugccccugguguccagccagugugugaaccugaccaccagaacacagcugccuccagccuacaccaacagcuucaccagaggcguguacuaccccgacaagguguucagauccagcgugcugcacucuacccaggaccuguuccugccuuucuucagcaacgugaccugguuccacgccaucuccggcaccaauggcaccaagagauucgacaaccccgugcugcccuucaacgacgggguguacuuugccagcaccgagaaguccaacaucaucagaggcuggaucuucggcaccacacuggacagcaagacccagagccugcugaucgugaacaacgccaccaacguggucaucaaagugugcgaguuccaguucugcaacgaccccuuccugggcgucuaccacaagaacaacaagagcuggauggaaagcgaguuccggguguacagcagcgccaacaacugcaccuucgaguacgugucccagccuuuccugauggaccuggaaggcaagcagggcaacuucaagaaccugcgcgaguucguguucaagaacaucgacggcuacuucaaaaucuacagcaagcacaccccuaucaaccucgugcgggaucugccucagggcuucucugcucuggaaccccugguggaucugcccaucggcaucaacaucacccgguuucagacacugcuggcccugcacagaagcuaccugacaccuggcgauagcagcagcggauggacagcuggugccgccgcuuacuaugugggcuaccugcagccuagaaccuuccugcugaaguacaacgagaacggcaccaucaccgacgccguggauugugcucuggauccucugagcgagacaaagugcacccugaaguccuucaccguggaaaagggcaucuaccagaccagcaacuuccgggugcagcccaccgaauccaucgugcgguuccccaauaucaccaaucugugccccuucggcgagguguucaaugccaccagauucgccucuguguacgccuggaaccggaagcggaucagcaauugcguggccgacuacuccgugcuguacaacuccgccagcuucagcaccuucaagugcuacggcguguccccuaccaagcugaacgaccugugcuucacaaacguguacgccgacagcuucgugauccggggagaugaagugcggcagauugccccuggacagacaggcaagaucgccgacuacaacuacaagcugcccgacgacuucaccggcugugugauugccuggaacagcaacaaccuggacuccaaagucggcggcaacuacaauuaccuguaccggcuguuccggaaguccaaucugaagcccuucgagcgggacaucagcaccgaaaucuaucaggccggcagcaccccuugcaacggcguggaaggcuucaacugcuacuucccacugcaguccuacggcuuucagcccacauacggcgugggcuaucagcccuacagagugguggugcugagcuucgaacugcugcaugcuccugccacagugugcggcccuaagaaaagcaccaaucucgugaagaacaaaugcgugaacuucaacuucaacggccugaccggcaccggcgugcugacagagagcaacaagaaguuccugccauuccagcaguuuggccgggauaucgacgauaccacagacgccguuagagauccccagacacuggaaauccuggacaucaccccaugcagcuucggcggagugucugugaucaccccuggcaccaacaccagcaaucagguggcagugcuguaccagggcgugaacuguaccgaagugcccguggccauucacgccgaucagcugacaccuacauggcggguguacuccaccggcagcaauguguuucagaccagagccggcugucugaucggagccgagcacgugaacaauagcuacgagugcgacauccccaucggcgcuggcaucugugccagcuaccagacacagacaaacagccacagacgggcuagaagcguggccagccagagcaucauugccuacacaaugucucugggcgccgagaacagcguggccuacuccaacaacucuaucgcuauccccaucaacuucaccaucagcgugaccaccgagauccugccuguguccaugaccaagaccagcguggacugcaccauguacaucugcggcgauuccaccgagugcuccaaccugcugcugcaguacggcagcuucugcacccagcugaauagagcccugacagggaucgccguggaacaggacaagaacacccaagagguguucgcccaagugaagcaaaucuacaagaccccuccuaucaaggacuucggcggcuucaauuucagccagauucugcccgauccuagcaagcccagcaagcggagcuucaucgaggaccugcuguucaacaaagugacacuggccgacgccggcuucaucaagcaguauggcgauugucugggcgacauugccgccagggaucugauuugcgcccagaaguuuaacggacugacagugcugccuccucugcugaccgaugagaugaucgcccaguacacaucugcccugcuggccggcacaaucacaagcggcuggacauuuggagcuggcgccgcucugcagauccccuuugcuaugcagauggccuaccgguucaacggcaucggagugacccagaaugugcuguacgagaaccagaagcugaucgccaaccaguucaacagcgccaucggcaagauccaggacagccugagcagcacagcaagcgcccugggaaagcugcaggacguggucaaccagaaugcccaggcacugaacacccuggucaagcagcuguccuccaacuucggcgccaucagcucugugcugaacgauauccuggccagacuggacccuccugaggccgaggugcagaucgacagacugaucacaggcagacugcagagccuccagacauacgugacccagcagcugaucagagccgccgagauuagagccucugccaaucuggccgccaccaagaugucugagugugugcugggccagagcaagagaguggacuuuugcggcaagggcuaccaccugaugagcuucccucagucugccccucacggcgugguguuucugcacgugacauaugugcccgcucaagagaagaauuucaccaccgcuccagccaucugccacgacggcaaagcccacuuuccuagagaaggcguguucguguccaacggcacccauugguucgugacacagcggaacuucuacgagccccagaucaucaccacccacaacaccuucgugucuggcaacugcgacguugugaucggcauugugaacaauaccguguacgacccucugcagcccgagcuggacagcuucaaagaggaacuggacaaguacuuuaagaaccacacaagccccgacguggaccugggcgauaucagcggaaucaaugccagcgucgugaacauccagaaagagaucgaccggcugaacgagguggccaagaaucugaacgagagccugaucgaccugcaagaacuggggaaguacgagcaguacaucaaguggcccugguacaucuggcugggcuuuaucgccggacugauugccaucgugauggucacaaucaugcuguguugcaugaccagcugcuguagcugccugaagggcuguuguagcuguggcagcugcugcaaguucgacgaggacgauucugagcccgugcugaagggcgugaaacugcacuacaccugauaauaggcuggagccucgguggccuagcuucuugccccuugggccuccccccagccccuccuccccuuccugcacccguacccccguggucuuugaauaaagucugagugggcggcaaaaaaaaaaaaaaaaaaaaaaaaaaaaaaaaaaaaaaaaaaaaaaaaaaaaaaaaaaaaaaaaaaaaaaaaaaaaaaaaaaaaaaaaaaaaaaaaaaaaucuag

SEQ ID NO: 26682 - RNA, 4100 nt, Artificial Sequence
  SARS-CoV-2/Wuhan/WIV05/2019__EPI_ISL_402128 spike protein mRNA gc mod (1-1273)(K986P_V987P_K986P_V987P_K417N_E484K_N501Y_D614G)
gggaaauaagagagaaaagaagaguaagaagaaauauaagaccccggcgccgccaccauguucguguuucuggugcugcugccccugguguccagccagugugugaaccugaccaccagaacacagcugccuccagccuacaccaacagcuucaccagaggcguguacuaccccgacaagguguucagauccagcgugcugcacucuacccaggaccuguuccugccuuucuucagcaacgugaccugguuccacgccauccacguguccggcaccaauggcaccaagagauucgacaaccccgugcugcccuucaacgacgggguguacuuugccagcaccgagaaguccaacaucaucagaggcuggaucuucggcaccacacuggacagcaagacccagagccugcugaucgugaacaacgccaccaacguggucaucaaagugugcgaguuccaguucugcaacgaccccuuccugggcgucuacuaccacaagaacaacaagagcuggauggaaagcgaguuccggguguacagcagcgccaacaacugcaccuucgaguacgugucccagccuuuccugauggaccuggaaggcaagcagggcaacuucaagaaccugcgcgaguucguguucaagaacaucgacggcuacuucaaaaucuacagcaagcacaccccuaucaaccucgugcgggaucugccucagggcuucucugcucuggaaccccugguggaucugcccaucggcaucaacaucacccgguuucagacacugcuggcccugcacagaagcuaccugacaccuggcgauagcagcagcggauggacagcuggugccgccgcuuacuaugugggcuaccugcagccuagaaccuuccugcugaaguacaacgagaacggcaccaucaccgacgccguggauugugcucuggauccucugagcgagacaaagugcacccugaaguccuucaccguggaaaagggcaucuaccagaccagcaacuuccgggugcagcccaccgaauccaucgugcgguuccccaauaucaccaaucugugccccuucggcgagguguucaaugccaccagauucgccucuguguacgccuggaaccggaagcggaucagcaauugcguggccgacuacuccgugcuguacaacuccgccagcuucagcaccuucaagugcuacggcguguccccuaccaagcugaacgaccugugcuucacaaacguguacgccgacagcuucgugauccggggagaugaagugcggcagauugccccuggacagacaggcaacaucgccgacuacaacuacaagcugcccgacgacuucaccggcugugugauugccuggaacagcaacaaccuggacuccaaagucggcggcaacuacaauuaccuguaccggcuguuccggaaguccaaucugaagcccuucgagcgggacaucagcaccgaaaucuaucaggccggcagcaccccuugcaacggcgugaagggcuucaacugcuacuucccacugcaguccuacggcuuucagcccacauacggcgugggcuaucagcccuacagagugguggugcugagcuucgaacugcugcaugcuccugccacagugugcggcccuaagaaaagcaccaaucucgugaagaacaaaugcgugaacuucaacuucaacggccugaccggcaccggcgugcugacagagagcaacaagaaguuccugccauuccagcaguuuggccgggauaucgccgauaccacagacgccguuagagauccccagacacuggaaauccuggacaucaccccaugcagcuucggcggagugucugugaucaccccuggcaccaacaccagcaaucagguggcagugcuguaccagggcgugaacuguaccgaagugcccguggccauucacgccgaucagcugacaccuacauggcggguguacuccaccggcagcaauguguuucagaccagagccggcugucugaucggagccgagcacgugaacaauagcuacgagugcgacauccccaucggcgcuggcaucugugccagcuaccagacacagacaaacagccccagacgggcuagaagcguggccagccagagcaucauugccuacacaaugucucugggcgccgagaacagcguggccuacuccaacaacucuaucgcuauccccaccaacuucaccaucagcgugaccaccgagauccugccuguguccaugaccaagaccagcguggacugcaccauguacaucugcggcgauuccaccgagugcuccaaccugcugcugcaguacggcagcuucugcacccagcugaauagagcccugacagggaucgccguggaacaggacaagaacacccaagagguguucgcccaagugaagcaaaucuacaagaccccuccuaucaaggacuucggcggcuucaauuucagccagauucugcccgauccuagcaagcccagcaagcggagcuucaucgaggaccugcuguucaacaaagugacacuggccgacgccggcuucaucaagcaguauggcgauugucugggcgacauugccgccagggaucugauuugcgcccagaaguuuaacggacugacagugcugccuccucugcugaccgaugagaugaucgcccaguacacaucugcccugcuggccggcacaaucacaagcggcuggacauuuggagcuggcgccgcucugcagauccccuuugcuaugcagauggccuaccgguucaacggcaucggagugacccagaaugugcuguacgagaaccagaagcugaucgccaaccaguucaacagcgccaucggcaagauccaggacagccugagcagcacagcaagcgcccugggaaagcugcaggacguggucaaccagaaugcccaggcacugaacacccuggucaagcagcuguccuccaacuucggcgccaucagcucugugcugaacgauauccugagcagacuggacccuccugaggccgaggugcagaucgacagacugaucacaggcagacugcagagccuccagacauacgugacccagcagcugaucagagccgccgagauuagagccucugccaaucuggccgccaccaagaugucugagugugugcugggccagagcaagagaguggacuuuugcggcaagggcuaccaccugaugagcuucccucagucugccccucacggcgugguguuucugcacgugacauaugugcccgcucaagagaagaauuucaccaccgcuccagccaucugccacgacggcaaagcccacuuuccuagagaaggcguguucguguccaacggcacccauugguucgugacacagcggaacuucuacgagccccagaucaucaccaccgacaacaccuucgugucuggcaacugcgacguugugaucggcauugugaacaauaccguguacgacccucugcagcccgagcuggacagcuucaaagaggaacuggacaaguacuuuaagaaccacacaagccccgacguggaccugggcgauaucagcggaaucaaugccagcgucgugaacauccagaaagagaucgaccggcugaacgagguggccaagaaucugaacgagagccugaucgaccugcaagaacuggggaaguacgagcaguacaucaaguggcccugguacaucuggcugggcuuuaucgccggacugauugccaucgugauggucacaaucaugcuguguugcaugaccagcugcuguagcugccugaagggcuguuguagcuguggcagcugcugcaaguucgacgaggacgauucugagcccgugcugaagggcgugaaacugcacuacaccugauaauaggcuggagccucgguggccuagcuucuugccccuugggccuccccccagccccuccuccccuuccugcacccguacccccguggucuuugaauaaagucugagugggcggcaaaaaaaaaaaaaaaaaaaaaaaaaaaaaaaaaaaaaaaaaaaaaaaaaaaaaaaaaaaaaaaaaaaaaaaaaaaaaaaaaaaaaaaaaaaaaaaaaaaaucuag

SEQ ID NO: 26683 - RNA, 4091 nt, Artificial Sequence
  SARS-CoV-2/Wuhan/WIV05/2019__EPI_ISL_402128 spike protein mRNA gc mod (1-1273)(K986P_V987P_K986P_V987P_L18F_D80A_D215G_L242del_A243del_ L244del_R246I_K417N_E484K_N501Y_D614G_A701V)
gggaaauaagagagaaaagaagaguaagaagaaauauaagaccccggcgccgccaccauguucguguuucuggugcugcugccccugguguccagccagugugugaacuucaccaccagaacacagcugccuccagccuacaccaacagcuucaccagaggcguguacuaccccgacaagguguucagauccagcgugcugcacucuacccaggaccuguuccugccuuucuucagcaacgugaccugguuccacgccauccacguguccggcaccaauggcaccaagagauucgccaaccccgugcugcccuucaacgacgggguguacuuugccagcaccgagaaguccaacaucaucagaggcuggaucuucggcaccacacuggacagcaagacccagagccugcugaucgugaacaacgccaccaacguggucaucaaagugugcgaguuccaguucugcaacgaccccuuccugggcgucuacuaccacaagaacaacaagagcuggauggaaagcgaguuccggguguacagcagcgccaacaacugcaccuucgaguacgugucccagccuuuccugauggaccuggaaggcaagcagggcaacuucaagaaccugcgcgaguucguguucaagaacaucgacggcuacuucaaaaucuacagcaagcacaccccuaucaaccucgugcggggccugccucagggcuucucugcucuggaaccccugguggaucugcccaucggcaucaacaucacccgguuucagacacugcacaucagcuaccugacaccuggcgauagcagcagcggauggacagcuggugccgccgcuuacuaugugggcuaccugcagccuagaaccuuccugcugaaguacaacgagaacggcaccaucaccgacgccguggauugugcucuggauccucugagcgagacaaagugcacccugaaguccuucaccguggaaaagggcaucuaccagaccagcaacuuccgggugcagcccaccgaauccaucgugcgguuccccaauaucaccaaucugugccccuucggcgagguguucaaugccaccagauucgccucuguguacgccuggaaccggaagcggaucagcaauugcguggccgacuacuccgugcuguacaacuccgccagcuucagcaccuucaagugcuacggcguguccccuaccaagcugaacgaccugugcuucacaaacguguacgccgacagcuucgugauccggggagaugaagugcggcagauugccccuggacagacaggcaacaucgccgacuacaacuacaagcugcccgacgacuucaccggcugugugauugccuggaacagcaacaaccuggacuccaaagucggcggcaacuacaauuaccuguaccggcuguuccggaaguccaaucugaagcccuucgagcgggacaucagcaccgaaaucuaucaggccggcagcaccccuugcaacggcgugaagggcuucaacugcuacuucccacugcaguccuacggcuuucagcccacauacggcgugggcuaucagcccuacagagugguggugcugagcuucgaacugcugcaugcuccugccacagugugcggcccuaagaaaagcaccaaucucgugaagaacaaaugcgugaacuucaacuucaacggccugaccggcaccggcgugcugacagagagcaacaagaaguuccugccauuccagcaguuuggccgggauaucgccgauaccacagacgccguuagagauccccagacacuggaaauccuggacaucaccccaugcagcuucggcggagugucugugaucaccccuggcaccaacaccagcaaucagguggcagugcuguaccagggcgugaacuguaccgaagugcccguggccauucacgccgaucagcugacaccuacauggcggguguacuccaccggcagcaauguguuucagaccagagccggcugucugaucggagccgagcacgugaacaauagcuacgagugcgacauccccaucggcgcuggcaucugugccagcuaccagacacagacaaacagccccagacgggcuagaagcguggccagccagagcaucauugccuacacaaugucucugggcguggagaacagcguggccuacuccaacaacucuaucgcuauccccaccaacuucaccaucagcgugaccaccgagauccugccuguguccaugaccaagaccagcguggacugcaccauguacaucugcggcgauuccaccgagugcuccaaccugcugcugcaguacggcagcuucugcacccagcugaauagagcccugacagggaucgccguggaacaggacaagaacacccaagagguguucgcccaagugaagcaaaucuacaagaccccuccuaucaaggacuucggcggcuucaauuucagccagauucugcccgauccuagcaagcccagcaagcggagcuucaucgaggaccugcuguucaacaaagugacacuggccgacgccggcuucaucaagcaguauggcgauugucugggcgacauugccgccagggaucugauuugcgcccagaaguuuaacggacugacagugcugccuccucugcugaccgaugagaugaucgcccaguacacaucugcccugcuggccggcacaaucacaagcggcuggacauuuggagcuggcgccgcucugcagauccccuuugcuaugcagauggccuaccgguucaacggcaucggagugacccagaaugugcuguacgagaaccagaagcugaucgccaaccaguucaacagcgccaucggcaagauccaggacagccugagcagcacagcaagcgcccugggaaagcugcaggacguggucaaccagaaugcccaggcacugaacacccuggucaagcagcuguccuccaacuucggcgccaucagcucugugcugaacgauauccugagcagacuggacccuccugaggccgaggugcagaucgacagacugaucacaggcagacugcagagccuccagacauacgugacccagcagcugaucagagccgccgagauuagagccucugccaaucuggccgccaccaagaugucugagugugugcugggccagagcaagagaguggacuuuugcggcaagggcuaccaccugaugagcuucccucagucugccccucacggcgugguguuucugcacgugacauaugugcccgcucaagagaagaauuucaccaccgcuccagccaucugccacgacggcaaagcccacuuuccuagagaaggcguguucguguccaacggcacccauugguucgugacacagcggaacuucuacgagccccagaucaucaccaccgacaacaccuucgugucuggcaacugcgacguugugaucggcauugugaacaauaccguguacgacccucugcagcccgagcuggacagcuucaaagaggaacuggacaaguacuuuaagaaccacacaagccccgacguggaccugggcgauaucagcggaaucaaugccagcgucgugaacauccagaaagagaucgaccggcugaacgagguggccaagaaucugaacgagagccugaucgaccugcaagaacuggggaaguacgagcaguacaucaaguggcccugguacaucuggcugggcuuuaucgccggacugauugccaucgugauggucacaaucaugcuguguugcaugaccagcugcuguagcugccugaagggcuguuguagcuguggcagcugcugcaaguucgacgaggacgauucugagcccgugcugaagggcgugaaacugcacuacaccugauaauaggcuggagccucgguggccuagcuucuugccccuugggccuccccccagccccuccuccccuuccugcacccguacccccguggucuuugaauaaagucugagugggcggcaaaaaaaaaaaaaaaaaaaaaaaaaaaaaaaaaaaaaaaaaaaaaaaaaaaaaaaaaaaaaaaaaaaaaaaaaaaaaaaaaaaaaaaaaaaaaaaaaaaaucuag

SEQ ID NO: 26684 - RNA, 4100 nt, Artificial Sequence
  SARS-CoV-2/Wuhan/WIV05/2019__EPI_ISL_402128 spike protein mRNA gc mod (1-1273)(K986P_V987P_K986P_V987P_E484K_D614G)
gggaaauaagagagaaaagaagaguaagaagaaauauaagaccccggcgccgccaccauguucguguuucuggugcugcugccccugguguccagccagugugugaaccugaccaccagaacacagcugccuccagccuacaccaacagcuucaccagaggcguguacuaccccgacaagguguucagauccagcgugcugcacucuacccaggaccuguuccugccuuucuucagcaacgugaccugguuccacgccauccacguguccggcaccaauggcaccaagagauucgacaaccccgugcugcccuucaacgacgggguguacuuugccagcaccgagaaguccaacaucaucagaggcuggaucuucggcaccacacuggacagcaagacccagagccugcugaucgugaacaacgccaccaacguggucaucaaagugugcgaguuccaguucugcaacgaccccuuccugggcgucuacuaccacaagaacaacaagagcuggauggaaagcgaguuccggguguacagcagcgccaacaacugcaccuucgaguacgugucccagccuuuccugauggaccuggaaggcaagcagggcaacuucaagaaccugcgcgaguucguguucaagaacaucgacggcuacuucaaaaucuacagcaagcacaccccuaucaaccucgugcgggaucugccucagggcuucucugcucuggaaccccugguggaucugcccaucggcaucaacaucacccgguuucagacacugcuggcccugcacagaagcuaccugacaccuggcgauagcagcagcggauggacagcuggugccgccgcuuacuaugugggcuaccugcagccuagaaccuuccugcugaaguacaacgagaacggcaccaucaccgacgccguggauugugcucuggauccucugagcgagacaaagugcacccugaaguccuucaccguggaaaagggcaucuaccagaccagcaacuuccgggugcagcccaccgaauccaucgugcgguuccccaauaucaccaaucugugccccuucggcgagguguucaaugccaccagauucgccucuguguacgccuggaaccggaagcggaucagcaauugcguggccgacuacuccgugcuguacaacuccgccagcuucagcaccuucaagugcuacggcguguccccuaccaagcugaacgaccugugcuucacaaacguguacgccgacagcuucgugauccggggagaugaagugcggcagauugccccuggacagacaggcaagaucgccgacuacaacuacaagcugcccgacgacuucaccggcugugugauugccuggaacagcaacaaccuggacuccaaagucggcggcaacuacaauuaccuguaccggcuguuccggaaguccaaucugaagcccuucgagcgggacaucagcaccgaaaucuaucaggccggcagcaccccuugcaacggcgugaagggcuucaacugcuacuucccacugcaguccuacggcuuucagcccacaaauggcgugggcuaucagcccuacagagugguggugcugagcuucgaacugcugcaugcuccugccacagugugcggcccuaagaaaagcaccaaucucgugaagaacaaaugcgugaacuucaacuucaacggccugaccggcaccggcgugcugacagagagcaacaagaaguuccugccauuccagcaguuuggccgggauaucgccgauaccacagacgccguuagagauccccagacacuggaaauccuggacaucaccccaugcagcuucggcggagugucugugaucaccccuggcaccaacaccagcaaucagguggcagugcuguaccagggcgugaacuguaccgaagugcccguggccauucacgccgaucagcugacaccuacauggcggguguacuccaccggcagcaauguguuucagaccagagccggcugucugaucggagccgagcacgugaacaauagcuacgagugcgacauccccaucggcgcuggcaucugugccagcuaccagacacagacaaacagccccagacgggcuagaagcguggccagccagagcaucauugccuacacaaugucucugggcgccgagaacagcguggccuacuccaacaacucuaucgcuauccccaccaacuucaccaucagcgugaccaccgagauccugccuguguccaugaccaagaccagcguggacugcaccauguacaucugcggcgauuccaccgagugcuccaaccugcugcugcaguacggcagcuucugcacccagcugaauagagcccugacagggaucgccguggaacaggacaagaacacccaagagguguucgcccaagugaagcaaaucuacaagaccccuccuaucaaggacuucggcggcuucaauuucagccagauucugcccgauccuagcaagcccagcaagcggagcuucaucgaggaccugcuguucaacaaagugacacuggccgacgccggcuucaucaagcaguauggcgauugucugggcgacauugccgccagggaucugauuugcgcccagaaguuuaacggacugacagugcugccuccucugcugaccgaugagaugaucgcccaguacacaucugcccugcuggccggcacaaucacaagcggcuggacauuuggagcuggcgccgcucugcagauccccuuugcuaugcagauggccuaccgguucaacggcaucggagugacccagaaugugcuguacgagaaccagaagcugaucgccaaccaguucaacagcgccaucggcaagauccaggacagccugagcagcacagcaagcgcccugggaaagcugcaggacguggucaaccagaaugcccaggcacugaacacccuggucaagcagcuguccuccaacuucggcgccaucagcucugugcugaacgauauccugagcagacuggacccuccugaggccgaggugcagaucgacagacugaucacaggcagacugcagagccuccagacauacgugacccagcagcugaucagagccgccgagauuagagccucugccaaucuggccgccaccaagaugucugagugugugcugggccagagcaagagaguggacuuuugcggcaagggcuaccaccugaugagcuucccucagucugccccucacggcgugguguuucugcacgugacauaugugcccgcucaagagaagaauuucaccaccgcuccagccaucugccacgacggcaaagcccacuuuccuagagaaggcguguucguguccaacggcacccauugguucgugacacagcggaacuucuacgagccccagaucaucaccaccgacaacaccuucgugucuggcaacugcgacguugugaucggcauugugaacaauaccguguacgacccucugcagcccgagcuggacagcuucaaagaggaacuggacaaguacuuuaagaaccacacaagccccgacguggaccugggcgauaucagcggaaucaaugccagcgucgugaacauccagaaagagaucgaccggcugaacgagguggccaagaaucugaacgagagccugaucgaccugcaagaacuggggaaguacgagcaguacaucaaguggcccugguacaucuggcugggcuuuaucgccggacugauugccaucgugauggucacaaucaugcuguguugcaugaccagcugcuguagcugccugaagggcuguuguagcuguggcagcugcugcaaguucgacgaggacgauucugagcccgugcugaagggcgugaaacugcacuacaccugauaauaggcuggagccucgguggccuagcuucuugccccuugggccuccccccagccccuccuccccuuccugcacccguacccccguggucuuugaauaaagucugagugggcggcaaaaaaaaaaaaaaaaaaaaaaaaaaaaaaaaaaaaaaaaaaaaaaaaaaaaaaaaaaaaaaaaaaaaaaaaaaaaaaaaaaaaaaaaaaaaaaaaaaaaucuag

SEQ ID NO: 26685 - RNA, 4100 nt, Artificial Sequence
  SARS-CoV-2/Wuhan/WIV05/2019__EPI_ISL_402128 spike protein mRNA gc mod (1-1273)(K986P_V987P_K986P_V987P_L18F_T20N_P26S_D138Y_R190S_K417T _E484K_N501Y_D614G_H655Y_T1027I)
gggaaauaagagagaaaagaagaguaagaagaaauauaagaccccggcgccgccaccauguucguguuucuggugcugcugccccugguguccagccagugugugaacuucaccaacagaacacagcugccuagcgccuacaccaacagcuucaccagaggcguguacuaccccgacaagguguucagauccagcgugcugcacucuacccaggaccuguuccugccuuucuucagcaacgugaccugguuccacgccauccacguguccggcaccaauggcaccaagagauucgacaaccccgugcugcccuucaacgacgggguguacuuugccagcaccgagaaguccaacaucaucagaggcuggaucuucggcaccacacuggacagcaagacccagagccugcugaucgugaacaacgccaccaacguggucaucaaagugugcgaguuccaguucugcaacuaccccuuccugggcgucuacuaccacaagaacaacaagagcuggauggaaagcgaguuccggguguacagcagcgccaacaacugcaccuucgaguacgugucccagccuuuccugauggaccuggaaggcaagcagggcaacuucaagaaccugagcgaguucguguucaagaacaucgacggcuacuucaaaaucuacagcaagcacaccccuaucaaccucgugcgggaucugccucagggcuucucugcucuggaaccccugguggaucugcccaucggcaucaacaucacccgguuucagacacugcuggcccugcacagaagcuaccugacaccuggcgauagcagcagcggauggacagcuggugccgccgcuuacuaugugggcuaccugcagccuagaaccuuccugcugaaguacaacgagaacggcaccaucaccgacgccguggauugugcucuggauccucugagcgagacaaagugcacccugaaguccuucaccguggaaaagggcaucuaccagaccagcaacuuccgggugcagcccaccgaauccaucgugcgguuccccaauaucaccaaucugugccccuucggcgagguguucaaugccaccagauucgccucuguguacgccuggaaccggaagcggaucagcaauugcguggccgacuacuccgugcuguacaacuccgccagcuucagcaccuucaagugcuacggcguguccccuaccaagcugaacgaccugugcuucacaaacguguacgccgacagcuucgugauccggggagaugaagugcggcagauugccccuggacagacaggcaccaucgccgacuacaacuacaagcugcccgacgacuucaccggcugugugauugccuggaacagcaacaaccuggacuccaaagucggcggcaacuacaauuaccuguaccggcuguuccggaaguccaaucugaagcccuucgagcgggacaucagcaccgaaaucuaucaggccggcagcaccccuugcaacggcgugaagggcuucaacugcuacuucccacugcaguccuacggcuuucagcccacauacggcgugggcuaucagcccuacagagugguggugcugagcuucgaacugcugcaugcuccugccacagugugcggcccuaagaaaagcaccaaucucgugaagaacaaaugcgugaacuucaacuucaacggccugaccggcaccggcgugcugacagagagcaacaagaaguuccugccauuccagcaguuuggccgggauaucgccgauaccacagacgccguuagagauccccagacacuggaaauccuggacaucaccccaugcagcuucggcggagugucugugaucaccccuggcaccaacaccagcaaucagguggcagugcuguaccagggcgugaacuguaccgaagugcccguggccauucacgccgaucagcugacaccuacauggcggguguacuccaccggcagcaauguguuucagaccagagccggcugucugaucggagccgaguacgugaacaauagcuacgagugcgacauccccaucggcgcuggcaucugugccagcuaccagacacagacaaacagccccagacgggcuagaagcguggccagccagagcaucauugccuacacaaugucucugggcgccgagaacagcguggccuacuccaacaacucuaucgcuauccccaccaacuucaccaucagcgugaccaccgagauccugccuguguccaugaccaagaccagcguggacugcaccauguacaucugcggcgauuccaccgagugcuccaaccugcugcugcaguacggcagcuucugcacccagcugaauagagcccugacagggaucgccguggaacaggacaagaacacccaagagguguucgcccaagugaagcaaaucuacaagaccccuccuaucaaggacuucggcggcuucaauuucagccagauucugcccgauccuagcaagcccagcaagcggagcuucaucgaggaccugcuguucaacaaagugacacuggccgacgccggcuucaucaagcaguauggcgauugucugggcgacauugccgccagggaucugauuugcgcccagaaguuuaacggacugacagugcugccuccucugcugaccgaugagaugaucgcccaguacacaucugcccugcuggccggcacaaucacaagcggcuggacauuuggagcuggcgccgcucugcagauccccuuugcuaugcagauggccuaccgguucaacggcaucggagugacccagaaugugcuguacgagaaccagaagcugaucgccaaccaguucaacagcgccaucggcaagauccaggacagccugagcagcacagcaagcgcccugggaaagcugcaggacguggucaaccagaaugcccaggcacugaacacccuggucaagcagcuguccuccaacuucggcgccaucagcucugugcugaacgauauccugagcagacuggacccuccugaggccgaggugcagaucgacagacugaucacaggcagacugcagagccuccagacauacgugacccagcagcugaucagagccgccgagauuagagccucugccaaucuggccgccaucaagaugucugagugugugcugggccagagcaagagaguggacuuuugcggcaagggcuaccaccugaugagcuucccucagucugccccucacggcgugguguuucugcacgugacauaugugcccgcucaagagaagaauuucaccaccgcuccagccaucugccacgacggcaaagcccacuuuccuagagaaggcguguucguguccaacggcacccauugguucgugacacagcggaacuucuacgagccccagaucaucaccaccgacaacaccuucgugucuggcaacugcgacguugugaucggcauugugaacaauaccguguacgacccucugcagcccgagcuggacagcuucaaagaggaacuggacaaguacuuuaagaaccacacaagccccgacguggaccugggcgauaucagcggaaucaaugccagcgucgugaacauccagaaagagaucgaccggcugaacgagguggccaagaaucugaacgagagccugaucgaccugcaagaacuggggaaguacgagcaguacaucaaguggcccugguacaucuggcugggcuuuaucgccggacugauugccaucgugauggucacaaucaugcuguguugcaugaccagcugcuguagcugccugaagggcuguuguagcuguggcagcugcugcaaguucgacgaggacgauucugagcccgugcugaagggcgugaaacugcacuacaccugauaauaggcuggagccucgguggccuagcuucuugccccuugggccuccccccagccccuccuccccuuccugcacccguacccccguggucuuugaauaaagucugagugggcggcaaaaaaaaaaaaaaaaaaaaaaaaaaaaaaaaaaaaaaaaaaaaaaaaaaaaaaaaaaaaaaaaaaaaaaaaaaaaaaaaaaaaaaaaaaaaaaaaaaaaucuag

SEQ ID NO: 26686 - RNA, 4100 nt, Artificial Sequence
  SARS-CoV-2/Wuhan/WIV05/2019__EPI_ISL_402128 spike protein mRNA gc mod (1-1273)(K986P_V987P_K986P_V987P_S13I_W152C_L452R_D614G)
gggaaauaagagagaaaagaagaguaagaagaaauauaagaccccggcgccgccaccauguucguguuucuggugcugcugccccugguguccauccagugugugaaccugaccaccagaacacagcugccuccagccuacaccaacagcuucaccagaggcguguacuaccccgacaagguguucagauccagcgugcugcacucuacccaggaccuguuccugccuuucuucagcaacgugaccugguuccacgccauccacguguccggcaccaauggcaccaagagauucgacaaccccgugcugcccuucaacgacgggguguacuuugccagcaccgagaaguccaacaucaucagaggcuggaucuucggcaccacacuggacagcaagacccagagccugcugaucgugaacaacgccaccaacguggucaucaaagugugcgaguuccaguucugcaacgaccccuuccugggcgucuacuaccacaagaacaacaagagcugcauggaaagcgaguuccggguguacagcagcgccaacaacugcaccuucgaguacgugucccagccuuuccugauggaccuggaaggcaagcagggcaacuucaagaaccugcgcgaguucguguucaagaacaucgacggcuacuucaaaaucuacagcaagcacaccccuaucaaccucgugcgggaucugccucagggcuucucugcucuggaaccccugguggaucugcccaucggcaucaacaucacccgguuucagacacugcuggcccugcacagaagcuaccugacaccuggcgauagcagcagcggauggacagcuggugccgccgcuuacuaugugggcuaccugcagccuagaaccuuccugcugaaguacaacgagaacggcaccaucaccgacgccguggauugugcucuggauccucugagcgagacaaagugcacccugaaguccuucaccguggaaaagggcaucuaccagaccagcaacuuccgggugcagcccaccgaauccaucgugcgguuccccaauaucaccaaucugugccccuucggcgagguguucaaugccaccagauucgccucuguguacgccuggaaccggaagcggaucagcaauugcguggccgacuacuccgugcuguacaacuccgccagcuucagcaccuucaagugcuacggcguguccccuaccaagcugaacgaccugugcuucacaaacguguacgccgacagcuucgugauccggggagaugaagugcggcagauugccccuggacagacaggcaagaucgccgacuacaacuacaagcugcccgacgacuucaccggcugugugauugccuggaacagcaacaaccuggacuccaaagucggcggcaacuacaauuaccgcuaccggcuguuccggaaguccaaucugaagcccuucgagcgggacaucagcaccgaaaucuaucaggccggcagcaccccuugcaacggcguggaaggcuucaacugcuacuucccacugcaguccuacggcuuucagcccacaaauggcgugggcuaucagcccuacagagugguggugcugagcuucgaacugcugcaugcuccugccacagugugcggcccuaagaaaagcaccaaucucgugaagaacaaaugcgugaacuucaacuucaacggccugaccggcaccggcgugcugacagagagcaacaagaaguuccugccauuccagcaguuuggccgggauaucgccgauaccacagacgccguuagagauccccagacacuggaaauccuggacaucaccccaugcagcuucggcggagugucugugaucaccccuggcaccaacaccagcaaucagguggcagugcuguaccagggcgugaacuguaccgaagugcccguggccauucacgccgaucagcugacaccuacauggcggguguacuccaccggcagcaauguguuucagaccagagccggcugucugaucggagccgagcacgugaacaauagcuacgagugcgacauccccaucggcgcuggcaucugugccagcuaccagacacagacaaacagccccagacgggcuagaagcguggccagccagagcaucauugccuacacaaugucucugggcgccgagaacagcguggccuacuccaacaacucuaucgcuauccccaccaacuucaccaucagcgugaccaccgagauccugccuguguccaugaccaagaccagcguggacugcaccauguacaucugcggcgauuccaccgagugcuccaaccugcugcugcaguacggcagcuucugcacccagcugaauagagcccugacagggaucgccguggaacaggacaagaacacccaagagguguucgcccaagugaagcaaaucuacaagaccccuccuaucaaggacuucggcggcuucaauuucagccagauucugcccgauccuagcaagcccagcaagcggagcuucaucgaggaccugcuguucaacaaagugacacuggccgacgccggcuucaucaagcaguauggcgauugucugggcgacauugccgccagggaucugauuugcgcccagaaguuuaacggacugacagugcugccuccucugcugaccgaugagaugaucgcccaguacacaucugcccugcuggccggcacaaucacaagcggcuggacauuuggagcuggcgccgcucugcagauccccuuugcuaugcagauggccuaccgguucaacggcaucggagugacccagaaugugcuguacgagaaccagaagcugaucgccaaccaguucaacagcgccaucggcaagauccaggacagccugagcagcacagcaagcgcccugggaaagcugcaggacguggucaaccagaaugcccaggcacugaacacccuggucaagcagcuguccuccaacuucggcgccaucagcucugugcugaacgauauccugagcagacuggacccuccugaggccgaggugcagaucgacagacugaucacaggcagacugcagagccuccagacauacgugacccagcagcugaucagagccgccgagauuagagccucugccaaucuggccgccaccaagaugucugagugugugcugggccagagcaagagaguggacuuuugcggcaagggcuaccaccugaugagcuucccucagucugccccucacggcgugguguuucugcacgugacauaugugcccgcucaagagaagaauuucaccaccgcuccagccaucugccacgacggcaaagcccacuuuccuagagaaggcguguucguguccaacggcacccauugguucgugacacagcggaacuucuacgagccccagaucaucaccaccgacaacaccuucgugucuggcaacugcgacguugugaucggcauugugaacaauaccguguacgacccucugcagcccgagcuggacagcuucaaagaggaacuggacaaguacuuuaagaaccacacaagccccgacguggaccugggcgauaucagcggaaucaaugccagcgucgugaacauccagaaagagaucgaccggcugaacgagguggccaagaaucugaacgagagccugaucgaccugcaagaacuggggaaguacgagcaguacaucaaguggcccugguacaucuggcugggcuuuaucgccggacugauugccaucgugauggucacaaucaugcuguguugcaugaccagcugcuguagcugccugaagggcuguuguagcuguggcagcugcugcaaguucgacgaggacgauucugagcccgugcugaagggcgugaaacugcacuacaccugauaauaggcuggagccucgguggccuagcuucuugccccuugggccuccccccagccccuccuccccuuccugcacccguacccccguggucuuugaauaaagucugagugggcggcaaaaaaaaaaaaaaaaaaaaaaaaaaaaaaaaaaaaaaaaaaaaaaaaaaaaaaaaaaaaaaaaaaaaaaaaaaaaaaaaaaaaaaaaaaaaaaaaaaaaucuag

SEQ ID NO: 26687 - RNA, 4100 nt, Artificial Sequence
  SARS-CoV-2/Wuhan/WIV05/2019__EPI_ISL_402128 spike protein mRNA gc mod (1-1273)(K986P_V987P)
gggaaauaagagagaaaagaagaguaagaagaaauauaagaccccggcgccgccaccauguucguguuccuggugcugcugccucugguguccagccagugugugaaccugaccaccagaacacagcugccuccagccuacaccaacagcuuuaccagaggcguguacuaccccgacaagguguucagauccagcgugcugcacucuacccaggaccuguuccugccuuucuucagcaacgugaccugguuccacgccauccacguguccggcaccaauggcaccaagagauucgacaaccccgugcugcccuucaacgacgggguguacuuugccagcaccgagaaguccaacaucaucagaggcuggaucuucggcaccacacuggacagcaagacccagagccugcugaucgugaacaacgccaccaacguggucaucaaagugugcgaguuccaguucugcaacgaccccuuccugggcgucuacuaccacaagaacaacaagagcuggauggaaagcgaguuccggguguacagcagcgccaacaacugcaccuucgaguacgugucccagccuuuccugauggaccuggaaggcaagcagggcaacuucaagaaccugcgcgaguucguguuuaagaacaucgacggcuacuucaagaucuacagcaagcacaccccuaucaaccucgugcgggaucugccucagggcuucucugcucuggaaccccugguggaucugcccaucggcaucaacaucacccgguuucagacacugcuggcccugcacagaagcuaccugacaccuggcgauagcagcagcggauggacagcuggugccgccgcuuacuaugugggcuaccugcagccuagaaccuuccugcugaaguacaacgagaacggcaccaucaccgacgccguggauugugcucuggauccucugagcgagacaaagugcacccugaaguccuucaccguggaaaagggcaucuaccagaccagcaacuuccgggugcagcccaccgaauccaucgugcgguuccccaauaucaccaaucugugccccuucggcgagguguucaaugccaccagauucgccucuguguacgccuggaaccggaagcggaucagcaauugcguggccgacuacuccgugcuguacaacuccgccagcuucagcaccuucaagugcuacggcguguccccuaccaagcugaacgaccugugcuucacaaacguguacgccgacagcuucgugauccggggagaugaagugcggcagauugccccuggacagacaggcaagaucgccgacuacaacuacaagcugcccgacgacuucaccggcugugugauugccuggaacagcaacaaccuggacuccaaagucggcggcaacuacaauuaccuguaccggcuguuccggaaguccaaucugaagcccuucgagcgggacaucuccaccgagaucuaucaggccggcagcaccccuuguaacggcguggaaggcuucaacugcuacuucccacugcaguccuacggcuuucagcccacaaauggcgugggcuaucagcccuacagagugguggugcugagcuucgaacugcugcaugccccugccacagugugcggcccuaagaaaagcaccaaucucgugaagaacaaaugcgugaacuucaacuucaacggccugaccggcaccggcgugcugacagagagcaacaagaaguuccugccauuccagcaguuuggccgggauaucgccgauaccacagacgccguuagagauccccagacacuggaaauccuggacaucaccccuugcagcuucggcggagugucugugaucaccccuggcaccaacaccagcaaucagguggcagugcuguaccaggacgugaacuguaccgaagugcccguggccauucacgccgaucagcugacaccuacauggcggguguacuccaccggcagcaauguguuucagaccagagccggcugucugaucggagccgagcacgugaacaauagcuacgagugcgacauccccaucggcgcuggaaucugcgccagcuaccagacacagacaaacagcccucggagagccagaagcguggccagccagagcaucauugccuacacaaugucucugggcgccgagaacagcguggccuacuccaacaacucuaucgcuauccccaccaacuucaccaucagcgugaccacagagauccugccuguguccaugaccaagaccagcguggacugcaccauguacaucugcggcgauuccaccgagugcuccaaccugcugcugcaguacggcagcuucugcacccagcugaauagagcccugacagggaucgccguggaacaggacaagaacacccaagagguguucgcccaagugaagcagaucuacaagaccccuccuaucaaggacuucggcggcuucaauuucagccagauucugcccgauccuagcaagcccagcaagcggagcuucaucgaggaccugcuguucaacaaagugacacuggccgacgccggcuucaucaagcaguauggcgauugucugggcgacauugccgccagggaucugauuugcgcccagaaguuuaacggacugacagugcugccuccucugcugaccgaugagaugaucgcccaguacacaucugcccugcuggccggcacaaucacaagcggcuggacauuuggagcaggcgccgcucugcagauccccuuugcuaugcagauggccuaccgguucaacggcaucggagugacccagaaugugcuguacgagaaccagaagcugaucgccaaccaguucaacagcgccaucggcaagauccaggacagccugagcagcacagcaagcgcccugggaaagcugcaggacguggucaaccagaaugcccaggcacugaacacccuggucaagcagcuguccuccaacuucggcgccaucagcucugugcugaacgauauccugagcagacuggacccuccugaggccgaggugcagaucgacagacugaucacaggcagacugcagagccuccagacauacgugacccagcagcugaucagagccgccgagauuagagccucugccaaucuggccgccaccaagaugucugagugugugcugggccagagcaagagaguggacuuuugcggcaagggcuaccaccugaugagcuucccucagucugccccucacggcgugguguuucugcacgugacauaugugcccgcucaagagaagaauuucaccaccgcuccagccaucugccacgacggcaaagcccacuuuccuagagaaggcguguucguguccaacggcacccauugguucgugacacagcggaacuucuacgagccccagaucaucaccaccgacaacaccuucgugucuggcaacugcgacgucgugaucggcauugugaacaauaccguguacgacccucugcagcccgagcuggacagcuucaaagaggaacuggacaaguacuuuaagaaccacacaagccccgacguggaccugggcgauaucagcggaaucaaugccagcgucgugaacauccagaaagagaucgaccggcugaacgagguggccaagaaucugaacgagagccugaucgaccugcaagaacuggggaaguacgagcaguacaucaaguggcccugguacaucuggcugggcuuuaucgccggacugauugccaucgugauggucacaaucaugcuguguugcaugaccagcugcuguagcugccugaagggcuguuguagcuguggcagcugcugcaaguucgacgaggacgauucugagcccgugcugaagggcgugaaacugcacuacacaugauaauaggcuggagccucgguggccuagcuucuugccccuugggccuccccccagccccuccuccccuuccugcacccguacccccguggucuuugaauaaagucugagugggcggcaaaaaaaaaaaaaaaaaaaaaaaaaaaaaaaaaaaaaaaaaaaaaaaaaaaaaaaaaaaaaaaaaaaaaaaaaaaaaaaaaaaaaaaaaaaaaaaaaaaaucuag

SEQ ID NO: 26688 - RNA, 4100 nt, Artificial Sequence
  SARS-CoV-2/Wuhan/WIV05/2019__EPI_ISL_402128 spike protein mRNA gc mod (1-1273)(K986P_V987P_ D614G)
gggaaauaagagagaaaagaagaguaagaagaaauauaagaccccggcgccgccaccauguucguguuccuggugcugcugccucugguguccagccagugugugaaccugaccaccagaacacagcugccuccagccuacaccaacagcuuuaccagaggcguguacuaccccgacaagguguucagauccagcgugcugcacucuacccaggaccuguuccugccuuucuucagcaacgugaccugguuccacgccauccacguguccggcaccaauggcaccaagagauucgacaaccccgugcugcccuucaacgacgggguguacuuugccagcaccgagaaguccaacaucaucagaggcuggaucuucggcaccacacuggacagcaagacccagagccugcugaucgugaacaacgccaccaacguggucaucaaagugugcgaguuccaguucugcaacgaccccuuccugggcgucuacuaccacaagaacaacaagagcuggauggaaagcgaguuccggguguacagcagcgccaacaacugcaccuucgaguacgugucccagccuuuccugauggaccuggaaggcaagcagggcaacuucaagaaccugcgcgaguucguguuuaagaacaucgacggcuacuucaagaucuacagcaagcacaccccuaucaaccucgugcgggaucugccucagggcuucucugcucuggaaccccugguggaucugcccaucggcaucaacaucacccgguuucagacacugcuggcccugcacagaagcuaccugacaccuggcgauagcagcagcggauggacagcuggugccgccgcuuacuaugugggcuaccugcagccuagaaccuuccugcugaaguacaacgagaacggcaccaucaccgacgccguggauugugcucuggauccucugagcgagacaaagugcacccugaaguccuucaccguggaaaagggcaucuaccagaccagcaacuuccgggugcagcccaccgaauccaucgugcgguuccccaauaucaccaaucugugccccuucggcgagguguucaaugccaccagauucgccucuguguacgccuggaaccggaagcggaucagcaauugcguggccgacuacuccgugcuguacaacuccgccagcuucagcaccuucaagugcuacggcguguccccuaccaagcugaacgaccugugcuucacaaacguguacgccgacagcuucgugauccggggagaugaagugcggcagauugccccuggacagacaggcaagaucgccgacuacaacuacaagcugcccgacgacuucaccggcugugugauugccuggaacagcaacaaccuggacuccaaagucggcggcaacuacaauuaccuguaccggcuguuccggaaguccaaucugaagcccuucgagcgggacaucuccaccgagaucuaucaggccggcagcaccccuuguaacggcguggaaggcuucaacugcuacuucccacugcaguccuacggcuuucagcccacaaauggcgugggcuaucagcccuacagagugguggugcugagcuucgaacugcugcaugccccugccacagugugcggcccuaagaaaagcaccaaucucgugaagaacaaaugcgugaacuucaacuucaacggccugaccggcaccggcgugcugacagagagcaacaagaaguuccugccauuccagcaguuuggccgggauaucgccgauaccacagacgccguuagagauccccagacacuggaaauccuggacaucaccccuugcagcuucggcggagugucugugaucaccccuggcaccaacaccagcaaucagguggcagugcuguaccagggcgugaacuguaccgaagugcccguggccauucacgccgaucagcugacaccuacauggcggguguacuccaccggcagcaauguguuucagaccagagccggcugucugaucggagccgagcacgugaacaauagcuacgagugcgacauccccaucggcgcuggaaucugcgccagcuaccagacacagacaaacagcccucggagagccagaagcguggccagccagagcaucauugccuacacaaugucucugggcgccgagaacagcguggccuacuccaacaacucuaucgcuauccccaccaacuucaccaucagcgugaccacagagauccugccuguguccaugaccaagaccagcguggacugcaccauguacaucugcggcgauuccaccgagugcuccaaccugcugcugcaguacggcagcuucugcacccagcugaauagagcccugacagggaucgccguggaacaggacaagaacacccaagagguguucgcccaagugaagcagaucuacaagaccccuccuaucaaggacuucggcggcuucaauuucagccagauucugcccgauccuagcaagcccagcaagcggagcuucaucgaggaccugcuguucaacaaagugacacuggccgacgccggcuucaucaagcaguauggcgauugucugggcgacauugccgccagggaucugauuugcgcccagaaguuuaacggacugacagugcugccuccucugcugaccgaugagaugaucgcccaguacacaucugcccugcuggccggcacaaucacaagcggcuggacauuuggagcaggcgccgcucugcagauccccuuugcuaugcagauggccuaccgguucaacggcaucggagugacccagaaugugcuguacgagaaccagaagcugaucgccaaccaguucaacagcgccaucggcaagauccaggacagccugagcagcacagcaagcgcccugggaaagcugcaggacguggucaaccagaaugcccaggcacugaacacccuggucaagcagcuguccuccaacuucggcgccaucagcucugugcugaacgauauccugagcagacuggacccuccugaggccgaggugcagaucgacagacugaucacaggcagacugcagagccuccagacauacgugacccagcagcugaucagagccgccgagauuagagccucugccaaucuggccgccaccaagaugucugagugugugcugggccagagcaagagaguggacuuuugcggcaagggcuaccaccugaugagcuucccucagucugccccucacggcgugguguuucugcacgugacauaugugcccgcucaagagaagaauuucaccaccgcuccagccaucugccacgacggcaaagcccacuuuccuagagaaggcguguucguguccaacggcacccauugguucgugacacagcggaacuucuacgagccccagaucaucaccaccgacaacaccuucgugucuggcaacugcgacgucgugaucggcauugugaacaauaccguguacgacccucugcagcccgagcuggacagcuucaaagaggaacuggacaaguacuuuaagaaccacacaagccccgacguggaccugggcgauaucagcggaaucaaugccagcgucgugaacauccagaaagagaucgaccggcugaacgagguggccaagaaucugaacgagagccugaucgaccugcaagaacuggggaaguacgagcaguacaucaaguggcccugguacaucuggcugggcuuuaucgccggacugauugccaucgugauggucacaaucaugcuguguugcaugaccagcugcuguagcugccugaagggcuguuguagcuguggcagcugcugcaaguucgacgaggacgauucugagcccgugcugaagggcgugaaacugcacuacacaugauaauaggcuggagccucgguggccuagcuucuugccccuugggccuccccccagccccuccuccccuuccugcacccguacccccguggucuuugaauaaagucugagugggcggcaaaaaaaaaaaaaaaaaaaaaaaaaaaaaaaaaaaaaaaaaaaaaaaaaaaaaaaaaaaaaaaaaaaaaaaaaaaaaaaaaaaaaaaaaaaaaaaaaaaaucuag

SEQ ID NO: 26689 - RNA, 4100 nt, Artificial Sequence
  SARS-CoV-2/Wuhan/WIV05/2019__EPI_ISL_402128 spike protein mRNA gc mod (1-1273)(K986P_V987P_A222V_D614G)
gggaaauaagagagaaaagaagaguaagaagaaauauaagaccccggcgccgccaccauguucguguuccuggugcugcugccucugguguccagccagugugugaaccugaccaccagaacacagcugccuccagccuacaccaacagcuuuaccagaggcguguacuaccccgacaagguguucagauccagcgugcugcacucuacccaggaccuguuccugccuuucuucagcaacgugaccugguuccacgccauccacguguccggcaccaauggcaccaagagauucgacaaccccgugcugcccuucaacgacgggguguacuuugccagcaccgagaaguccaacaucaucagaggcuggaucuucggcaccacacuggacagcaagacccagagccugcugaucgugaacaacgccaccaacguggucaucaaagugugcgaguuccaguucugcaacgaccccuuccugggcgucuacuaccacaagaacaacaagagcuggauggaaagcgaguuccggguguacagcagcgccaacaacugcaccuucgaguacgugucccagccuuuccugauggaccuggaaggcaagcagggcaacuucaagaaccugcgcgaguucguguuuaagaacaucgacggcuacuucaagaucuacagcaagcacaccccuaucaaccucgugcgggaucugccucagggcuucucugugcuggaaccccugguggaucugcccaucggcaucaacaucacccgguuucagacacugcuggcccugcacagaagcuaccugacaccuggcgauagcagcagcggauggacagcuggugccgccgcuuacuaugugggcuaccugcagccuagaaccuuccugcugaaguacaacgagaacggcaccaucaccgacgccguggauugugcucuggauccucugagcgagacaaagugcacccugaaguccuucaccguggaaaagggcaucuaccagaccagcaacuuccgggugcagcccaccgaauccaucgugcgguuccccaauaucaccaaucugugccccuucggcgagguguucaaugccaccagauucgccucuguguacgccuggaaccggaagcggaucagcaauugcguggccgacuacuccgugcuguacaacuccgccagcuucagcaccuucaagugcuacggcguguccccuaccaagcugaacgaccugugcuucacaaacguguacgccgacagcuucgugauccggggagaugaagugcggcagauugccccuggacagacaggcaagaucgccgacuacaacuacaagcugcccgacgacuucaccggcugugugauugccuggaacagcaacaaccuggacuccaaagucggcggcaacuacaauuaccuguaccggcuguuccggaaguccaaucugaagcccuucgagcgggacaucuccaccgagaucuaucaggccggcagcaccccuuguaacggcguggaaggcuucaacugcuacuucccacugcaguccuacggcuuucagcccacaaauggcgugggcuaucagcccuacagagugguggugcugagcuucgaacugcugcaugccccugccacagugugcggcccuaagaaaagcaccaaucucgugaagaacaaaugcgugaacuucaacuucaacggccugaccggcaccggcgugcugacagagagcaacaagaaguuccugccauuccagcaguuuggccgggauaucgccgauaccacagacgccguuagagauccccagacacuggaaauccuggacaucaccccuugcagcuucggcggagugucugugaucaccccuggcaccaacaccagcaaucagguggcagugcuguaccagggcgugaacuguaccgaagugcccguggccauucacgccgaucagcugacaccuacauggcggguguacuccaccggcagcaauguguuucagaccagagccggcugucugaucggagccgagcacgugaacaauagcuacgagugcgacauccccaucggcgcuggaaucugcgccagcuaccagacacagacaaacagcccucggagagccagaagcguggccagccagagcaucauugccuacacaaugucucugggcgccgagaacagcguggccuacuccaacaacucuaucgcuauccccaccaacuucaccaucagcgugaccacagagauccugccuguguccaugaccaagaccagcguggacugcaccauguacaucugcggcgauuccaccgagugcuccaaccugcugcugcaguacggcagcuucugcacccagcugaauagagcccugacagggaucgccguggaacaggacaagaacacccaagagguguucgcccaagugaagcagaucuacaagaccccuccuaucaaggacuucggcggcuucaauuucagccagauucugcccgauccuagcaagcccagcaagcggagcuucaucgaggaccugcuguucaacaaagugacacuggccgacgccggcuucaucaagcaguauggcgauugucugggcgacauugccgccagggaucugauuugcgcccagaaguuuaacggacugacagugcugccuccucugcugaccgaugagaugaucgcccaguacacaucugcccugcuggccggcacaaucacaagcggcuggacauuuggagcaggcgccgcucugcagauccccuuugcuaugcagauggccuaccgguucaacggcaucggagugacccagaaugugcuguacgagaaccagaagcugaucgccaaccaguucaacagcgccaucggcaagauccaggacagccugagcagcacagcaagcgcccugggaaagcugcaggacguggucaaccagaaugcccaggcacugaacacccuggucaagcagcuguccuccaacuucggcgccaucagcucugugcugaacgauauccugagcagacuggacccuccugaggccgaggugcagaucgacagacugaucacaggcagacugcagagccuccagacauacgugacccagcagcugaucagagccgccgagauuagagccucugccaaucuggccgccaccaagaugucugagugugugcugggccagagcaagagaguggacuuuugcggcaagggcuaccaccugaugagcuucccucagucugccccucacggcgugguguuucugcacgugacauaugugcccgcucaagagaagaauuucaccaccgcuccagccaucugccacgacggcaaagcccacuuuccuagagaaggcguguucguguccaacggcacccauugguucgugacacagcggaacuucuacgagccccagaucaucaccaccgacaacaccuucgugucuggcaacugcgacgucgugaucggcauugugaacaauaccguguacgacccucugcagcccgagcuggacagcuucaaagaggaacuggacaaguacuuuaagaaccacacaagccccgacguggaccugggcgauaucagcggaaucaaugccagcgucgugaacauccagaaagagaucgaccggcugaacgagguggccaagaaucugaacgagagccugaucgaccugcaagaacuggggaaguacgagcaguacaucaaguggcccugguacaucuggcugggcuuuaucgccggacugauugccaucgugauggucacaaucaugcuguguugcaugaccagcugcuguagcugccugaagggcuguuguagcuguggcagcugcugcaaguucgacgaggacgauucugagcccgugcugaagggcgugaaacugcacuacacaugauaauaggcuggagccucgguggccuagcuucuugccccuugggccuccccccagccccuccuccccuuccugcacccguacccccguggucuuugaauaaagucugagugggcggcaaaaaaaaaaaaaaaaaaaaaaaaaaaaaaaaaaaaaaaaaaaaaaaaaaaaaaaaaaaaaaaaaaaaaaaaaaaaaaaaaaaaaaaaaaaaaaaaaaaaucuag

SEQ ID NO: 26690 - RNA, 4100 nt, Artificial Sequence
  SARS-CoV-2/Wuhan/WIV05/2019__EPI_ISL_402128 spike protein mRNA gc mod (1-1273)(K986P_V987P_N439K_D614G)
gggaaauaagagagaaaagaagaguaagaagaaauauaagaccccggcgccgccaccauguucguguuccuggugcugcugccucugguguccagccagugugugaaccugaccaccagaacacagcugccuccagccuacaccaacagcuuuaccagaggcguguacuaccccgacaagguguucagauccagcgugcugcacucuacccaggaccuguuccugccuuucuucagcaacgugaccugguuccacgccauccacguguccggcaccaauggcaccaagagauucgacaaccccgugcugcccuucaacgacgggguguacuuugccagcaccgagaaguccaacaucaucagaggcuggaucuucggcaccacacuggacagcaagacccagagccugcugaucgugaacaacgccaccaacguggucaucaaagugugcgaguuccaguucugcaacgaccccuuccugggcgucuacuaccacaagaacaacaagagcuggauggaaagcgaguuccggguguacagcagcgccaacaacugcaccuucgaguacgugucccagccuuuccugauggaccuggaaggcaagcagggcaacuucaagaaccugcgcgaguucguguuuaagaacaucgacggcuacuucaagaucuacagcaagcacaccccuaucaaccucgugcgggaucugccucagggcuucucugcucuggaaccccugguggaucugcccaucggcaucaacaucacccgguuucagacacugcuggcccugcacagaagcuaccugacaccuggcgauagcagcagcggauggacagcuggugccgccgcuuacuaugugggcuaccugcagccuagaaccuuccugcugaaguacaacgagaacggcaccaucaccgacgccguggauugugcucuggauccucugagcgagacaaagugcacccugaaguccuucaccguggaaaagggcaucuaccagaccagcaacuuccgggugcagcccaccgaauccaucgugcgguuccccaauaucaccaaucugugccccuucggcgagguguucaaugccaccagauucgccucuguguacgccuggaaccggaagcggaucagcaauugcguggccgacuacuccgugcuguacaacuccgccagcuucagcaccuucaagugcuacggcguguccccuaccaagcugaacgaccugugcuucacaaacguguacgccgacagcuucgugauccggggagaugaagugcggcagauugccccuggacagacaggcaagaucgccgacuacaacuacaagcugcccgacgacuucaccggcugugugauugccuggaacagcaagaaccuggacuccaaagucggcggcaacuacaauuaccuguaccggcuguuccggaaguccaaucugaagcccuucgagcgggacaucuccaccgagaucuaucaggccggcagcaccccuuguaacggcguggaaggcuucaacugcuacuucccacugcaguccuacggcuuucagcccacaaauggcgugggcuaucagcccuacagagugguggugcugagcuucgaacugcugcaugccccugccacagugugcggcccuaagaaaagcaccaaucucgugaagaacaaaugcgugaacuucaacuucaacggccugaccggcaccggcgugcugacagagagcaacaagaaguuccugccauuccagcaguuuggccgggauaucgccgauaccacagacgccguuagagauccccagacacuggaaauccuggacaucaccccuugcagcuucggcggagugucugugaucaccccuggcaccaacaccagcaaucagguggcagugcuguaccagggcgugaacuguaccgaagugcccguggccauucacgccgaucagcugacaccuacauggcggguguacuccaccggcagcaauguguuucagaccagagccggcugucugaucggagccgagcacgugaacaauagcuacgagugcgacauccccaucggcgcuggaaucugcgccagcuaccagacacagacaaacagcccucggagagccagaagcguggccagccagagcaucauugccuacacaaugucucugggcgccgagaacagcguggccuacuccaacaacucuaucgcuauccccaccaacuucaccaucagcgugaccacagagauccugccuguguccaugaccaagaccagcguggacugcaccauguacaucugcggcgauuccaccgagugcuccaaccugcugcugcaguacggcagcuucugcacccagcugaauagagcccugacagggaucgccguggaacaggacaagaacacccaagagguguucgcccaagugaagcagaucuacaagaccccuccuaucaaggacuucggcggcuucaauuucagccagauucugcccgauccuagcaagcccagcaagcggagcuucaucgaggaccugcuguucaacaaagugacacuggccgacgccggcuucaucaagcaguauggcgauugucugggcgacauugccgccagggaucugauuugcgcccagaaguuuaacggacugacagugcugccuccucugcugaccgaugagaugaucgcccaguacacaucugcccugcuggccggcacaaucacaagcggcuggacauuuggagcaggcgccgcucugcagauccccuuugcuaugcagauggccuaccgguucaacggcaucggagugacccagaaugugcuguacgagaaccagaagcugaucgccaaccaguucaacagcgccaucggcaagauccaggacagccugagcagcacagcaagcgcccugggaaagcugcaggacguggucaaccagaaugcccaggcacugaacacccuggucaagcagcuguccuccaacuucggcgccaucagcucugugcugaacgauauccugagcagacuggacccuccugaggccgaggugcagaucgacagacugaucacaggcagacugcagagccuccagacauacgugacccagcagcugaucagagccgccgagauuagagccucugccaaucuggccgccaccaagaugucugagugugugcugggccagagcaagagaguggacuuuugcggcaagggcuaccaccugaugagcuucccucagucugccccucacggcgugguguuucugcacgugacauaugugcccgcucaagagaagaauuucaccaccgcuccagccaucugccacgacggcaaagcccacuuuccuagagaaggcguguucguguccaacggcacccauugguucgugacacagcggaacuucuacgagccccagaucaucaccaccgacaacaccuucgugucuggcaacugcgacgucgugaucggcauugugaacaauaccguguacgacccucugcagcccgagcuggacagcuucaaagaggaacuggacaaguacuuuaagaaccacacaagccccgacguggaccugggcgauaucagcggaaucaaugccagcgucgugaacauccagaaagagaucgaccggcugaacgagguggccaagaaucugaacgagagccugaucgaccugcaagaacuggggaaguacgagcaguacaucaaguggcccugguacaucuggcugggcuuuaucgccggacugauugccaucgugauggucacaaucaugcuguguugcaugaccagcugcuguagcugccugaagggcuguuguagcuguggcagcugcugcaaguucgacgaggacgauucugagcccgugcugaagggcgugaaacugcacuacacaugauaauaggcuggagccucgguggccuagcuucuugccccuugggccuccccccagccccuccuccccuuccugcacccguacccccguggucuuugaauaaagucugagugggcggcaaaaaaaaaaaaaaaaaaaaaaaaaaaaaaaaaaaaaaaaaaaaaaaaaaaaaaaaaaaaaaaaaaaaaaaaaaaaaaaaaaaaaaaaaaaaaaaaaaaaucuag

SEQ ID NO: 26691 - RNA, 4100 nt, Artificial Sequence
  SARS-CoV-2/Wuhan/WIV05/2019__EPI_ISL_402128 spike protein mRNA gc mod (1-1273)(K986P_V987P_S477N_D614G)
gggaaauaagagagaaaagaagaguaagaagaaauauaagaccccggcgccgccaccauguucguguuccuggugcugcugccucugguguccagccagugugugaaccugaccaccagaacacagcugccuccagccuacaccaacagcuuuaccagaggcguguacuaccccgacaagguguucagauccagcgugcugcacucuacccaggaccuguuccugccuuucuucagcaacgugaccugguuccacgccauccacguguccggcaccaauggcaccaagagauucgacaaccccgugcugcccuucaacgacgggguguacuuugccagcaccgagaaguccaacaucaucagaggcuggaucuucggcaccacacuggacagcaagacccagagccugcugaucgugaacaacgccaccaacguggucaucaaagugugcgaguuccaguucugcaacgaccccuuccugggcgucuacuaccacaagaacaacaagagcuggauggaaagcgaguuccggguguacagcagcgccaacaacugcaccuucgaguacgugucccagccuuuccugauggaccuggaaggcaagcagggcaacuucaagaaccugcgcgaguucguguuuaagaacaucgacggcuacuucaagaucuacagcaagcacaccccuaucaaccucgugcgggaucugccucagggcuucucugcucuggaaccccugguggaucugcccaucggcaucaacaucacccgguuucagacacugcuggcccugcacagaagcuaccugacaccuggcgauagcagcagcggauggacagcuggugccgccgcuuacuaugugggcuaccugcagccuagaaccuuccugcugaaguacaacgagaacggcaccaucaccgacgccguggauugugcucuggauccucugagcgagacaaagugcacccugaaguccuucaccguggaaaagggcaucuaccagaccagcaacuuccgggugcagcccaccgaauccaucgugcgguuccccaauaucaccaaucugugccccuucggcgagguguucaaugccaccagauucgccucuguguacgccuggaaccggaagcggaucagcaauugcguggccgacuacuccgugcuguacaacuccgccagcuucagcaccuucaagugcuacggcguguccccuaccaagcugaacgaccugugcuucacaaacguguacgccgacagcuucgugauccggggagaugaagugcggcagauugccccuggacagacaggcaagaucgccgacuacaacuacaagcugcccgacgacuucaccggcugugugauugccuggaacagcaacaaccuggacuccaaagucggcggcaacuacaauuaccuguaccggcuguuccggaaguccaaucugaagcccuucgagcgggacaucuccaccgagaucuaucaggccggcaacaccccuuguaacggcguggaaggcuucaacugcuacuucccacugcaguccuacggcuuucagcccacaaauggcgugggcuaucagcccuacagagugguggugcugagcuucgaacugcugcaugccccugccacagugugcggcccuaagaaaagcaccaaucucgugaagaacaaaugcgugaacuucaacuucaacggccugaccggcaccggcgugcugacagagagcaacaagaaguuccugccauuccagcaguuuggccgggauaucgccgauaccacagacgccguuagagauccccagacacuggaaauccuggacaucaccccuugcagcuucggcggagugucugugaucaccccuggcaccaacaccagcaaucagguggcagugcuguaccagggcgugaacuguaccgaagugcccguggccauucacgccgaucagcugacaccuacauggcggguguacuccaccggcagcaauguguuucagaccagagccggcugucugaucggagccgagcacgugaacaauagcuacgagugcgacauccccaucggcgcuggaaucugcgccagcuaccagacacagacaaacagcccucggagagccagaagcguggccagccagagcaucauugccuacacaaugucucugggcgccgagaacagcguggccuacuccaacaacucuaucgcuauccccaccaacuucaccaucagcgugaccacagagauccugccuguguccaugaccaagaccagcguggacugcaccauguacaucugcggcgauuccaccgagugcuccaaccugcugcugcaguacggcagcuucugcacccagcugaauagagcccugacagggaucgccguggaacaggacaagaacacccaagagguguucgcccaagugaagcagaucuacaagaccccuccuaucaaggacuucggcggcuucaauuucagccagauucugcccgauccuagcaagcccagcaagcggagcuucaucgaggaccugcuguucaacaaagugacacuggccgacgccggcuucaucaagcaguauggcgauugucugggcgacauugccgccagggaucugauuugcgcccagaaguuuaacggacugacagugcugccuccucugcugaccgaugagaugaucgcccaguacacaucugcccugcuggccggcacaaucacaagcggcuggacauuuggagcaggcgccgcucugcagauccccuuugcuaugcagauggccuaccgguucaacggcaucggagugacccagaaugugcuguacgagaaccagaagcugaucgccaaccaguucaacagcgccaucggcaagauccaggacagccugagcagcacagcaagcgcccugggaaagcugcaggacguggucaaccagaaugcccaggcacugaacacccuggucaagcagcuguccuccaacuucggcgccaucagcucugugcugaacgauauccugagcagacuggacccuccugaggccgaggugcagaucgacagacugaucacaggcagacugcagagccuccagacauacgugacccagcagcugaucagagccgccgagauuagagccucugccaaucuggccgccaccaagaugucugagugugugcugggccagagcaagagaguggacuuuugcggcaagggcuaccaccugaugagcuucccucagucugccccucacggcgugguguuucugcacgugacauaugugcccgcucaagagaagaauuucaccaccgcuccagccaucugccacgacggcaaagcccacuuuccuagagaaggcguguucguguccaacggcacccauugguucgugacacagcggaacuucuacgagccccagaucaucaccaccgacaacaccuucgugucuggcaacugcgacgucgugaucggcauugugaacaauaccguguacgacccucugcagcccgagcuggacagcuucaaagaggaacuggacaaguacuuuaagaaccacacaagccccgacguggaccugggcgauaucagcggaaucaaugccagcgucgugaacauccagaaagagaucgaccggcugaacgagguggccaagaaucugaacgagagccugaucgaccugcaagaacuggggaaguacgagcaguacaucaaguggcccugguacaucuggcugggcuuuaucgccggacugauugccaucgugauggucacaaucaugcuguguugcaugaccagcugcuguagcugccugaagggcuguuguagcuguggcagcugcugcaaguucgacgaggacgauucugagcccgugcugaagggcgugaaacugcacuacacaugauaauaggcuggagccucgguggccuagcuucuugccccuugggccuccccccagccccuccuccccuuccugcacccguacccccguggucuuugaauaaagucugagugggcggcaaaaaaaaaaaaaaaaaaaaaaaaaaaaaaaaaaaaaaaaaaaaaaaaaaaaaaaaaaaaaaaaaaaaaaaaaaaaaaaaaaaaaaaaaaaaaaaaaaaaucuag

SEQ ID NO: 26692 - RNA, 4100 nt, Artificial Sequence
  SARS-CoV-2/Wuhan/WIV05/2019__EPI_ISL_402128 spike protein mRNA gc mod (1-1273)(K986P_V987P_N501Y_D614G)
gggaaauaagagagaaaagaagaguaagaagaaauauaagaccccggcgccgccaccauguucguguuccuggugcugcugccucugguguccagccagugugugaaccugaccaccagaacacagcugccuccagccuacaccaacagcuuuaccagaggcguguacuaccccgacaagguguucagauccagcgugcugcacucuacccaggaccuguuccugccuuucuucagcaacgugaccugguuccacgccauccacguguccggcaccaauggcaccaagagauucgacaaccccgugcugcccuucaacgacgggguguacuuugccagcaccgagaaguccaacaucaucagaggcuggaucuucggcaccacacuggacagcaagacccagagccugcugaucgugaacaacgccaccaacguggucaucaaagugugcgaguuccaguucugcaacgaccccuuccugggcgucuacuaccacaagaacaacaagagcuggauggaaagcgaguuccggguguacagcagcgccaacaacugcaccuucgaguacgugucccagccuuuccugauggaccuggaaggcaagcagggcaacuucaagaaccugcgcgaguucguguuuaagaacaucgacggcuacuucaagaucuacagcaagcacaccccuaucaaccucgugcgggaucugccucagggcuucucugcucuggaaccccugguggaucugcccaucggcaucaacaucacccgguuucagacacugcuggcccugcacagaagcuaccugacaccuggcgauagcagcagcggauggacagcuggugccgccgcuuacuaugugggcuaccugcagccuagaaccuuccugcugaaguacaacgagaacggcaccaucaccgacgccguggauugugcucuggauccucugagcgagacaaagugcacccugaaguccuucaccguggaaaagggcaucuaccagaccagcaacuuccgggugcagcccaccgaauccaucgugcgguuccccaauaucaccaaucugugccccuucggcgagguguucaaugccaccagauucgccucuguguacgccuggaaccggaagcggaucagcaauugcguggccgacuacuccgugcuguacaacuccgccagcuucagcaccuucaagugcuacggcguguccccuaccaagcugaacgaccugugcuucacaaacguguacgccgacagcuucgugauccggggagaugaagugcggcagauugccccuggacagacaggcaagaucgccgacuacaacuacaagcugcccgacgacuucaccggcugugugauugccuggaacagcaacaaccuggacuccaaagucggcggcaacuacaauuaccuguaccggcuguuccggaaguccaaucugaagcccuucgagcgggacaucuccaccgagaucuaucaggccggcagcaccccuuguaacggcguggaaggcuucaacugcuacuucccacugcaguccuacggcuuucagcccacauacggcgugggcuaucagcccuacagagugguggugcugagcuucgaacugcugcaugccccugccacagugugcggcccuaagaaaagcaccaaucucgugaagaacaaaugcgugaacuucaacuucaacggccugaccggcaccggcgugcugacagagagcaacaagaaguuccugccauuccagcaguuuggccgggauaucgccgauaccacagacgccguuagagauccccagacacuggaaauccuggacaucaccccuugcagcuucggcggagugucugugaucaccccuggcaccaacaccagcaaucagguggcagugcuguaccagggcgugaacuguaccgaagugcccguggccauucacgccgaucagcugacaccuacauggcggguguacuccaccggcagcaauguguuucagaccagagccggcugucugaucggagccgagcacgugaacaauagcuacgagugcgacauccccaucggcgcuggaaucugcgccagcuaccagacacagacaaacagcccucggagagccagaagcguggccagccagagcaucauugccuacacaaugucucugggcgccgagaacagcguggccuacuccaacaacucuaucgcuauccccaccaacuucaccaucagcgugaccacagagauccugccuguguccaugaccaagaccagcguggacugcaccauguacaucugcggcgauuccaccgagugcuccaaccugcugcugcaguacggcagcuucugcacccagcugaauagagcccugacagggaucgccguggaacaggacaagaacacccaagagguguucgcccaagugaagcagaucuacaagaccccuccuaucaaggacuucggcggcuucaauuucagccagauucugcccgauccuagcaagcccagcaagcggagcuucaucgaggaccugcuguucaacaaagugacacuggccgacgccggcuucaucaagcaguauggcgauugucugggcgacauugccgccagggaucugauuugcgcccagaaguuuaacggacugacagugcugccuccucugcugaccgaugagaugaucgcccaguacacaucugcccugcuggccggcacaaucacaagcggcuggacauuuggagcaggcgccgcucugcagauccccuuugcuaugcagauggccuaccgguucaacggcaucggagugacccagaaugugcuguacgagaaccagaagcugaucgccaaccaguucaacagcgccaucggcaagauccaggacagccugagcagcacagcaagcgcccugggaaagcugcaggacguggucaaccagaaugcccaggcacugaacacccuggucaagcagcuguccuccaacuucggcgccaucagcucugugcugaacgauauccugagcagacuggacccuccugaggccgaggugcagaucgacagacugaucacaggcagacugcagagccuccagacauacgugacccagcagcugaucagagccgccgagauuagagccucugccaaucuggccgccaccaagaugucugagugugugcugggccagagcaagagaguggacuuuugcggcaagggcuaccaccugaugagcuucccucagucugccccucacggcgugguguuucugcacgugacauaugugcccgcucaagagaagaauuucaccaccgcuccagccaucugccacgacggcaaagcccacuuuccuagagaaggcguguucguguccaacggcacccauugguucgugacacagcggaacuucuacgagccccagaucaucaccaccgacaacaccuucgugucuggcaacugcgacgucgugaucggcauugugaacaauaccguguacgacccucugcagcccgagcuggacagcuucaaagaggaacuggacaaguacuuuaagaaccacacaagccccgacguggaccugggcgauaucagcggaaucaaugccagcgucgugaacauccagaaagagaucgaccggcugaacgagguggccaagaaucugaacgagagccugaucgaccugcaagaacuggggaaguacgagcaguacaucaaguggcccugguacaucuggcugggcuuuaucgccggacugauugccaucgugauggucacaaucaugcuguguugcaugaccagcugcuguagcugccugaagggcuguuguagcuguggcagcugcugcaaguucgacgaggacgauucugagcccgugcugaagggcgugaaacugcacuacacaugauaauaggcuggagccucgguggccuagcuucuugccccuugggccuccccccagccccuccuccccuuccugcacccguacccccguggucuuugaauaaagucugagugggcggcaaaaaaaaaaaaaaaaaaaaaaaaaaaaaaaaaaaaaaaaaaaaaaaaaaaaaaaaaaaaaaaaaaaaaaaaaaaaaaaaaaaaaaaaaaaaaaaaaaaaucuag

SEQ ID NO: 26693 - RNA, 4094 nt, Artificial Sequence
  SARS-CoV-2/Wuhan/WIV05/2019__EPI_ISL_402128 spike protein mRNA gc mod (1-1273)(K986P_V987P_H69del_V70del_D614G)
gggaaauaagagagaaaagaagaguaagaagaaauauaagaccccggcgccgccaccauguucguguuccuggugcugcugccucugguguccagccagugugugaaccugaccaccagaacacagcugccuccagccuacaccaacagcuuuaccagaggcguguacuaccccgacaagguguucagauccagcgugcugcacucuacccaggaccuguuccugccuuucuucagcaacgugaccugguuccacgccaucuccggcaccaauggcaccaagagauucgacaaccccgugcugcccuucaacgacgggguguacuuugccagcaccgagaaguccaacaucaucagaggcuggaucuucggcaccacacuggacagcaagacccagagccugcugaucgugaacaacgccaccaacguggucaucaaagugugcgaguuccaguucugcaacgaccccuuccugggcgucuacuaccacaagaacaacaagagcuggauggaaagcgaguuccggguguacagcagcgccaacaacugcaccuucgaguacgugucccagccuuuccugauggaccuggaaggcaagcagggcaacuucaagaaccugcgcgaguucguguuuaagaacaucgacggcuacuucaagaucuacagcaagcacaccccuaucaaccucgugcgggaucugccucagggcuucucugcucuggaaccccugguggaucugcccaucggcaucaacaucacccgguuucagacacugcuggcccugcacagaagcuaccugacaccuggcgauagcagcagcggauggacagcuggugccgccgcuuacuaugugggcuaccugcagccuagaaccuuccugcugaaguacaacgagaacggcaccaucaccgacgccguggauugugcucuggauccucugagcgagacaaagugcacccugaaguccuucaccguggaaaagggcaucuaccagaccagcaacuuccgggugcagcccaccgaauccaucgugcgguuccccaauaucaccaaucugugccccuucggcgagguguucaaugccaccagauucgccucuguguacgccuggaaccggaagcggaucagcaauugcguggccgacuacuccgugcuguacaacuccgccagcuucagcaccuucaagugcuacggcguguccccuaccaagcugaacgaccugugcuucacaaacguguacgccgacagcuucgugauccggggagaugaagugcggcagauugccccuggacagacaggcaagaucgccgacuacaacuacaagcugcccgacgacuucaccggcugugugauugccuggaacagcaacaaccuggacuccaaagucggcggcaacuacaauuaccuguaccggcuguuccggaaguccaaucugaagcccuucgagcgggacaucuccaccgagaucuaucaggccggcagcaccccuuguaacggcguggaaggcuucaacugcuacuucccacugcaguccuacggcuuucagcccacaaauggcgugggcuaucagcccuacagagugguggugcugagcuucgaacugcugcaugccccugccacagugugcggcccuaagaaaagcaccaaucucgugaagaacaaaugcgugaacuucaacuucaacggccugaccggcaccggcgugcugacagagagcaacaagaaguuccugccauuccagcaguuuggccgggauaucgccgauaccacagacgccguuagagauccccagacacuggaaauccuggacaucaccccuugcagcuucggcggagugucugugaucaccccuggcaccaacaccagcaaucagguggcagugcuguaccagggcgugaacuguaccgaagugcccguggccauucacgccgaucagcugacaccuacauggcggguguacuccaccggcagcaauguguuucagaccagagccggcugucugaucggagccgagcacgugaacaauagcuacgagugcgacauccccaucggcgcuggaaucugcgccagcuaccagacacagacaaacagcccucggagagccagaagcguggccagccagagcaucauugccuacacaaugucucugggcgccgagaacagcguggccuacuccaacaacucuaucgcuauccccaccaacuucaccaucagcgugaccacagagauccugccuguguccaugaccaagaccagcguggacugcaccauguacaucugcggcgauuccaccgagugcuccaaccugcugcugcaguacggcagcuucugcacccagcugaauagagcccugacagggaucgccguggaacaggacaagaacacccaagagguguucgcccaagugaagcagaucuacaagaccccuccuaucaaggacuucggcggcuucaauuucagccagauucugcccgauccuagcaagcccagcaagcggagcuucaucgaggaccugcuguucaacaaagugacacuggccgacgccggcuucaucaagcaguauggcgauugucugggcgacauugccgccagggaucugauuugcgcccagaaguuuaacggacugacagugcugccuccucugcugaccgaugagaugaucgcccaguacacaucugcccugcuggccggcacaaucacaagcggcuggacauuuggagcaggcgccgcucugcagauccccuuugcuaugcagauggccuaccgguucaacggcaucggagugacccagaaugugcuguacgagaaccagaagcugaucgccaaccaguucaacagcgccaucggcaagauccaggacagccugagcagcacagcaagcgcccugggaaagcugcaggacguggucaaccagaaugcccaggcacugaacacccuggucaagcagcuguccuccaacuucggcgccaucagcucugugcugaacgauauccugagcagacuggacccuccugaggccgaggugcagaucgacagacugaucacaggcagacugcagagccuccagacauacgugacccagcagcugaucagagccgccgagauuagagccucugccaaucuggccgccaccaagaugucugagugugugcugggccagagcaagagaguggacuuuugcggcaagggcuaccaccugaugagcuucccucagucugccccucacggcgugguguuucugcacgugacauaugugcccgcucaagagaagaauuucaccaccgcuccagccaucugccacgacggcaaagcccacuuuccuagagaaggcguguucguguccaacggcacccauugguucgugacacagcggaacuucuacgagccccagaucaucaccaccgacaacaccuucgugucuggcaacugcgacgucgugaucggcauugugaacaauaccguguacgacccucugcagcccgagcuggacagcuucaaagaggaacuggacaaguacuuuaagaaccacacaagccccgacguggaccugggcgauaucagcggaaucaaugccagcgucgugaacauccagaaagagaucgaccggcugaacgagguggccaagaaucugaacgagagccugaucgaccugcaagaacuggggaaguacgagcaguacaucaaguggcccugguacaucuggcugggcuuuaucgccggacugauugccaucgugauggucacaaucaugcuguguugcaugaccagcugcuguagcugccugaagggcuguuguagcuguggcagcugcugcaaguucgacgaggacgauucugagcccgugcugaagggcgugaaacugcacuacacaugauaauaggcuggagccucgguggccuagcuucuugccccuugggccuccccccagccccuccuccccuuccugcacccguacccccguggucuuugaauaaagucugagugggcggcaaaaaaaaaaaaaaaaaaaaaaaaaaaaaaaaaaaaaaaaaaaaaaaaaaaaaaaaaaaaaaaaaaaaaaaaaaaaaaaaaaaaaaaaaaaaaaaaaaaaucuag

SEQ ID NO: 26694 - RNA, 4100 nt, Artificial Sequence
  SARS-CoV-2/Wuhan/WIV05/2019__EPI_ISL_402128 spike protein mRNA gc mod (1-1273)(K986P_V987P_Y453F_D614G)
gggaaauaagagagaaaagaagaguaagaagaaauauaagaccccggcgccgccaccauguucguguuccuggugcugcugccucugguguccagccagugugugaaccugaccaccagaacacagcugccuccagccuacaccaacagcuuuaccagaggcguguacuaccccgacaagguguucagauccagcgugcugcacucuacccaggaccuguuccugccuuucuucagcaacgugaccugguuccacgccauccacguguccggcaccaauggcaccaagagauucgacaaccccgugcugcccuucaacgacgggguguacuuugccagcaccgagaaguccaacaucaucagaggcuggaucuucggcaccacacuggacagcaagacccagagccugcugaucgugaacaacgccaccaacguggucaucaaagugugcgaguuccaguucugcaacgaccccuuccugggcgucuacuaccacaagaacaacaagagcuggauggaaagcgaguuccggguguacagcagcgccaacaacugcaccuucgaguacgugucccagccuuuccugauggaccuggaaggcaagcagggcaacuucaagaaccugcgcgaguucguguuuaagaacaucgacggcuacuucaagaucuacagcaagcacaccccuaucaaccucgugcgggaucugccucagggcuucucugcucuggaaccccugguggaucugcccaucggcaucaacaucacccgguuucagacacugcuggcccugcacagaagcuaccugacaccuggcgauagcagcagcggauggacagcuggugccgccgcuuacuaugugggcuaccugcagccuagaaccuuccugcugaaguacaacgagaacggcaccaucaccgacgccguggauugugcucuggauccucugagcgagacaaagugcacccugaaguccuucaccguggaaaagggcaucuaccagaccagcaacuuccgggugcagcccaccgaauccaucgugcgguuccccaauaucaccaaucugugccccuucggcgagguguucaaugccaccagauucgccucuguguacgccuggaaccggaagcggaucagcaauugcguggccgacuacuccgugcuguacaacuccgccagcuucagcaccuucaagugcuacggcguguccccuaccaagcugaacgaccugugcuucacaaacguguacgccgacagcuucgugauccggggagaugaagugcggcagauugccccuggacagacaggcaagaucgccgacuacaacuacaagcugcccgacgacuucaccggcugugugauugccuggaacagcaacaaccuggacuccaaagucggcggcaacuacaauuaccuguuccggcuguuccggaaguccaaucugaagcccuucgagcgggacaucuccaccgagaucuaucaggccggcagcaccccuuguaacggcguggaaggcuucaacugcuacuucccacugcaguccuacggcuuucagcccacaaauggcgugggcuaucagcccuacagagugguggugcugagcuucgaacugcugcaugccccugccacagugugcggcccuaagaaaagcaccaaucucgugaagaacaaaugcgugaacuucaacuucaacggccugaccggcaccggcgugcugacagagagcaacaagaaguuccugccauuccagcaguuuggccgggauaucgccgauaccacagacgccguuagagauccccagacacuggaaauccuggacaucaccccuugcagcuucggcggagugucugugaucaccccuggcaccaacaccagcaaucagguggcagugcuguaccagggcgugaacuguaccgaagugcccguggccauucacgccgaucagcugacaccuacauggcggguguacuccaccggcagcaauguguuucagaccagagccggcugucugaucggagccgagcacgugaacaauagcuacgagugcgacauccccaucggcgcuggaaucugcgccagcuaccagacacagacaaacagcccucggagagccagaagcguggccagccagagcaucauugccuacacaaugucucugggcgccgagaacagcguggccuacuccaacaacucuaucgcuauccccaccaacuucaccaucagcgugaccacagagauccugccuguguccaugaccaagaccagcguggacugcaccauguacaucugcggcgauuccaccgagugcuccaaccugcugcugcaguacggcagcuucugcacccagcugaauagagcccugacagggaucgccguggaacaggacaagaacacccaagagguguucgcccaagugaagcagaucuacaagaccccuccuaucaaggacuucggcggcuucaauuucagccagauucugcccgauccuagcaagcccagcaagcggagcuucaucgaggaccugcuguucaacaaagugacacuggccgacgccggcuucaucaagcaguauggcgauugucugggcgacauugccgccagggaucugauuugcgcccagaaguuuaacggacugacagugcugccuccucugcugaccgaugagaugaucgcccaguacacaucugcccugcuggccggcacaaucacaagcggcuggacauuuggagcaggcgccgcucugcagauccccuuugcuaugcagauggccuaccgguucaacggcaucggagugacccagaaugugcuguacgagaaccagaagcugaucgccaaccaguucaacagcgccaucggcaagauccaggacagccugagcagcacagcaagcgcccugggaaagcugcaggacguggucaaccagaaugcccaggcacugaacacccuggucaagcagcuguccuccaacuucggcgccaucagcucugugcugaacgauauccugagcagacuggacccuccugaggccgaggugcagaucgacagacugaucacaggcagacugcagagccuccagacauacgugacccagcagcugaucagagccgccgagauuagagccucugccaaucuggccgccaccaagaugucugagugugugcugggccagagcaagagaguggacuuuugcggcaagggcuaccaccugaugagcuucccucagucugccccucacggcgugguguuucugcacgugacauaugugcccgcucaagagaagaauuucaccaccgcuccagccaucugccacgacggcaaagcccacuuuccuagagaaggcguguucguguccaacggcacccauugguucgugacacagcggaacuucuacgagccccagaucaucaccaccgacaacaccuucgugucuggcaacugcgacgucgugaucggcauugugaacaauaccguguacgacccucugcagcccgagcuggacagcuucaaagaggaacuggacaaguacuuuaagaaccacacaagccccgacguggaccugggcgauaucagcggaaucaaugccagcgucgugaacauccagaaagagaucgaccggcugaacgagguggccaagaaucugaacgagagccugaucgaccugcaagaacuggggaaguacgagcaguacaucaaguggcccugguacaucuggcugggcuuuaucgccggacugauugccaucgugauggucacaaucaugcuguguugcaugaccagcugcuguagcugccugaagggcuguuguagcuguggcagcugcugcaaguucgacgaggacgauucugagcccgugcugaagggcgugaaacugcacuacacaugauaauaggcuggagccucgguggccuagcuucuugccccuugggccuccccccagccccuccuccccuuccugcacccguacccccguggucuuugaauaaagucugagugggcggcaaaaaaaaaaaaaaaaaaaaaaaaaaaaaaaaaaaaaaaaaaaaaaaaaaaaaaaaaaaaaaaaaaaaaaaaaaaaaaaaaaaaaaaaaaaaaaaaaaaaucuag

SEQ ID NO: 26695 - RNA, 4100 nt, Artificial Sequence
  SARS-CoV-2/Wuhan/WIV05/2019__EPI_ISL_402128 spike protein mRNA gc mod (1-1273)(K986P_V987P_D614G_I692V)
gggaaauaagagagaaaagaagaguaagaagaaauauaagaccccggcgccgccaccauguucguguuccuggugcugcugccucugguguccagccagugugugaaccugaccaccagaacacagcugccuccagccuacaccaacagcuuuaccagaggcguguacuaccccgacaagguguucagauccagcgugcugcacucuacccaggaccuguuccugccuuucuucagcaacgugaccugguuccacgccauccacguguccggcaccaauggcaccaagagauucgacaaccccgugcugcccuucaacgacgggguguacuuugccagcaccgagaaguccaacaucaucagaggcuggaucuucggcaccacacuggacagcaagacccagagccugcugaucgugaacaacgccaccaacguggucaucaaagugugcgaguuccaguucugcaacgaccccuuccugggcgucuacuaccacaagaacaacaagagcuggauggaaagcgaguuccggguguacagcagcgccaacaacugcaccuucgaguacgugucccagccuuuccugauggaccuggaaggcaagcagggcaacuucaagaaccugcgcgaguucguguuuaagaacaucgacggcuacuucaagaucuacagcaagcacaccccuaucaaccucgugcgggaucugccucagggcuucucugcucuggaaccccugguggaucugcccaucggcaucaacaucacccgguuucagacacugcuggcccugcacagaagcuaccugacaccuggcgauagcagcagcggauggacagcuggugccgccgcuuacuaugugggcuaccugcagccuagaaccuuccugcugaaguacaacgagaacggcaccaucaccgacgccguggauugugcucuggauccucugagcgagacaaagugcacccugaaguccuucaccguggaaaagggcaucuaccagaccagcaacuuccgggugcagcccaccgaauccaucgugcgguuccccaauaucaccaaucugugccccuucggcgagguguucaaugccaccagauucgccucuguguacgccuggaaccggaagcggaucagcaauugcguggccgacuacuccgugcuguacaacuccgccagcuucagcaccuucaagugcuacggcguguccccuaccaagcugaacgaccugugcuucacaaacguguacgccgacagcuucgugauccggggagaugaagugcggcagauugccccuggacagacaggcaagaucgccgacuacaacuacaagcugcccgacgacuucaccggcugugugauugccuggaacagcaacaaccuggacuccaaagucggcggcaacuacaauuaccuguaccggcuguuccggaaguccaaucugaagcccuucgagcgggacaucuccaccgagaucuaucaggccggcagcaccccuuguaacggcguggaaggcuucaacugcuacuucccacugcaguccuacggcuuucagcccacaaauggcgugggcuaucagcccuacagagugguggugcugagcuucgaacugcugcaugccccugccacagugugcggcccuaagaaaagcaccaaucucgugaagaacaaaugcgugaacuucaacuucaacggccugaccggcaccggcgugcugacagagagcaacaagaaguuccugccauuccagcaguuuggccgggauaucgccgauaccacagacgccguuagagauccccagacacuggaaauccuggacaucaccccuugcagcuucggcggagugucugugaucaccccuggcaccaacaccagcaaucagguggcagugcuguaccagggcgugaacuguaccgaagugcccguggccauucacgccgaucagcugacaccuacauggcggguguacuccaccggcagcaauguguuucagaccagagccggcugucugaucggagccgagcacgugaacaauagcuacgagugcgacauccccaucggcgcuggaaucugcgccagcuaccagacacagacaaacagcccucggagagccagaagcguggccagccagagcgugauugccuacacaaugucucugggcgccgagaacagcguggccuacuccaacaacucuaucgcuauccccaccaacuucaccaucagcgugaccacagagauccugccuguguccaugaccaagaccagcguggacugcaccauguacaucugcggcgauuccaccgagugcuccaaccugcugcugcaguacggcagcuucugcacccagcugaauagagcccugacagggaucgccguggaacaggacaagaacacccaagagguguucgcccaagugaagcagaucuacaagaccccuccuaucaaggacuucggcggcuucaauuucagccagauucugcccgauccuagcaagcccagcaagcggagcuucaucgaggaccugcuguucaacaaagugacacuggccgacgccggcuucaucaagcaguauggcgauugucugggcgacauugccgccagggaucugauuugcgcccagaaguuuaacggacugacagugcugccuccucugcugaccgaugagaugaucgcccaguacacaucugcccugcuggccggcacaaucacaagcggcuggacauuuggagcaggcgccgcucugcagauccccuuugcuaugcagauggccuaccgguucaacggcaucggagugacccagaaugugcuguacgagaaccagaagcugaucgccaaccaguucaacagcgccaucggcaagauccaggacagccugagcagcacagcaagcgcccugggaaagcugcaggacguggucaaccagaaugcccaggcacugaacacccuggucaagcagcuguccuccaacuucggcgccaucagcucugugcugaacgauauccugagcagacuggacccuccugaggccgaggugcagaucgacagacugaucacaggcagacugcagagccuccagacauacgugacccagcagcugaucagagccgccgagauuagagccucugccaaucuggccgccaccaagaugucugagugugugcugggccagagcaagagaguggacuuuugcggcaagggcuaccaccugaugagcuucccucagucugccccucacggcgugguguuucugcacgugacauaugugcccgcucaagagaagaauuucaccaccgcuccagccaucugccacgacggcaaagcccacuuuccuagagaaggcguguucguguccaacggcacccauugguucgugacacagcggaacuucuacgagccccagaucaucaccaccgacaacaccuucgugucuggcaacugcgacgucgugaucggcauugugaacaauaccguguacgacccucugcagcccgagcuggacagcuucaaagaggaacuggacaaguacuuuaagaaccacacaagccccgacguggaccugggcgauaucagcggaaucaaugccagcgucgugaacauccagaaagagaucgaccggcugaacgagguggccaagaaucugaacgagagccugaucgaccugcaagaacuggggaaguacgagcaguacaucaaguggcccugguacaucuggcugggcuuuaucgccggacugauugccaucgugauggucacaaucaugcuguguugcaugaccagcugcuguagcugccugaagggcuguuguagcuguggcagcugcugcaaguucgacgaggacgauucugagcccgugcugaagggcgugaaacugcacuacacaugauaauaggcuggagccucgguggccuagcuucuugccccuugggccuccccccagccccuccuccccuuccugcacccguacccccguggucuuugaauaaagucugagugggcggcaaaaaaaaaaaaaaaaaaaaaaaaaaaaaaaaaaaaaaaaaaaaaaaaaaaaaaaaaaaaaaaaaaaaaaaaaaaaaaaaaaaaaaaaaaaaaaaaaaaaucuag

SEQ ID NO: 26696 - RNA, 4100 nt, Artificial Sequence
  SARS-CoV-2/Wuhan/WIV05/2019__EPI_ISL_402128 spike protein mRNA gc mod (1-1273)(K986P_V987P_D614G_M1229I)
gggaaauaagagagaaaagaagaguaagaagaaauauaagaccccggcgccgccaccauguucguguuccuggugcugcugccucugguguccagccagugugugaaccugaccaccagaacacagcugccuccagccuacaccaacagcuuuaccagaggcguguacuaccccgacaagguguucagauccagcgugcugcacucuacccaggaccuguuccugccuuucuucagcaacgugaccugguuccacgccauccacguguccggcaccaauggcaccaagagauucgacaaccccgugcugcccuucaacgacgggguguacuuugccagcaccgagaaguccaacaucaucagaggcuggaucuucggcaccacacuggacagcaagacccagagccugcugaucgugaacaacgccaccaacguggucaucaaagugugcgaguuccaguucugcaacgaccccuuccugggcgucuacuaccacaagaacaacaagagcuggauggaaagcgaguuccggguguacagcagcgccaacaacugcaccuucgaguacgugucccagccuuuccugauggaccuggaaggcaagcagggcaacuucaagaaccugcgcgaguucguguuuaagaacaucgacggcuacuucaagaucuacagcaagcacaccccuaucaaccucgugcgggaucugccucagggcuucucugcucuggaaccccugguggaucugcccaucggcaucaacaucacccgguuucagacacugcuggcccugcacagaagcuaccugacaccuggcgauagcagcagcggauggacagcuggugccgccgcuuacuaugugggcuaccugcagccuagaaccuuccugcugaaguacaacgagaacggcaccaucaccgacgccguggauugugcucuggauccucugagcgagacaaagugcacccugaaguccuucaccguggaaaagggcaucuaccagaccagcaacuuccgggugcagcccaccgaauccaucgugcgguuccccaauaucaccaaucugugccccuucggcgagguguucaaugccaccagauucgccucuguguacgccuggaaccggaagcggaucagcaauugcguggccgacuacuccgugcuguacaacuccgccagcuucagcaccuucaagugcuacggcguguccccuaccaagcugaacgaccugugcuucacaaacguguacgccgacagcuucgugauccggggagaugaagugcggcagauugccccuggacagacaggcaagaucgccgacuacaacuacaagcugcccgacgacuucaccggcugugugauugccuggaacagcaacaaccuggacuccaaagucggcggcaacuacaauuaccuguaccggcuguuccggaaguccaaucugaagcccuucgagcgggacaucuccaccgagaucuaucaggccggcagcaccccuuguaacggcguggaaggcuucaacugcuacuucccacugcaguccuacggcuuucagcccacaaauggcgugggcuaucagcccuacagagugguggugcugagcuucgaacugcugcaugccccugccacagugugcggcccuaagaaaagcaccaaucucgugaagaacaaaugcgugaacuucaacuucaacggccugaccggcaccggcgugcugacagagagcaacaagaaguuccugccauuccagcaguuuggccgggauaucgccgauaccacagacgccguuagagauccccagacacuggaaauccuggacaucaccccuugcagcuucggcggagugucugugaucaccccuggcaccaacaccagcaaucagguggcagugcuguaccagggcgugaacuguaccgaagugcccguggccauucacgccgaucagcugacaccuacauggcggguguacuccaccggcagcaauguguuucagaccagagccggcugucugaucggagccgagcacgugaacaauagcuacgagugcgacauccccaucggcgcuggaaucugcgccagcuaccagacacagacaaacagcccucggagagccagaagcguggccagccagagcaucauugccuacacaaugucucugggcgccgagaacagcguggccuacuccaacaacucuaucgcuauccccaccaacuucaccaucagcgugaccacagagauccugccuguguccaugaccaagaccagcguggacugcaccauguacaucugcggcgauuccaccgagugcuccaaccugcugcugcaguacggcagcuucugcacccagcugaauagagcccugacagggaucgccguggaacaggacaagaacacccaagagguguucgcccaagugaagcagaucuacaagaccccuccuaucaaggacuucggcggcuucaauuucagccagauucugcccgauccuagcaagcccagcaagcggagcuucaucgaggaccugcuguucaacaaagugacacuggccgacgccggcuucaucaagcaguauggcgauugucugggcgacauugccgccagggaucugauuugcgcccagaaguuuaacggacugacagugcugccuccucugcugaccgaugagaugaucgcccaguacacaucugcccugcuggccggcacaaucacaagcggcuggacauuuggagcaggcgccgcucugcagauccccuuugcuaugcagauggccuaccgguucaacggcaucggagugacccagaaugugcuguacgagaaccagaagcugaucgccaaccaguucaacagcgccaucggcaagauccaggacagccugagcagcacagcaagcgcccugggaaagcugcaggacguggucaaccagaaugcccaggcacugaacacccuggucaagcagcuguccuccaacuucggcgccaucagcucugugcugaacgauauccugagcagacuggacccuccugaggccgaggugcagaucgacagacugaucacaggcagacugcagagccuccagacauacgugacccagcagcugaucagagccgccgagauuagagccucugccaaucuggccgccaccaagaugucugagugugugcugggccagagcaagagaguggacuuuugcggcaagggcuaccaccugaugagcuucccucagucugccccucacggcgugguguuucugcacgugacauaugugcccgcucaagagaagaauuucaccaccgcuccagccaucugccacgacggcaaagcccacuuuccuagagaaggcguguucguguccaacggcacccauugguucgugacacagcggaacuucuacgagccccagaucaucaccaccgacaacaccuucgugucuggcaacugcgacgucgugaucggcauugugaacaauaccguguacgacccucugcagcccgagcuggacagcuucaaagaggaacuggacaaguacuuuaagaaccacacaagccccgacguggaccugggcgauaucagcggaaucaaugccagcgucgugaacauccagaaagagaucgaccggcugaacgagguggccaagaaucugaacgagagccugaucgaccugcaagaacuggggaaguacgagcaguacaucaaguggcccugguacaucuggcugggcuuuaucgccggacugauugccaucgugaucgucacaaucaugcuguguugcaugaccagcugcuguagcugccugaagggcuguuguagcuguggcagcugcugcaaguucgacgaggacgauucugagcccgugcugaagggcgugaaacugcacuacacaugauaauaggcuggagccucgguggccuagcuucuugccccuugggccuccccccagccccuccuccccuuccugcacccguacccccguggucuuugaauaaagucugagugggcggcaaaaaaaaaaaaaaaaaaaaaaaaaaaaaaaaaaaaaaaaaaaaaaaaaaaaaaaaaaaaaaaaaaaaaaaaaaaaaaaaaaaaaaaaaaaaaaaaaaaaucuag

SEQ ID NO: 26697 - RNA, 4094 nt, Artificial Sequence
  SARS-CoV-2/Wuhan/WIV05/2019__EPI_ISL_402128 spike protein mRNA gc mod (1-1273)(K986P_V987P_H69del_V70del_A222V_Y453F_S477N_D614G_I692V)
gggaaauaagagagaaaagaagaguaagaagaaauauaagaccccggcgccgccaccauguucguguuccuggugcugcugccucugguguccagccagugugugaaccugaccaccagaacacagcugccuccagccuacaccaacagcuuuaccagaggcguguacuaccccgacaagguguucagauccagcgugcugcacucuacccaggaccuguuccugccuuucuucagcaacgugaccugguuccacgccaucuccggcaccaauggcaccaagagauucgacaaccccgugcugcccuucaacgacgggguguacuuugccagcaccgagaaguccaacaucaucagaggcuggaucuucggcaccacacuggacagcaagacccagagccugcugaucgugaacaacgccaccaacguggucaucaaagugugcgaguuccaguucugcaacgaccccuuccugggcgucuacuaccacaagaacaacaagagcuggauggaaagcgaguuccggguguacagcagcgccaacaacugcaccuucgaguacgugucccagccuuuccugauggaccuggaaggcaagcagggcaacuucaagaaccugcgcgaguucguguuuaagaacaucgacggcuacuucaagaucuacagcaagcacaccccuaucaaccucgugcgggaucugccucagggcuucucugugcuggaaccccugguggaucugcccaucggcaucaacaucacccgguuucagacacugcuggcccugcacagaagcuaccugacaccuggcgauagcagcagcggauggacagcuggugccgccgcuuacuaugugggcuaccugcagccuagaaccuuccugcugaaguacaacgagaacggcaccaucaccgacgccguggauugugcucuggauccucugagcgagacaaagugcacccugaaguccuucaccguggaaaagggcaucuaccagaccagcaacuuccgggugcagcccaccgaauccaucgugcgguuccccaauaucaccaaucugugccccuucggcgagguguucaaugccaccagauucgccucuguguacgccuggaaccggaagcggaucagcaauugcguggccgacuacuccgugcuguacaacuccgccagcuucagcaccuucaagugcuacggcguguccccuaccaagcugaacgaccugugcuucacaaacguguacgccgacagcuucgugauccggggagaugaagugcggcagauugccccuggacagacaggcaagaucgccgacuacaacuacaagcugcccgacgacuucaccggcugugugauugccuggaacagcaacaaccuggacuccaaagucggcggcaacuacaauuaccuguuccggcuguuccggaaguccaaucugaagcccuucgagcgggacaucuccaccgagaucuaucaggccggcaacaccccuuguaacggcguggaaggcuucaacugcuacuucccacugcaguccuacggcuuucagcccacaaauggcgugggcuaucagcccuacagagugguggugcugagcuucgaacugcugcaugccccugccacagugugcggcccuaagaaaagcaccaaucucgugaagaacaaaugcgugaacuucaacuucaacggccugaccggcaccggcgugcugacagagagcaacaagaaguuccugccauuccagcaguuuggccgggauaucgccgauaccacagacgccguuagagauccccagacacuggaaauccuggacaucaccccuugcagcuucggcggagugucugugaucaccccuggcaccaacaccagcaaucagguggcagugcuguaccagggcgugaacuguaccgaagugcccguggccauucacgccgaucagcugacaccuacauggcggguguacuccaccggcagcaauguguuucagaccagagccggcugucugaucggagccgagcacgugaacaauagcuacgagugcgacauccccaucggcgcuggaaucugcgccagcuaccagacacagacaaacagcccucggagagccagaagcguggccagccagagcgugauugccuacacaaugucucugggcgccgagaacagcguggccuacuccaacaacucuaucgcuauccccaccaacuucaccaucagcgugaccacagagauccugccuguguccaugaccaagaccagcguggacugcaccauguacaucugcggcgauuccaccgagugcuccaaccugcugcugcaguacggcagcuucugcacccagcugaauagagcccugacagggaucgccguggaacaggacaagaacacccaagagguguucgcccaagugaagcagaucuacaagaccccuccuaucaaggacuucggcggcuucaauuucagccagauucugcccgauccuagcaagcccagcaagcggagcuucaucgaggaccugcuguucaacaaagugacacuggccgacgccggcuucaucaagcaguauggcgauugucugggcgacauugccgccagggaucugauuugcgcccagaaguuuaacggacugacagugcugccuccucugcugaccgaugagaugaucgcccaguacacaucugcccugcuggccggcacaaucacaagcggcuggacauuuggagcaggcgccgcucugcagauccccuuugcuaugcagauggccuaccgguucaacggcaucggagugacccagaaugugcuguacgagaaccagaagcugaucgccaaccaguucaacagcgccaucggcaagauccaggacagccugagcagcacagcaagcgcccugggaaagcugcaggacguggucaaccagaaugcccaggcacugaacacccuggucaagcagcuguccuccaacuucggcgccaucagcucugugcugaacgauauccugagcagacuggacccuccugaggccgaggugcagaucgacagacugaucacaggcagacugcagagccuccagacauacgugacccagcagcugaucagagccgccgagauuagagccucugccaaucuggccgccaccaagaugucugagugugugcugggccagagcaagagaguggacuuuugcggcaagggcuaccaccugaugagcuucccucagucugccccucacggcgugguguuucugcacgugacauaugugcccgcucaagagaagaauuucaccaccgcuccagccaucugccacgacggcaaagcccacuuuccuagagaaggcguguucguguccaacggcacccauugguucgugacacagcggaacuucuacgagccccagaucaucaccaccgacaacaccuucgugucuggcaacugcgacgucgugaucggcauugugaacaauaccguguacgacccucugcagcccgagcuggacagcuucaaagaggaacuggacaaguacuuuaagaaccacacaagccccgacguggaccugggcgauaucagcggaaucaaugccagcgucgugaacauccagaaagagaucgaccggcugaacgagguggccaagaaucugaacgagagccugaucgaccugcaagaacuggggaaguacgagcaguacaucaaguggcccugguacaucuggcugggcuuuaucgccggacugauugccaucgugauggucacaaucaugcuguguugcaugaccagcugcuguagcugccugaagggcuguuguagcuguggcagcugcugcaaguucgacgaggacgauucugagcccgugcugaagggcgugaaacugcacuacacaugauaauaggcuggagccucgguggccuagcuucuugccccuugggccuccccccagccccuccuccccuuccugcacccguacccccguggucuuugaauaaagucugagugggcggcaaaaaaaaaaaaaaaaaaaaaaaaaaaaaaaaaaaaaaaaaaaaaaaaaaaaaaaaaaaaaaaaaaaaaaaaaaaaaaaaaaaaaaaaaaaaaaaaaaaaucuag

SEQ ID NO: 26698 - RNA, 4094 nt, Artificial Sequence
  SARS-CoV-2/Wuhan/WIV05/2019__EPI_ISL_402128 spike protein mRNA gc mod (1-1273)(K986P_V987P_H69del_V70del_Y453F_D614G_I692V_M1229I)
gggaaauaagagagaaaagaagaguaagaagaaauauaagaccccggcgccgccaccauguucguguuccuggugcugcugccucugguguccagccagugugugaaccugaccaccagaacacagcugccuccagccuacaccaacagcuuuaccagaggcguguacuaccccgacaagguguucagauccagcgugcugcacucuacccaggaccuguuccugccuuucuucagcaacgugaccugguuccacgccaucuccggcaccaauggcaccaagagauucgacaaccccgugcugcccuucaacgacgggguguacuuugccagcaccgagaaguccaacaucaucagaggcuggaucuucggcaccacacuggacagcaagacccagagccugcugaucgugaacaacgccaccaacguggucaucaaagugugcgaguuccaguucugcaacgaccccuuccugggcgucuacuaccacaagaacaacaagagcuggauggaaagcgaguuccggguguacagcagcgccaacaacugcaccuucgaguacgugucccagccuuuccugauggaccuggaaggcaagcagggcaacuucaagaaccugcgcgaguucguguuuaagaacaucgacggcuacuucaagaucuacagcaagcacaccccuaucaaccucgugcgggaucugccucagggcuucucugcucuggaaccccugguggaucugcccaucggcaucaacaucacccgguuucagacacugcuggcccugcacagaagcuaccugacaccuggcgauagcagcagcggauggacagcuggugccgccgcuuacuaugugggcuaccugcagccuagaaccuuccugcugaaguacaacgagaacggcaccaucaccgacgccguggauugugcucuggauccucugagcgagacaaagugcacccugaaguccuucaccguggaaaagggcaucuaccagaccagcaacuuccgggugcagcccaccgaauccaucgugcgguuccccaauaucaccaaucugugccccuucggcgagguguucaaugccaccagauucgccucuguguacgccuggaaccggaagcggaucagcaauugcguggccgacuacuccgugcuguacaacuccgccagcuucagcaccuucaagugcuacggcguguccccuaccaagcugaacgaccugugcuucacaaacguguacgccgacagcuucgugauccggggagaugaagugcggcagauugccccuggacagacaggcaagaucgccgacuacaacuacaagcugcccgacgacuucaccggcugugugauugccuggaacagcaacaaccuggacuccaaagucggcggcaacuacaauuaccuguuccggcuguuccggaaguccaaucugaagcccuucgagcgggacaucuccaccgagaucuaucaggccggcagcaccccuuguaacggcguggaaggcuucaacugcuacuucccacugcaguccuacggcuuucagcccacaaauggcgugggcuaucagcccuacagagugguggugcugagcuucgaacugcugcaugccccugccacagugugcggcccuaagaaaagcaccaaucucgugaagaacaaaugcgugaacuucaacuucaacggccugaccggcaccggcgugcugacagagagcaacaagaaguuccugccauuccagcaguuuggccgggauaucgccgauaccacagacgccguuagagauccccagacacuggaaauccuggacaucaccccuugcagcuucggcggagugucugugaucaccccuggcaccaacaccagcaaucagguggcagugcuguaccagggcgugaacuguaccgaagugcccguggccauucacgccgaucagcugacaccuacauggcggguguacuccaccggcagcaauguguuucagaccagagccggcugucugaucggagccgagcacgugaacaauagcuacgagugcgacauccccaucggcgcuggaaucugcgccagcuaccagacacagacaaacagcccucggagagccagaagcguggccagccagagcgugauugccuacacaaugucucugggcgccgagaacagcguggccuacuccaacaacucuaucgcuauccccaccaacuucaccaucagcgugaccacagagauccugccuguguccaugaccaagaccagcguggacugcaccauguacaucugcggcgauuccaccgagugcuccaaccugcugcugcaguacggcagcuucugcacccagcugaauagagcccugacagggaucgccguggaacaggacaagaacacccaagagguguucgcccaagugaagcagaucuacaagaccccuccuaucaaggacuucggcggcuucaauuucagccagauucugcccgauccuagcaagcccagcaagcggagcuucaucgaggaccugcuguucaacaaagugacacuggccgacgccggcuucaucaagcaguauggcgauugucugggcgacauugccgccagggaucugauuugcgcccagaaguuuaacggacugacagugcugccuccucugcugaccgaugagaugaucgcccaguacacaucugcccugcuggccggcacaaucacaagcggcuggacauuuggagcaggcgccgcucugcagauccccuuugcuaugcagauggccuaccgguucaacggcaucggagugacccagaaugugcuguacgagaaccagaagcugaucgccaaccaguucaacagcgccaucggcaagauccaggacagccugagcagcacagcaagcgcccugggaaagcugcaggacguggucaaccagaaugcccaggcacugaacacccuggucaagcagcuguccuccaacuucggcgccaucagcucugugcugaacgauauccugagcagacuggacccuccugaggccgaggugcagaucgacagacugaucacaggcagacugcagagccuccagacauacgugacccagcagcugaucagagccgccgagauuagagccucugccaaucuggccgccaccaagaugucugagugugugcugggccagagcaagagaguggacuuuugcggcaagggcuaccaccugaugagcuucccucagucugccccucacggcgugguguuucugcacgugacauaugugcccgcucaagagaagaauuucaccaccgcuccagccaucugccacgacggcaaagcccacuuuccuagagaaggcguguucguguccaacggcacccauugguucgugacacagcggaacuucuacgagccccagaucaucaccaccgacaacaccuucgugucuggcaacugcgacgucgugaucggcauugugaacaauaccguguacgacccucugcagcccgagcuggacagcuucaaagaggaacuggacaaguacuuuaagaaccacacaagccccgacguggaccugggcgauaucagcggaaucaaugccagcgucgugaacauccagaaagagaucgaccggcugaacgagguggccaagaaucugaacgagagccugaucgaccugcaagaacuggggaaguacgagcaguacaucaaguggcccugguacaucuggcugggcuuuaucgccggacugauugccaucgugaucgucacaaucaugcuguguugcaugaccagcugcuguagcugccugaagggcuguuguagcuguggcagcugcugcaaguucgacgaggacgauucugagcccgugcugaagggcgugaaacugcacuacacaugauaauaggcuggagccucgguggccuagcuucuugccccuugggccuccccccagccccuccuccccuuccugcacccguacccccguggucuuugaauaaagucugagugggcggcaaaaaaaaaaaaaaaaaaaaaaaaaaaaaaaaaaaaaaaaaaaaaaaaaaaaaaaaaaaaaaaaaaaaaaaaaaaaaaaaaaaaaaaaaaaaaaaaaaaaucuag

SEQ ID NO: 26699 - RNA, 4091 nt, Artificial Sequence
  SARS-CoV-2/Wuhan/WIV05/2019__EPI_ISL_402128 spike protein mRNA gc mod (1-1273)(K986P_V987P_K986P_V987P_H69del_V70del_Y144del_N501Y_A570 D_D614G_P681H_T716I_S982A_D1118H)
gggaaauaagagagaaaagaagaguaagaagaaauauaagaccccggcgccgccaccauguucguguuccuggugcugcugccucugguguccagccagugugugaaccugaccaccagaacacagcugccuccagccuacaccaacagcuuuaccagaggcguguacuaccccgacaagguguucagauccagcgugcugcacucuacccaggaccuguuccugccuuucuucagcaacgugaccugguuccacgccaucuccggcaccaauggcaccaagagauucgacaaccccgugcugcccuucaacgacgggguguacuuugccagcaccgagaaguccaacaucaucagaggcuggaucuucggcaccacacuggacagcaagacccagagccugcugaucgugaacaacgccaccaacguggucaucaaagugugcgaguuccaguucugcaacgaccccuuccugggcgucuaccacaagaacaacaagagcuggauggaaagcgaguuccggguguacagcagcgccaacaacugcaccuucgaguacgugucccagccuuuccugauggaccuggaaggcaagcagggcaacuucaagaaccugcgcgaguucguguuuaagaacaucgacggcuacuucaagaucuacagcaagcacaccccuaucaaccucgugcgggaucugccucagggcuucucugcucuggaaccccugguggaucugcccaucggcaucaacaucacccgguuucagacacugcuggcccugcacagaagcuaccugacaccuggcgauagcagcagcggauggacagcuggugccgccgcuuacuaugugggcuaccugcagccuagaaccuuccugcugaaguacaacgagaacggcaccaucaccgacgccguggauugugcucuggauccucugagcgagacaaagugcacccugaaguccuucaccguggaaaagggcaucuaccagaccagcaacuuccgggugcagcccaccgaauccaucgugcgguuccccaauaucaccaaucugugccccuucggcgagguguucaaugccaccagauucgccucuguguacgccuggaaccggaagcggaucagcaauugcguggccgacuacuccgugcuguacaacuccgccagcuucagcaccuucaagugcuacggcguguccccuaccaagcugaacgaccugugcuucacaaacguguacgccgacagcuucgugauccggggagaugaagugcggcagauugccccuggacagacaggcaagaucgccgacuacaacuacaagcugcccgacgacuucaccggcugugugauugccuggaacagcaacaaccuggacuccaaagucggcggcaacuacaauuaccuguaccggcuguuccggaaguccaaucugaagcccuucgagcgggacaucuccaccgagaucuaucaggccggcagcaccccuuguaacggcguggaaggcuucaacugcuacuucccacugcaguccuacggcuuucagcccacauacggcgugggcuaucagcccuacagagugguggugcugagcuucgaacugcugcaugccccugccacagugugcggcccuaagaaaagcaccaaucucgugaagaacaaaugcgugaacuucaacuucaacggccugaccggcaccggcgugcugacagagagcaacaagaaguuccugccauuccagcaguuuggccgggauaucgacgauaccacagacgccguuagagauccccagacacuggaaauccuggacaucaccccuugcagcuucggcggagugucugugaucaccccuggcaccaacaccagcaaucagguggcagugcuguaccagggcgugaacuguaccgaagugcccguggccauucacgccgaucagcugacaccuacauggcggguguacuccaccggcagcaauguguuucagaccagagccggcugucugaucggagccgagcacgugaacaauagcuacgagugcgacauccccaucggcgcuggaaucugcgccagcuaccagacacagacaaacagccaccggagagccagaagcguggccagccagagcaucauugccuacacaaugucucugggcgccgagaacagcguggccuacuccaacaacucuaucgcuauccccaucaacuucaccaucagcgugaccacagagauccugccuguguccaugaccaagaccagcguggacugcaccauguacaucugcggcgauuccaccgagugcuccaaccugcugcugcaguacggcagcuucugcacccagcugaauagagcccugacagggaucgccguggaacaggacaagaacacccaagagguguucgcccaagugaagcagaucuacaagaccccuccuaucaaggacuucggcggcuucaauuucagccagauucugcccgauccuagcaagcccagcaagcggagcuucaucgaggaccugcuguucaacaaagugacacuggccgacgccggcuucaucaagcaguauggcgauugucugggcgacauugccgccagggaucugauuugcgcccagaaguuuaacggacugacagugcugccuccucugcugaccgaugagaugaucgcccaguacacaucugcccugcuggccggcacaaucacaagcggcuggacauuuggagcaggcgccgcucugcagauccccuuugcuaugcagauggccuaccgguucaacggcaucggagugacccagaaugugcuguacgagaaccagaagcugaucgccaaccaguucaacagcgccaucggcaagauccaggacagccugagcagcacagcaagcgcccugggaaagcugcaggacguggucaaccagaaugcccaggcacugaacacccuggucaagcagcuguccuccaacuucggcgccaucagcucugugcugaacgauauccuggccagacuggacccuccugaggccgaggugcagaucgacagacugaucacaggcagacugcagagccuccagacauacgugacccagcagcugaucagagccgccgagauuagagccucugccaaucuggccgccaccaagaugucugagugugugcugggccagagcaagagaguggacuuuugcggcaagggcuaccaccugaugagcuucccucagucugccccucacggcgugguguuucugcacgugacauaugugcccgcucaagagaagaauuucaccaccgcuccagccaucugccacgacggcaaagcccacuuuccuagagaaggcguguucguguccaacggcacccauugguucgugacacagcggaacuucuacgagccccagaucaucaccacccacaacaccuucgugucuggcaacugcgacgucgugaucggcauugugaacaauaccguguacgacccucugcagcccgagcuggacagcuucaaagaggaacuggacaaguacuuuaagaaccacacaagccccgacguggaccugggcgauaucagcggaaucaaugccagcgucgugaacauccagaaagagaucgaccggcugaacgagguggccaagaaucugaacgagagccugaucgaccugcaagaacuggggaaguacgagcaguacaucaaguggcccugguacaucuggcugggcuuuaucgccggacugauugccaucgugauggucacaaucaugcuguguugcaugaccagcugcuguagcugccugaagggcuguuguagcuguggcagcugcugcaaguucgacgaggacgauucugagcccgugcugaagggcgugaaacugcacuacacaugauaauaggcuggagccucgguggccuagcuucuugccccuugggccuccccccagccccuccuccccuuccugcacccguacccccguggucuuugaauaaagucugagugggcggcaaaaaaaaaaaaaaaaaaaaaaaaaaaaaaaaaaaaaaaaaaaaaaaaaaaaaaaaaaaaaaaaaaaaaaaaaaaaaaaaaaaaaaaaaaaaaaaaaaaaucuag

SEQ ID NO: 26700 - RNA, 4100 nt, Artificial Sequence
  SARS-CoV-2/Wuhan/WIV05/2019__EPI_ISL_402128 spike protein mRNA gc mod (1-1273)(K986P_V987P_K986P_V987P_K417N_E484K_N501Y_D614G)
gggaaauaagagagaaaagaagaguaagaagaaauauaagaccccggcgccgccaccauguucguguuccuggugcugcugccucugguguccagccagugugugaaccugaccaccagaacacagcugccuccagccuacaccaacagcuuuaccagaggcguguacuaccccgacaagguguucagauccagcgugcugcacucuacccaggaccuguuccugccuuucuucagcaacgugaccugguuccacgccauccacguguccggcaccaauggcaccaagagauucgacaaccccgugcugcccuucaacgacgggguguacuuugccagcaccgagaaguccaacaucaucagaggcuggaucuucggcaccacacuggacagcaagacccagagccugcugaucgugaacaacgccaccaacguggucaucaaagugugcgaguuccaguucugcaacgaccccuuccugggcgucuacuaccacaagaacaacaagagcuggauggaaagcgaguuccggguguacagcagcgccaacaacugcaccuucgaguacgugucccagccuuuccugauggaccuggaaggcaagcagggcaacuucaagaaccugcgcgaguucguguuuaagaacaucgacggcuacuucaagaucuacagcaagcacaccccuaucaaccucgugcgggaucugccucagggcuucucugcucuggaaccccugguggaucugcccaucggcaucaacaucacccgguuucagacacugcuggcccugcacagaagcuaccugacaccuggcgauagcagcagcggauggacagcuggugccgccgcuuacuaugugggcuaccugcagccuagaaccuuccugcugaaguacaacgagaacggcaccaucaccgacgccguggauugugcucuggauccucugagcgagacaaagugcacccugaaguccuucaccguggaaaagggcaucuaccagaccagcaacuuccgggugcagcccaccgaauccaucgugcgguuccccaauaucaccaaucugugccccuucggcgagguguucaaugccaccagauucgccucuguguacgccuggaaccggaagcggaucagcaauugcguggccgacuacuccgugcuguacaacuccgccagcuucagcaccuucaagugcuacggcguguccccuaccaagcugaacgaccugugcuucacaaacguguacgccgacagcuucgugauccggggagaugaagugcggcagauugccccuggacagacaggcaacaucgccgacuacaacuacaagcugcccgacgacuucaccggcugugugauugccuggaacagcaacaaccuggacuccaaagucggcggcaacuacaauuaccuguaccggcuguuccggaaguccaaucugaagcccuucgagcgggacaucuccaccgagaucuaucaggccggcagcaccccuuguaacggcgugaagggcuucaacugcuacuucccacugcaguccuacggcuuucagcccacauacggcgugggcuaucagcccuacagagugguggugcugagcuucgaacugcugcaugccccugccacagugugcggcccuaagaaaagcaccaaucucgugaagaacaaaugcgugaacuucaacuucaacggccugaccggcaccggcgugcugacagagagcaacaagaaguuccugccauuccagcaguuuggccgggauaucgccgauaccacagacgccguuagagauccccagacacuggaaauccuggacaucaccccuugcagcuucggcggagugucugugaucaccccuggcaccaacaccagcaaucagguggcagugcuguaccagggcgugaacuguaccgaagugcccguggccauucacgccgaucagcugacaccuacauggcggguguacuccaccggcagcaauguguuucagaccagagccggcugucugaucggagccgagcacgugaacaauagcuacgagugcgacauccccaucggcgcuggaaucugcgccagcuaccagacacagacaaacagcccucggagagccagaagcguggccagccagagcaucauugccuacacaaugucucugggcgccgagaacagcguggccuacuccaacaacucuaucgcuauccccaccaacuucaccaucagcgugaccacagagauccugccuguguccaugaccaagaccagcguggacugcaccauguacaucugcggcgauuccaccgagugcuccaaccugcugcugcaguacggcagcuucugcacccagcugaauagagcccugacagggaucgccguggaacaggacaagaacacccaagagguguucgcccaagugaagcagaucuacaagaccccuccuaucaaggacuucggcggcuucaauuucagccagauucugcccgauccuagcaagcccagcaagcggagcuucaucgaggaccugcuguucaacaaagugacacuggccgacgccggcuucaucaagcaguauggcgauugucugggcgacauugccgccagggaucugauuugcgcccagaaguuuaacggacugacagugcugccuccucugcugaccgaugagaugaucgcccaguacacaucugcccugcuggccggcacaaucacaagcggcuggacauuuggagcaggcgccgcucugcagauccccuuugcuaugcagauggccuaccgguucaacggcaucggagugacccagaaugugcuguacgagaaccagaagcugaucgccaaccaguucaacagcgccaucggcaagauccaggacagccugagcagcacagcaagcgcccugggaaagcugcaggacguggucaaccagaaugcccaggcacugaacacccuggucaagcagcuguccuccaacuucggcgccaucagcucugugcugaacgauauccugagcagacuggacccuccugaggccgaggugcagaucgacagacugaucacaggcagacugcagagccuccagacauacgugacccagcagcugaucagagccgccgagauuagagccucugccaaucuggccgccaccaagaugucugagugugugcugggccagagcaagagaguggacuuuugcggcaagggcuaccaccugaugagcuucccucagucugccccucacggcgugguguuucugcacgugacauaugugcccgcucaagagaagaauuucaccaccgcuccagccaucugccacgacggcaaagcccacuuuccuagagaaggcguguucguguccaacggcacccauugguucgugacacagcggaacuucuacgagccccagaucaucaccaccgacaacaccuucgugucuggcaacugcgacgucgugaucggcauugugaacaauaccguguacgacccucugcagcccgagcuggacagcuucaaagaggaacuggacaaguacuuuaagaaccacacaagccccgacguggaccugggcgauaucagcggaaucaaugccagcgucgugaacauccagaaagagaucgaccggcugaacgagguggccaagaaucugaacgagagccugaucgaccugcaagaacuggggaaguacgagcaguacaucaaguggcccugguacaucuggcugggcuuuaucgccggacugauugccaucgugauggucacaaucaugcuguguugcaugaccagcugcuguagcugccugaagggcuguuguagcuguggcagcugcugcaaguucgacgaggacgauucugagcccgugcugaagggcgugaaacugcacuacacaugauaauaggcuggagccucgguggccuagcuucuugccccuugggccuccccccagccccuccuccccuuccugcacccguacccccguggucuuugaauaaagucugagugggcggcaaaaaaaaaaaaaaaaaaaaaaaaaaaaaaaaaaaaaaaaaaaaaaaaaaaaaaaaaaaaaaaaaaaaaaaaaaaaaaaaaaaaaaaaaaaaaaaaaaaaucuag

SEQ ID NO: 26701 - RNA, 4091 nt, Artificial Sequence
  SARS-CoV-2/Wuhan/WIV05/2019__EPI_ISL_402128 spike protein mRNA gc mod (1-1273)(K986P_V987P_K986P_V987P_L18F_D80A_D215G_L242del_A243del_ L244del_R246I_K417N_E484K_N501Y_D614G_A701V)
gggaaauaagagagaaaagaagaguaagaagaaauauaagaccccggcgccgccaccauguucguguuccuggugcugcugccucugguguccagccagugugugaacuucaccaccagaacacagcugccuccagccuacaccaacagcuuuaccagaggcguguacuaccccgacaagguguucagauccagcgugcugcacucuacccaggaccuguuccugccuuucuucagcaacgugaccugguuccacgccauccacguguccggcaccaauggcaccaagagauucgccaaccccgugcugcccuucaacgacgggguguacuuugccagcaccgagaaguccaacaucaucagaggcuggaucuucggcaccacacuggacagcaagacccagagccugcugaucgugaacaacgccaccaacguggucaucaaagugugcgaguuccaguucugcaacgaccccuuccugggcgucuacuaccacaagaacaacaagagcuggauggaaagcgaguuccggguguacagcagcgccaacaacugcaccuucgaguacgugucccagccuuuccugauggaccuggaaggcaagcagggcaacuucaagaaccugcgcgaguucguguuuaagaacaucgacggcuacuucaagaucuacagcaagcacaccccuaucaaccucgugcggggccugccucagggcuucucugcucuggaaccccugguggaucugcccaucggcaucaacaucacccgguuucagacacugcacaucagcuaccugacaccuggcgauagcagcagcggauggacagcuggugccgccgcuuacuaugugggcuaccugcagccuagaaccuuccugcugaaguacaacgagaacggcaccaucaccgacgccguggauugugcucuggauccucugagcgagacaaagugcacccugaaguccuucaccguggaaaagggcaucuaccagaccagcaacuuccgggugcagcccaccgaauccaucgugcgguuccccaauaucaccaaucugugccccuucggcgagguguucaaugccaccagauucgccucuguguacgccuggaaccggaagcggaucagcaauugcguggccgacuacuccgugcuguacaacuccgccagcuucagcaccuucaagugcuacggcguguccccuaccaagcugaacgaccugugcuucacaaacguguacgccgacagcuucgugauccggggagaugaagugcggcagauugccccuggacagacaggcaacaucgccgacuacaacuacaagcugcccgacgacuucaccggcugugugauugccuggaacagcaacaaccuggacuccaaagucggcggcaacuacaauuaccuguaccggcuguuccggaaguccaaucugaagcccuucgagcgggacaucuccaccgagaucuaucaggccggcagcaccccuuguaacggcgugaagggcuucaacugcuacuucccacugcaguccuacggcuuucagcccacauacggcgugggcuaucagcccuacagagugguggugcugagcuucgaacugcugcaugccccugccacagugugcggcccuaagaaaagcaccaaucucgugaagaacaaaugcgugaacuucaacuucaacggccugaccggcaccggcgugcugacagagagcaacaagaaguuccugccauuccagcaguuuggccgggauaucgccgauaccacagacgccguuagagauccccagacacuggaaauccuggacaucaccccuugcagcuucggcggagugucugugaucaccccuggcaccaacaccagcaaucagguggcagugcuguaccagggcgugaacuguaccgaagugcccguggccauucacgccgaucagcugacaccuacauggcggguguacuccaccggcagcaauguguuucagaccagagccggcugucugaucggagccgagcacgugaacaauagcuacgagugcgacauccccaucggcgcuggaaucugcgccagcuaccagacacagacaaacagcccucggagagccagaagcguggccagccagagcaucauugccuacacaaugucucugggcguggagaacagcguggccuacuccaacaacucuaucgcuauccccaccaacuucaccaucagcgugaccacagagauccugccuguguccaugaccaagaccagcguggacugcaccauguacaucugcggcgauuccaccgagugcuccaaccugcugcugcaguacggcagcuucugcacccagcugaauagagcccugacagggaucgccguggaacaggacaagaacacccaagagguguucgcccaagugaagcagaucuacaagaccccuccuaucaaggacuucggcggcuucaauuucagccagauucugcccgauccuagcaagcccagcaagcggagcuucaucgaggaccugcuguucaacaaagugacacuggccgacgccggcuucaucaagcaguauggcgauugucugggcgacauugccgccagggaucugauuugcgcccagaaguuuaacggacugacagugcugccuccucugcugaccgaugagaugaucgcccaguacacaucugcccugcuggccggcacaaucacaagcggcuggacauuuggagcaggcgccgcucugcagauccccuuugcuaugcagauggccuaccgguucaacggcaucggagugacccagaaugugcuguacgagaaccagaagcugaucgccaaccaguucaacagcgccaucggcaagauccaggacagccugagcagcacagcaagcgcccugggaaagcugcaggacguggucaaccagaaugcccaggcacugaacacccuggucaagcagcuguccuccaacuucggcgccaucagcucugugcugaacgauauccugagcagacuggacccuccugaggccgaggugcagaucgacagacugaucacaggcagacugcagagccuccagacauacgugacccagcagcugaucagagccgccgagauuagagccucugccaaucuggccgccaccaagaugucugagugugugcugggccagagcaagagaguggacuuuugcggcaagggcuaccaccugaugagcuucccucagucugccccucacggcgugguguuucugcacgugacauaugugcccgcucaagagaagaauuucaccaccgcuccagccaucugccacgacggcaaagcccacuuuccuagagaaggcguguucguguccaacggcacccauugguucgugacacagcggaacuucuacgagccccagaucaucaccaccgacaacaccuucgugucuggcaacugcgacgucgugaucggcauugugaacaauaccguguacgacccucugcagcccgagcuggacagcuucaaagaggaacuggacaaguacuuuaagaaccacacaagccccgacguggaccugggcgauaucagcggaaucaaugccagcgucgugaacauccagaaagagaucgaccggcugaacgagguggccaagaaucugaacgagagccugaucgaccugcaagaacuggggaaguacgagcaguacaucaaguggcccugguacaucuggcugggcuuuaucgccggacugauugccaucgugauggucacaaucaugcuguguugcaugaccagcugcuguagcugccugaagggcuguuguagcuguggcagcugcugcaaguucgacgaggacgauucugagcccgugcugaagggcgugaaacugcacuacacaugauaauaggcuggagccucgguggccuagcuucuugccccuugggccuccccccagccccuccuccccuuccugcacccguacccccguggucuuugaauaaagucugagugggcggcaaaaaaaaaaaaaaaaaaaaaaaaaaaaaaaaaaaaaaaaaaaaaaaaaaaaaaaaaaaaaaaaaaaaaaaaaaaaaaaaaaaaaaaaaaaaaaaaaaaaucuag

SEQ ID NO: 26702 - RNA, 4100 nt, Artificial Sequence
  SARS-CoV-2/Wuhan/WIV05/2019__EPI_ISL_402128 spike protein mRNA gc mod (1-1273)(K986P_V987P_K986P_V987P_E484K_D614G)
gggaaauaagagagaaaagaagaguaagaagaaauauaagaccccggcgccgccaccauguucguguuccuggugcugcugccucugguguccagccagugugugaaccugaccaccagaacacagcugccuccagccuacaccaacagcuuuaccagaggcguguacuaccccgacaagguguucagauccagcgugcugcacucuacccaggaccuguuccugccuuucuucagcaacgugaccugguuccacgccauccacguguccggcaccaauggcaccaagagauucgacaaccccgugcugcccuucaacgacgggguguacuuugccagcaccgagaaguccaacaucaucagaggcuggaucuucggcaccacacuggacagcaagacccagagccugcugaucgugaacaacgccaccaacguggucaucaaagugugcgaguuccaguucugcaacgaccccuuccugggcgucuacuaccacaagaacaacaagagcuggauggaaagcgaguuccggguguacagcagcgccaacaacugcaccuucgaguacgugucccagccuuuccugauggaccuggaaggcaagcagggcaacuucaagaaccugcgcgaguucguguuuaagaacaucgacggcuacuucaagaucuacagcaagcacaccccuaucaaccucgugcgggaucugccucagggcuucucugcucuggaaccccugguggaucugcccaucggcaucaacaucacccgguuucagacacugcuggcccugcacagaagcuaccugacaccuggcgauagcagcagcggauggacagcuggugccgccgcuuacuaugugggcuaccugcagccuagaaccuuccugcugaaguacaacgagaacggcaccaucaccgacgccguggauugugcucuggauccucugagcgagacaaagugcacccugaaguccuucaccguggaaaagggcaucuaccagaccagcaacuuccgggugcagcccaccgaauccaucgugcgguuccccaauaucaccaaucugugccccuucggcgagguguucaaugccaccagauucgccucuguguacgccuggaaccggaagcggaucagcaauugcguggccgacuacuccgugcuguacaacuccgccagcuucagcaccuucaagugcuacggcguguccccuaccaagcugaacgaccugugcuucacaaacguguacgccgacagcuucgugauccggggagaugaagugcggcagauugccccuggacagacaggcaagaucgccgacuacaacuacaagcugcccgacgacuucaccggcugugugauugccuggaacagcaacaaccuggacuccaaagucggcggcaacuacaauuaccuguaccggcuguuccggaaguccaaucugaagcccuucgagcgggacaucuccaccgagaucuaucaggccggcagcaccccuuguaacggcgugaagggcuucaacugcuacuucccacugcaguccuacggcuuucagcccacaaauggcgugggcuaucagcccuacagagugguggugcugagcuucgaacugcugcaugccccugccacagugugcggcccuaagaaaagcaccaaucucgugaagaacaaaugcgugaacuucaacuucaacggccugaccggcaccggcgugcugacagagagcaacaagaaguuccugccauuccagcaguuuggccgggauaucgccgauaccacagacgccguuagagauccccagacacuggaaauccuggacaucaccccuugcagcuucggcggagugucugugaucaccccuggcaccaacaccagcaaucagguggcagugcuguaccagggcgugaacuguaccgaagugcccguggccauucacgccgaucagcugacaccuacauggcggguguacuccaccggcagcaauguguuucagaccagagccggcugucugaucggagccgagcacgugaacaauagcuacgagugcgacauccccaucggcgcuggaaucugcgccagcuaccagacacagacaaacagcccucggagagccagaagcguggccagccagagcaucauugccuacacaaugucucugggcgccgagaacagcguggccuacuccaacaacucuaucgcuauccccaccaacuucaccaucagcgugaccacagagauccugccuguguccaugaccaagaccagcguggacugcaccauguacaucugcggcgauuccaccgagugcuccaaccugcugcugcaguacggcagcuucugcacccagcugaauagagcccugacagggaucgccguggaacaggacaagaacacccaagagguguucgcccaagugaagcagaucuacaagaccccuccuaucaaggacuucggcggcuucaauuucagccagauucugcccgauccuagcaagcccagcaagcggagcuucaucgaggaccugcuguucaacaaagugacacuggccgacgccggcuucaucaagcaguauggcgauugucugggcgacauugccgccagggaucugauuugcgcccagaaguuuaacggacugacagugcugccuccucugcugaccgaugagaugaucgcccaguacacaucugcccugcuggccggcacaaucacaagcggcuggacauuuggagcaggcgccgcucugcagauccccuuugcuaugcagauggccuaccgguucaacggcaucggagugacccagaaugugcuguacgagaaccagaagcugaucgccaaccaguucaacagcgccaucggcaagauccaggacagccugagcagcacagcaagcgcccugggaaagcugcaggacguggucaaccagaaugcccaggcacugaacacccuggucaagcagcuguccuccaacuucggcgccaucagcucugugcugaacgauauccugagcagacuggacccuccugaggccgaggugcagaucgacagacugaucacaggcagacugcagagccuccagacauacgugacccagcagcugaucagagccgccgagauuagagccucugccaaucuggccgccaccaagaugucugagugugugcugggccagagcaagagaguggacuuuugcggcaagggcuaccaccugaugagcuucccucagucugccccucacggcgugguguuucugcacgugacauaugugcccgcucaagagaagaauuucaccaccgcuccagccaucugccacgacggcaaagcccacuuuccuagagaaggcguguucguguccaacggcacccauugguucgugacacagcggaacuucuacgagccccagaucaucaccaccgacaacaccuucgugucuggcaacugcgacgucgugaucggcauugugaacaauaccguguacgacccucugcagcccgagcuggacagcuucaaagaggaacuggacaaguacuuuaagaaccacacaagccccgacguggaccugggcgauaucagcggaaucaaugccagcgucgugaacauccagaaagagaucgaccggcugaacgagguggccaagaaucugaacgagagccugaucgaccugcaagaacuggggaaguacgagcaguacaucaaguggcccugguacaucuggcugggcuuuaucgccggacugauugccaucgugauggucacaaucaugcuguguugcaugaccagcugcuguagcugccugaagggcuguuguagcuguggcagcugcugcaaguucgacgaggacgauucugagcccgugcugaagggcgugaaacugcacuacacaugauaauaggcuggagccucgguggccuagcuucuugccccuugggccuccccccagccccuccuccccuuccugcacccguacccccguggucuuugaauaaagucugagugggcggcaaaaaaaaaaaaaaaaaaaaaaaaaaaaaaaaaaaaaaaaaaaaaaaaaaaaaaaaaaaaaaaaaaaaaaaaaaaaaaaaaaaaaaaaaaaaaaaaaaaaucuag

SEQ ID NO: 26703 - RNA, 4100 nt, Artificial Sequence
  SARS-CoV-2/Wuhan/WIV05/2019__EPI_ISL_402128 spike protein mRNA gc mod (1-1273)(K986P_V987P_K986P_V987P_L18F_T20N_P26S_D138Y_R190S_K417T _E484K_N501Y_D614G_H655Y_T1027I)
gggaaauaagagagaaaagaagaguaagaagaaauauaagaccccggcgccgccaccauguucguguuccuggugcugcugccucugguguccagccagugugugaacuucaccaacagaacacagcugccuagcgccuacaccaacagcuuuaccagaggcguguacuaccccgacaagguguucagauccagcgugcugcacucuacccaggaccuguuccugccuuucuucagcaacgugaccugguuccacgccauccacguguccggcaccaauggcaccaagagauucgacaaccccgugcugcccuucaacgacgggguguacuuugccagcaccgagaaguccaacaucaucagaggcuggaucuucggcaccacacuggacagcaagacccagagccugcugaucgugaacaacgccaccaacguggucaucaaagugugcgaguuccaguucugcaacuaccccuuccugggcgucuacuaccacaagaacaacaagagcuggauggaaagcgaguuccggguguacagcagcgccaacaacugcaccuucgaguacgugucccagccuuuccugauggaccuggaaggcaagcagggcaacuucaagaaccugagcgaguucguguuuaagaacaucgacggcuacuucaagaucuacagcaagcacaccccuaucaaccucgugcgggaucugccucagggcuucucugcucuggaaccccugguggaucugcccaucggcaucaacaucacccgguuucagacacugcuggcccugcacagaagcuaccugacaccuggcgauagcagcagcggauggacagcuggugccgccgcuuacuaugugggcuaccugcagccuagaaccuuccugcugaaguacaacgagaacggcaccaucaccgacgccguggauugugcucuggauccucugagcgagacaaagugcacccugaaguccuucaccguggaaaagggcaucuaccagaccagcaacuuccgggugcagcccaccgaauccaucgugcgguuccccaauaucaccaaucugugccccuucggcgagguguucaaugccaccagauucgccucuguguacgccuggaaccggaagcggaucagcaauugcguggccgacuacuccgugcuguacaacuccgccagcuucagcaccuucaagugcuacggcguguccccuaccaagcugaacgaccugugcuucacaaacguguacgccgacagcuucgugauccggggagaugaagugcggcagauugccccuggacagacaggcaccaucgccgacuacaacuacaagcugcccgacgacuucaccggcugugugauugccuggaacagcaacaaccuggacuccaaagucggcggcaacuacaauuaccuguaccggcuguuccggaaguccaaucugaagcccuucgagcgggacaucuccaccgagaucuaucaggccggcagcaccccuuguaacggcgugaagggcuucaacugcuacuucccacugcaguccuacggcuuucagcccacauacggcgugggcuaucagcccuacagagugguggugcugagcuucgaacugcugcaugccccugccacagugugcggcccuaagaaaagcaccaaucucgugaagaacaaaugcgugaacuucaacuucaacggccugaccggcaccggcgugcugacagagagcaacaagaaguuccugccauuccagcaguuuggccgggauaucgccgauaccacagacgccguuagagauccccagacacuggaaauccuggacaucaccccuugcagcuucggcggagugucugugaucaccccuggcaccaacaccagcaaucagguggcagugcuguaccagggcgugaacuguaccgaagugcccguggccauucacgccgaucagcugacaccuacauggcggguguacuccaccggcagcaauguguuucagaccagagccggcugucugaucggagccgaguacgugaacaauagcuacgagugcgacauccccaucggcgcuggaaucugcgccagcuaccagacacagacaaacagcccucggagagccagaagcguggccagccagagcaucauugccuacacaaugucucugggcgccgagaacagcguggccuacuccaacaacucuaucgcuauccccaccaacuucaccaucagcgugaccacagagauccugccuguguccaugaccaagaccagcguggacugcaccauguacaucugcggcgauuccaccgagugcuccaaccugcugcugcaguacggcagcuucugcacccagcugaauagagcccugacagggaucgccguggaacaggacaagaacacccaagagguguucgcccaagugaagcagaucuacaagaccccuccuaucaaggacuucggcggcuucaauuucagccagauucugcccgauccuagcaagcccagcaagcggagcuucaucgaggaccugcuguucaacaaagugacacuggccgacgccggcuucaucaagcaguauggcgauugucugggcgacauugccgccagggaucugauuugcgcccagaaguuuaacggacugacagugcugccuccucugcugaccgaugagaugaucgcccaguacacaucugcccugcuggccggcacaaucacaagcggcuggacauuuggagcaggcgccgcucugcagauccccuuugcuaugcagauggccuaccgguucaacggcaucggagugacccagaaugugcuguacgagaaccagaagcugaucgccaaccaguucaacagcgccaucggcaagauccaggacagccugagcagcacagcaagcgcccugggaaagcugcaggacguggucaaccagaaugcccaggcacugaacacccuggucaagcagcuguccuccaacuucggcgccaucagcucugugcugaacgauauccugagcagacuggacccuccugaggccgaggugcagaucgacagacugaucacaggcagacugcagagccuccagacauacgugacccagcagcugaucagagccgccgagauuagagccucugccaaucuggccgccaucaagaugucugagugugugcugggccagagcaagagaguggacuuuugcggcaagggcuaccaccugaugagcuucccucagucugccccucacggcgugguguuucugcacgugacauaugugcccgcucaagagaagaauuucaccaccgcuccagccaucugccacgacggcaaagcccacuuuccuagagaaggcguguucguguccaacggcacccauugguucgugacacagcggaacuucuacgagccccagaucaucaccaccgacaacaccuucgugucuggcaacugcgacgucgugaucggcauugugaacaauaccguguacgacccucugcagcccgagcuggacagcuucaaagaggaacuggacaaguacuuuaagaaccacacaagccccgacguggaccugggcgauaucagcggaaucaaugccagcgucgugaacauccagaaagagaucgaccggcugaacgagguggccaagaaucugaacgagagccugaucgaccugcaagaacuggggaaguacgagcaguacaucaaguggcccugguacaucuggcugggcuuuaucgccggacugauugccaucgugauggucacaaucaugcuguguugcaugaccagcugcuguagcugccugaagggcuguuguagcuguggcagcugcugcaaguucgacgaggacgauucugagcccgugcugaagggcgugaaacugcacuacacaugauaauaggcuggagccucgguggccuagcuucuugccccuugggccuccccccagccccuccuccccuuccugcacccguacccccguggucuuugaauaaagucugagugggcggcaaaaaaaaaaaaaaaaaaaaaaaaaaaaaaaaaaaaaaaaaaaaaaaaaaaaaaaaaaaaaaaaaaaaaaaaaaaaaaaaaaaaaaaaaaaaaaaaaaaaucuag

SEQ ID NO: 26704 - RNA, 4100 nt, Artificial Sequence
  SARS-CoV-2/Wuhan/WIV05/2019__EPI_ISL_402128 spike protein mRNA gc mod (1-1273)(K986P_V987P_K986P_V987P_S13I_W152C_L452R_D614G)
gggaaauaagagagaaaagaagaguaagaagaaauauaagaccccggcgccgccaccauguucguguuccuggugcugcugccucugguguccauccagugugugaaccugaccaccagaacacagcugccuccagccuacaccaacagcuuuaccagaggcguguacuaccccgacaagguguucagauccagcgugcugcacucuacccaggaccuguuccugccuuucuucagcaacgugaccugguuccacgccauccacguguccggcaccaauggcaccaagagauucgacaaccccgugcugcccuucaacgacgggguguacuuugccagcaccgagaaguccaacaucaucagaggcuggaucuucggcaccacacuggacagcaagacccagagccugcugaucgugaacaacgccaccaacguggucaucaaagugugcgaguuccaguucugcaacgaccccuuccugggcgucuacuaccacaagaacaacaagagcugcauggaaagcgaguuccggguguacagcagcgccaacaacugcaccuucgaguacgugucccagccuuuccugauggaccuggaaggcaagcagggcaacuucaagaaccugcgcgaguucguguuuaagaacaucgacggcuacuucaagaucuacagcaagcacaccccuaucaaccucgugcgggaucugccucagggcuucucugcucuggaaccccugguggaucugcccaucggcaucaacaucacccgguuucagacacugcuggcccugcacagaagcuaccugacaccuggcgauagcagcagcggauggacagcuggugccgccgcuuacuaugugggcuaccugcagccuagaaccuuccugcugaaguacaacgagaacggcaccaucaccgacgccguggauugugcucuggauccucugagcgagacaaagugcacccugaaguccuucaccguggaaaagggcaucuaccagaccagcaacuuccgggugcagcccaccgaauccaucgugcgguuccccaauaucaccaaucugugccccuucggcgagguguucaaugccaccagauucgccucuguguacgccuggaaccggaagcggaucagcaauugcguggccgacuacuccgugcuguacaacuccgccagcuucagcaccuucaagugcuacggcguguccccuaccaagcugaacgaccugugcuucacaaacguguacgccgacagcuucgugauccggggagaugaagugcggcagauugccccuggacagacaggcaagaucgccgacuacaacuacaagcugcccgacgacuucaccggcugugugauugccuggaacagcaacaaccuggacuccaaagucggcggcaacuacaauuaccgcuaccggcuguuccggaaguccaaucugaagcccuucgagcgggacaucuccaccgagaucuaucaggccggcagcaccccuuguaacggcguggaaggcuucaacugcuacuucccacugcaguccuacggcuuucagcccacaaauggcgugggcuaucagcccuacagagugguggugcugagcuucgaacugcugcaugccccugccacagugugcggcccuaagaaaagcaccaaucucgugaagaacaaaugcgugaacuucaacuucaacggccugaccggcaccggcgugcugacagagagcaacaagaaguuccugccauuccagcaguuuggccgggauaucgccgauaccacagacgccguuagagauccccagacacuggaaauccuggacaucaccccuugcagcuucggcggagugucugugaucaccccuggcaccaacaccagcaaucagguggcagugcuguaccagggcgugaacuguaccgaagugcccguggccauucacgccgaucagcugacaccuacauggcggguguacuccaccggcagcaauguguuucagaccagagccggcugucugaucggagccgagcacgugaacaauagcuacgagugcgacauccccaucggcgcuggaaucugcgccagcuaccagacacagacaaacagcccucggagagccagaagcguggccagccagagcaucauugccuacacaaugucucugggcgccgagaacagcguggccuacuccaacaacucuaucgcuauccccaccaacuucaccaucagcgugaccacagagauccugccuguguccaugaccaagaccagcguggacugcaccauguacaucugcggcgauuccaccgagugcuccaaccugcugcugcaguacggcagcuucugcacccagcugaauagagcccugacagggaucgccguggaacaggacaagaacacccaagagguguucgcccaagugaagcagaucuacaagaccccuccuaucaaggacuucggcggcuucaauuucagccagauucugcccgauccuagcaagcccagcaagcggagcuucaucgaggaccugcuguucaacaaagugacacuggccgacgccggcuucaucaagcaguauggcgauugucugggcgacauugccgccagggaucugauuugcgcccagaaguuuaacggacugacagugcugccuccucugcugaccgaugagaugaucgcccaguacacaucugcccugcuggccggcacaaucacaagcggcuggacauuuggagcaggcgccgcucugcagauccccuuugcuaugcagauggccuaccgguucaacggcaucggagugacccagaaugugcuguacgagaaccagaagcugaucgccaaccaguucaacagcgccaucggcaagauccaggacagccugagcagcacagcaagcgcccugggaaagcugcaggacguggucaaccagaaugcccaggcacugaacacccuggucaagcagcuguccuccaacuucggcgccaucagcucugugcugaacgauauccugagcagacuggacccuccugaggccgaggugcagaucgacagacugaucacaggcagacugcagagccuccagacauacgugacccagcagcugaucagagccgccgagauuagagccucugccaaucuggccgccaccaagaugucugagugugugcugggccagagcaagagaguggacuuuugcggcaagggcuaccaccugaugagcuucccucagucugccccucacggcgugguguuucugcacgugacauaugugcccgcucaagagaagaauuucaccaccgcuccagccaucugccacgacggcaaagcccacuuuccuagagaaggcguguucguguccaacggcacccauugguucgugacacagcggaacuucuacgagccccagaucaucaccaccgacaacaccuucgugucuggcaacugcgacgucgugaucggcauugugaacaauaccguguacgacccucugcagcccgagcuggacagcuucaaagaggaacuggacaaguacuuuaagaaccacacaagccccgacguggaccugggcgauaucagcggaaucaaugccagcgucgugaacauccagaaagagaucgaccggcugaacgagguggccaagaaucugaacgagagccugaucgaccugcaagaacuggggaaguacgagcaguacaucaaguggcccugguacaucuggcugggcuuuaucgccggacugauugccaucgugauggucacaaucaugcuguguugcaugaccagcugcuguagcugccugaagggcuguuguagcuguggcagcugcugcaaguucgacgaggacgauucugagcccgugcugaagggcgugaaacugcacuacacaugauaauaggcuggagccucgguggccuagcuucuugccccuugggccuccccccagccccuccuccccuuccugcacccguacccccguggucuuugaauaaagucugagugggcggcaaaaaaaaaaaaaaaaaaaaaaaaaaaaaaaaaaaaaaaaaaaaaaaaaaaaaaaaaaaaaaaaaaaaaaaaaaaaaaaaaaaaaaaaaaaaaaaaaaaaucuag

SEQ ID NO: 26705 - RNA, 1613 nt, Artificial Sequence
  SARS-CoV-2/Wuhan/WIV05/2019__EPI_ISL_402128 spike protein mRNA gc (1-15,334-528) Ferritin construct
agaauaaacuaguauucuucugguccccacagacucagagagaacccgccaccauguucguguuccugguccuccugccccuggugagcucccagugcaaccugugccccuucggcgagguguucaacgccacccgguucgccagcgucuacgccuggaaccgcaagcggaucuccaacugcguggcggacuacagcgugcuguacaacuccgccagcuucuccacguucaagugcuacggcgucagccccaccaagcucaacgaccugugcuucaccaacguguacgccgacuccuucgugauccgcggggacgagguccggcagaucgcccccggccagaccgggaagaucgccgacuacaacuacaagcugccggacgacuucacgggcugcgugaucgcguggaacagcaacaaccucgacuccaaggucgggggcaacuacaacuaccuguaccgccuguuccgcaagagcaaccucaagcccuucgagcgggacaucuccaccgagaucuaccaggccggcagcacccccugcaacgggguggagggcuucaacugcuacuucccccugcaguccuacggguuccagccgaccaacggcgugggguaccagcccuaccggguggucgugcugagcuucgagcuccugcacgcccccgccacggugugcggccccaagggcggggguggaagcggcggggguggaagugacaucaucaagcuccugaacgagcaggucaacaaggagaugcaguccagcaaccuguacauguccaugagcuccuggugcuacacccacagccucgacggcgccgggcuguuccuguucgaccacgccgcggaggaguacgagcacgccaagaagcucaucaucuuccugaacgagaacaacgugcccgugcagcugaccuccaucagcgccccggagcacaaguucgagggccucacgcagaucuuccagaaggccuacgagcacgagcagcacaucuccgagagcaucaacaacaucguggaccacgccaucaaguccaaggaccacgcgaccuucaacuuccugcagugguacgucgccgagcagcacgaggaggaggugcuguucaaggacauccucgacaagaucgagcugaucgggaacgagaaccacggccuguaccucgccgaccaguacgugaaggggaucgccaagagccgcaaguccugaugacucgagcugguacugcaugcacgcaaugcuagcugccccuuucccguccuggguaccccgagucucccccgaccucgggucccagguaugcucccaccuccaccugccccacucaccaccucugcuaguuccagacaccucccaagcacgcagcaaugcagcucaaaacgcuuagccuagccacacccccacgggaaacagcagugauuaaccuuuagcaauaaacgaaaguuuaacuaagcuauacuaaccccaggguuggucaauuucgugccagccacacccuggagcuagcaaaaaaaaaaaaaaaaaaaaaaaaaaaaaagcauaugacuaaaaaaaaaaaaaaaaaaaaaaaaaaaaaaaaaaaaaaaaaaaaaaaaaaaaaaaaaaaaaaaaaaaaaa

SEQ ID NO: 26706 - RNA, 1211 nt, Artificial Sequence
  SARS-CoV-2/Wuhan/WIV05/2019__EPI_ISL_402128 spike protein mRNA gc (334-528) Foldon construct
agaauaaacuaguauucuucugguccccacagacucagagagaacccgccaccaugcccaugggcagccugcagccgcucgccacccuguaccugcucgggaugcugguggccuccguccuggcgaaccugugccccuucggcgagguguucaacgccacccgguucgccagcgucuacgccuggaaccgcaagcggaucuccaacugcguggcggacuacagcgugcuguacaacuccgccagcuucuccacguucaagugcuacggcgucagccccaccaagcucaacgaccugugcuucaccaacguguacgccgacuccuucgugauccgcggggacgagguccggcagaucgcccccggccagaccgggaagaucgccgacuacaacuacaagcugccggacgacuucacgggcugcgugaucgcguggaacagcaacaaccucgacuccaaggucgggggcaacuacaacuaccuguaccgccuguuccgcaagagcaaccucaagcccuucgagcgggacaucuccaccgagaucuaccaggccggcagcacccccugcaacgggguggagggcuucaacugcuacuucccccugcaguccuacggguuccagccgaccaacggcgugggguaccagcccuaccggguggucgugcugagcuucgagcuccugcacgcccccgccacggugugcggccccaagggcagcggcggguacauccccgaggccccgcgcgacggccaggccuacgugcggaaggacggcgaguggguccugcugagcaccuuccucugaugacucgagcugguacugcaugcacgcaaugcuagcugccccuuucccguccuggguaccccgagucucccccgaccucgggucccagguaugcucccaccuccaccugccccacucaccaccucugcuaguuccagacaccucccaagcacgcagcaaugcagcucaaaacgcuuagccuagccacacccccacgggaaacagcagugauuaaccuuuagcaauaaacgaaaguuuaacuaagcuauacuaaccccaggguuggucaauuucgugccagccacacccuggagcuagcaaaaaaaaaaaaaaaaaaaaaaaaaaaaaagcauaugacuaaaaaaaaaaaaaaaaaaaaaaaaaaaaaaaaaaaaaaaaaaaaaaaaaaaaaaaaaaaaaaaaaaaaaa

SEQ ID NO: 26707 - RNA, 1589 nt, Artificial Sequence
  SARS-CoV-2/Wuhan/WIV05/2019__EPI_ISL_402128 spike protein mRNA gc (1-15,334-528) LumSynth construct
agaauaaacuaguauucuucugguccccacagacucagagagaacccgccaccauguucguguuccugguccuccugccccuggugagcucccagugcaaccugugccccuucggcgagguguucaacgccacccgguucgccagcgucuacgccuggaaccgcaagcggaucuccaacugcguggcggacuacagcgugcuguacaacuccgccagcuucuccacguucaagugcuacggcgucagccccaccaagcucaacgaccugugcuucaccaacguguacgccgacuccuucgugauccgcggggacgagguccggcagaucgcccccggccagaccgggaagaucgccgacuacaacuacaagcugccggacgacuucacgggcugcgugaucgcguggaacagcaacaaccucgacuccaaggucgggggcaacuacaacuaccuguaccgccuguuccgcaagagcaaccucaagcccuucgagcgggacaucuccaccgagaucuaccaggccggcagcacccccugcaacgggguggagggcuucaacugcuacuucccccugcaguccuacggguuccagccgaccaacggcgugggguaccagcccuaccggguggucgugcugagcuucgagcuccugcacgcccccgccacggugugcggccccaagggcggcggcggcuccggaggcggagguagcgggggacagaucuacgagggcaagcugaccgccgaggggcuccgcuucggcaucguggccagccgguucaaccacgcgcuggucgaccgccugguggagggggccaucgacgccaucgugcggcacggcgggcgcgaggaggacaucacccucguccgggugcccggcuccugggagaucccgguggccgccggcgagcuggcccgcaaggaggacaucgacgcggucaucgccaucggggugcugauccggggcgccacgccccacuucgacuacaucgccagcgagguguccaaggggcucgcggaccugagccuggagcuccgcaagcccaucaccuucggcgucaucaccgccgacacccuggagcaggccaucgagcgggccgggacgaagcacggcaacaagggcugggaggccgcgcuguccgccaucgagauggccaaccucuucaagagccugcgcugaugacucgagcugguacugcaugcacgcaaugcuagcugccccuuucccguccuggguaccccgagucucccccgaccucgggucccagguaugcucccaccuccaccugccccacucaccaccucugcuaguuccagacaccucccaagcacgcagcaaugcagcucaaaacgcuuagccuagccacacccccacgggaaacagcagugauuaaccuuuagcaauaaacgaaaguuuaacuaagcuauacuaaccccaggguuggucaauuucgugccagccacacccuggagcuagcaaaaaaaaaaaaaaaaaaaaaaaaaaaaaagcauaugacuaaaaaaaaaaaaaaaaaaaaaaaaaaaaaaaaaaaaaaaaaaaaaaaaaaaaaaaaaaaaaaaaaaaaaa

SEQ ID NO: 26708 - RNA, 1550 nt, Artificial Sequence
  SARS-CoV-2/Wuhan/WIV05/2019__EPI_ISL_402128 spike protein mRNA gc (334-528) LumSynth construct
agaauaaacuaguauucuucugguccccacagacucagagagaacccgccaccaugcagaucuacgagggcaagcugaccgccgaggggcuccgcuucggcaucguggccagccgguucaaccacgcgcuggucgaccgccugguggagggggccaucgacgccaucgugcggcacggcgggcgcgaggaggacaucacccucguccgggugcccggcuccugggagaucccgguggccgccggcgagcuggcccgcaaggaggacaucgacgcggucaucgccaucggggugcugauccggggcgccacgccccacuucgacuacaucgccagcgagguguccaaggggcucgcggaccugagccuggagcuccgcaagcccaucaccuucggcgucaucaccgccgacacccuggagcaggccaucgagcgggccgggacgaagcacggcaacaagggcugggaggccgcgcuguccgccaucgagauggccaaccucuucaagagccugcgcggcgggggcgggagcggcgggggcggcuccgggggcgggaaccugugccccuucggcgagguguucaacgccacccgguucgccagcgucuacgccuggaaccgcaagcggaucuccaacugcguggcggacuacagcgugcuguacaacuccgccagcuucuccacguucaagugcuacggcgucagccccaccaagcucaacgaccugugcuucaccaacguguacgccgacuccuucgugauccgcggggacgagguccggcagaucgcccccggccagaccgggaagaucgccgacuacaacuacaagcugccggacgacuucacgggcugcgugaucgcguggaacagcaacaaccucgacuccaaggucgggggcaacuacaacuaccuguaccgccuguuccgcaagagcaaccucaagcccuucgagcgggacaucuccaccgagaucuaccaggccggcagcacccccugcaacgggguggagggcuucaacugcuacuucccccugcaguccuacggguuccagccgaccaacggcgugggguaccagcccuaccggguggucgugcugagcuucgagcuccugcacgcccccgccacggugugcggccccaagugaugacucgagcugguacugcaugcacgcaaugcuagcugccccuuucccguccuggguaccccgagucucccccgaccucgggucccagguaugcucccaccuccaccugccccacucaccaccucugcuaguuccagacaccucccaagcacgcagcaaugcagcucaaaacgcuuagccuagccacacccccacgggaaacagcagugauuaaccuuuagcaauaaacgaaaguuuaacuaagcuauacuaaccccaggguuggucaauuucgugccagccacacccuggagcuagcaaaaaaaaaaaaaaaaaaaaaaaaaaaaaagcauaugacuaaaaaaaaaaaaaaaaaaaaaaaaaaaaaaaaaaaaaaaaaaaaaaaaaaaaaaaaaaaaaaaaaaaaaa

SEQ ID NO: 26709 - RNA, 4283 nt, Artificial Sequence
  SARS-CoV-2/Wuhan/WIV05/2019__EPI_ISL_402128 spike protein mRNA gc (1-1273)
agaauaaacuaguauucuucugguccccacagacucagagagaacccgccaccauguucguguuccugguccuccugccccuggugagcucccagugcgugaaccucaccacccgcacgcagcugccgcccgccuacaccaacagcuucacccggggcgucuacuaccccgacaagguguuccgcuccagcgugcugcacuccacccaggaccucuuccugcccuucuucagcaacgucacgugguuccacgccauccacguguccgggaccaacggcaccaagcgguucgacaacccggugcugcccuucaacgacggggucuacuucgcgagcaccgagaaguccaacaucauccgcggcuggaucuucgggacgacccucgacagcaagacccagucccugcugaucgugaacaacgccaccaacguggucaucaaggugugcgaguuccaguucugcaacgaccccuuccucggcguguacuaccacaagaacaacaagagcuggauggaguccgaguuccgggucuacagcuccgccaacaacugcacguucgaguacgugagccagcccuuccugauggaccuggagggcaagcaggggaacuucaagaaccuccgcgaguucguguucaagaacaucgacggcuacuucaagaucuacuccaagcacaccccgaucaaccugguccgggaccugccccagggguucagcgcccucgagccccugguggaccugcccaucggcaucaacaucacccgcuuccagacccuccuggcccugcaccgguccuaccucacgccgggggacagcagcuccggcuggaccgcgggcgccgccgccuacuacgugggguaccugcagccccgcaccuuccugcucaaguacaacgagaacggcaccaucacggacgcggucgacugcgcccuggacccccugagcgagaccaagugcacccucaaguccuucaccguggagaaggggaucuaccagacgagcaacuuccgggugcagcccaccgaguccaucguccgcuucccgaacaucaccaaccugugccccuucggcgagguguucaacgccacccgguucgccagcgucuacgccuggaaccgcaagcggaucuccaacugcguggcggacuacagcgugcuguacaacuccgccagcuucuccacguucaagugcuacggcgucagccccaccaagcucaacgaccugugcuucaccaacguguacgccgacuccuucgugauccgcggggacgagguccggcagaucgcccccggccagaccgggaagaucgccgacuacaacuacaagcugccggacgacuucacgggcugcgugaucgcguggaacagcaacaaccucgacuccaaggucgggggcaacuacaacuaccuguaccgccuguuccgcaagagcaaccucaagcccuucgagcgggacaucuccaccgagaucuaccaggccggcagcacccccugcaacgggguggagggcuucaacugcuacuucccccugcaguccuacggguuccagccgaccaacggcgugggguaccagcccuaccggguggucgugcugagcuucgagcuccugcacgcccccgccacggugugcggccccaagaaguccaccaaccuggucaagaacaagugcgugaacuucaacuucaacggccucaccgggaccggcgugcugaccgagagcaacaagaaguuccugccguuccagcaguucgggcgcgacaucgccgacacgaccgacgcgguccgcgacccccagacccuggagauccucgacaucacccccugcagcuucggcgggguguccgugaucacgccgggcaccaacaccagcaaccaggucgccgugcuguaccaggacgugaacugcaccgagguccccguggccauccacgccgaccagcugacgcccaccuggcggguguacuccaccggcagcaacgucuuccagacccgcgccgggugccucaucggcgcggagcacgugaacaacuccuacgagugcgacauccccaucggggccggcaucugcgccagcuaccagacgcagaccaacuccccgcggcgcgcccggagcguggcgucccagagcaucaucgccuacaccaugucccugggcgccgagaacagcgucgccuacuccaacaacagcaucgccauccccaccaacuucacgaucuccgugaccaccgagauccugcccgugagcaugaccaagacgagcgucgacugcaccauguacaucugcggggacuccaccgagugcagcaaccuccugcugcaguacggcuccuucugcacccagcucaaccgcgcgcugacggggaucgccguggagcaggacaagaacacccaggagguguucgcccaggucaagcagaucuacaagacgcccccgaucaaggacuucggcggguucaacuucagccagauccugcccgaccccuccaagcccagcaagcgguccuucaucgaggaccuccuguucaacaaggugacccuggccgacgccggcuucaucaagcaguacggcgacugccucggggacaucgcggcccgcgaccugaucugcgcccagaaguucaacggccugaccgugcucccgccccugcugaccgacgagaugaucgcccaguacaccagcgcccuccuggcggggaccaucacguccggcuggaccuucggggccggcgccgcccugcagauccccuucgcgaugcagauggccuaccgguucaacggcaucggggucacccagaacgugcucuacgagaaccagaagcugaucgccaaccaguucaacagcgccaucggcaagauccaggacucccugagcuccaccgccagcgcgcucgggaagcugcaggacguggucaaccagaacgcccaggcccugaacacgcucgugaagcagcuguccagcaacuucggcgccaucuccagcgugcugaacgacauccucucccgccuggacaaggucgaggccgaggugcagaucgaccggcugaucaccgggcgccuccagagccugcagaccuacgugacccagcagcugauccgggcggccgagauccgcgccagcgccaaccucgccgcgaccaagauguccgagugcguccugggccagagcaagcggguggacuucugcggcaagggguaccaccugauguccuucccccagagcgccccgcacggcguggucuuccuccacgugacguacguccccgcccaggagaagaacuucaccaccgcccccgcgaucugccacgacgggaaggcccacuucccccgcgagggcguguucguguccaacgggacccacugguucgucacgcagcggaacuucuacgagccgcagaucaucaccaccgacaacaccuucgugagcggcaacugcgacguggucaucggcaucgugaacaacacgguguacgacccccugcagcccgagcuggacuccuucaaggaggagcucgacaaguacuucaagaaccacaccagccccgacgucgaccugggggacaucuccggcaucaacgccagcguggugaacauccagaaggagaucgaccgccugaacgaggucgccaagaaccucaacgagucccugaucgaccugcaggagcucgggaaguacgagcaguacaucaaguggccgugguacaucuggcugggcuucaucgccggccugaucgcgaucgugauggugaccaucaugcucugcugcaugaccagcugcugcuccugccugaaggggugcugcagcugcggcuccugcugcaaguucgacgaggacgacagcgagcccguccugaagggggugaagcuccacuacacgugaugacucgagcugguacugcaugcacgcaaugcuagcugccccuuucccguccuggguaccccgagucucccccgaccucgggucccagguaugcucccaccuccaccugccccacucaccaccucugcuaguuccagacaccucccaagcacgcagcaaugcagcucaaaacgcuuagccuagccacacccccacgggaaacagcagugauuaaccuuuagcaauaaacgaaaguuuaacuaagcuauacuaaccccaggguuggucaauuucgugccagccacacccuggagcuagcaaaaaaaaaaaaaaaaaaaaaaaaaaaaaagcauaugacuaaaaaaaaaaaaaaaaaaaaaaaaaaaaaaaaaaaaaaaaaaaaaaaaaaaaaaaaaaaaaaaaaaaaaa

SEQ ID NO: 26710 - RNA, 4283 nt, Artificial Sequence
  SARS-CoV-2/Wuhan/WIV05/2019__EPI_ISL_402128 spike protein mRNA gc (1-1273)(D614G)
agaauaaacuaguauucuucugguccccacagacucagagagaacccgccaccauguucguguuccugguccuccugccccuggugagcucccagugcgugaaccucaccacccgcacgcagcugccgcccgccuacaccaacagcuucacccggggcgucuacuaccccgacaagguguuccgcuccagcgugcugcacuccacccaggaccucuuccugcccuucuucagcaacgucacgugguuccacgccauccacguguccgggaccaacggcaccaagcgguucgacaacccggugcugcccuucaacgacggggucuacuucgcgagcaccgagaaguccaacaucauccgcggcuggaucuucgggacgacccucgacagcaagacccagucccugcugaucgugaacaacgccaccaacguggucaucaaggugugcgaguuccaguucugcaacgaccccuuccucggcguguacuaccacaagaacaacaagagcuggauggaguccgaguuccgggucuacagcuccgccaacaacugcacguucgaguacgugagccagcccuuccugauggaccuggagggcaagcaggggaacuucaagaaccuccgcgaguucguguucaagaacaucgacggcuacuucaagaucuacuccaagcacaccccgaucaaccugguccgggaccugccccagggguucagcgcccucgagccccugguggaccugcccaucggcaucaacaucacccgcuuccagacccuccuggcccugcaccgguccuaccucacgccgggggacagcagcuccggcuggaccgcgggcgccgccgccuacuacgugggguaccugcagccccgcaccuuccugcucaaguacaacgagaacggcaccaucacggacgcggucgacugcgcccuggacccccugagcgagaccaagugcacccucaaguccuucaccguggagaaggggaucuaccagacgagcaacuuccgggugcagcccaccgaguccaucguccgcuucccgaacaucaccaaccugugccccuucggcgagguguucaacgccacccgguucgccagcgucuacgccuggaaccgcaagcggaucuccaacugcguggcggacuacagcgugcuguacaacuccgccagcuucuccacguucaagugcuacggcgucagccccaccaagcucaacgaccugugcuucaccaacguguacgccgacuccuucgugauccgcggggacgagguccggcagaucgcccccggccagaccgggaagaucgccgacuacaacuacaagcugccggacgacuucacgggcugcgugaucgcguggaacagcaacaaccucgacuccaaggucgggggcaacuacaacuaccuguaccgccuguuccgcaagagcaaccucaagcccuucgagcgggacaucuccaccgagaucuaccaggccggcagcacccccugcaacgggguggagggcuucaacugcuacuucccccugcaguccuacggguuccagccgaccaacggcgugggguaccagcccuaccggguggucgugcugagcuucgagcuccugcacgcccccgccacggugugcggccccaagaaguccaccaaccuggucaagaacaagugcgugaacuucaacuucaacggccucaccgggaccggcgugcugaccgagagcaacaagaaguuccugccguuccagcaguucgggcgcgacaucgccgacacgaccgacgcgguccgcgacccccagacccuggagauccucgacaucacccccugcagcuucggcgggguguccgugaucacgccgggcaccaacaccagcaaccaggucgccgugcuguaccagggcgugaacugcaccgagguccccguggccauccacgccgaccagcugacgcccaccuggcggguguacuccaccggcagcaacgucuuccagacccgcgccgggugccucaucggcgcggagcacgugaacaacuccuacgagugcgacauccccaucggggccggcaucugcgccagcuaccagacgcagaccaacuccccgcggcgcgcccggagcguggcgucccagagcaucaucgccuacaccaugucccugggcgccgagaacagcgucgccuacuccaacaacagcaucgccauccccaccaacuucacgaucuccgugaccaccgagauccugcccgugagcaugaccaagacgagcgucgacugcaccauguacaucugcggggacuccaccgagugcagcaaccuccugcugcaguacggcuccuucugcacccagcucaaccgcgcgcugacggggaucgccguggagcaggacaagaacacccaggagguguucgcccaggucaagcagaucuacaagacgcccccgaucaaggacuucggcggguucaacuucagccagauccugcccgaccccuccaagcccagcaagcgguccuucaucgaggaccuccuguucaacaaggugacccuggccgacgccggcuucaucaagcaguacggcgacugccucggggacaucgcggcccgcgaccugaucugcgcccagaaguucaacggccugaccgugcucccgccccugcugaccgacgagaugaucgcccaguacaccagcgcccuccuggcggggaccaucacguccggcuggaccuucggggccggcgccgcccugcagauccccuucgcgaugcagauggccuaccgguucaacggcaucggggucacccagaacgugcucuacgagaaccagaagcugaucgccaaccaguucaacagcgccaucggcaagauccaggacucccugagcuccaccgccagcgcgcucgggaagcugcaggacguggucaaccagaacgcccaggcccugaacacgcucgugaagcagcuguccagcaacuucggcgccaucuccagcgugcugaacgacauccucucccgccuggacaaggucgaggccgaggugcagaucgaccggcugaucaccgggcgccuccagagccugcagaccuacgugacccagcagcugauccgggcggccgagauccgcgccagcgccaaccucgccgcgaccaagauguccgagugcguccugggccagagcaagcggguggacuucugcggcaagggguaccaccugauguccuucccccagagcgccccgcacggcguggucuuccuccacgugacguacguccccgcccaggagaagaacuucaccaccgcccccgcgaucugccacgacgggaaggcccacuucccccgcgagggcguguucguguccaacgggacccacugguucgucacgcagcggaacuucuacgagccgcagaucaucaccaccgacaacaccuucgugagcggcaacugcgacguggucaucggcaucgugaacaacacgguguacgacccccugcagcccgagcuggacuccuucaaggaggagcucgacaaguacuucaagaaccacaccagccccgacgucgaccugggggacaucuccggcaucaacgccagcguggugaacauccagaaggagaucgaccgccugaacgaggucgccaagaaccucaacgagucccugaucgaccugcaggagcucgggaaguacgagcaguacaucaaguggccgugguacaucuggcugggcuucaucgccggccugaucgcgaucgugauggugaccaucaugcucugcugcaugaccagcugcugcuccugccugaaggggugcugcagcugcggcuccugcugcaaguucgacgaggacgacagcgagcccguccugaagggggugaagcuccacuacacgugaugacucgagcugguacugcaugcacgcaaugcuagcugccccuuucccguccuggguaccccgagucucccccgaccucgggucccagguaugcucccaccuccaccugccccacucaccaccucugcuaguuccagacaccucccaagcacgcagcaaugcagcucaaaacgcuuagccuagccacacccccacgggaaacagcagugauuaaccuuuagcaauaaacgaaaguuuaacuaagcuauacuaaccccaggguuggucaauuucgugccagccacacccuggagcuagcaaaaaaaaaaaaaaaaaaaaaaaaaaaaaagcauaugacuaaaaaaaaaaaaaaaaaaaaaaaaaaaaaaaaaaaaaaaaaaaaaaaaaaaaaaaaaaaaaaaaaaaaaa

SEQ ID NO: 26711 - RNA, 4283 nt, Artificial Sequence
  SARS-CoV-2/Wuhan/WIV05/2019__EPI_ISL_402128 spike protein mRNA gc (1-1273)(A222V_D614G)
agaauaaacuaguauucuucugguccccacagacucagagagaacccgccaccauguucguguuccugguccuccugccccuggugagcucccagugcgugaaccucaccacccgcacgcagcugccgcccgccuacaccaacagcuucacccggggcgucuacuaccccgacaagguguuccgcuccagcgugcugcacuccacccaggaccucuuccugcccuucuucagcaacgucacgugguuccacgccauccacguguccgggaccaacggcaccaagcgguucgacaacccggugcugcccuucaacgacggggucuacuucgcgagcaccgagaaguccaacaucauccgcggcuggaucuucgggacgacccucgacagcaagacccagucccugcugaucgugaacaacgccaccaacguggucaucaaggugugcgaguuccaguucugcaacgaccccuuccucggcguguacuaccacaagaacaacaagagcuggauggaguccgaguuccgggucuacagcuccgccaacaacugcacguucgaguacgugagccagcccuuccugauggaccuggagggcaagcaggggaacuucaagaaccuccgcgaguucguguucaagaacaucgacggcuacuucaagaucuacuccaagcacaccccgaucaaccugguccgggaccugccccagggguucagcguccucgagccccugguggaccugcccaucggcaucaacaucacccgcuuccagacccuccuggcccugcaccgguccuaccucacgccgggggacagcagcuccggcuggaccgcgggcgccgccgccuacuacgugggguaccugcagccccgcaccuuccugcucaaguacaacgagaacggcaccaucacggacgcggucgacugcgcccuggacccccugagcgagaccaagugcacccucaaguccuucaccguggagaaggggaucuaccagacgagcaacuuccgggugcagcccaccgaguccaucguccgcuucccgaacaucaccaaccugugccccuucggcgagguguucaacgccacccgguucgccagcgucuacgccuggaaccgcaagcggaucuccaacugcguggcggacuacagcgugcuguacaacuccgccagcuucuccacguucaagugcuacggcgucagccccaccaagcucaacgaccugugcuucaccaacguguacgccgacuccuucgugauccgcggggacgagguccggcagaucgcccccggccagaccgggaagaucgccgacuacaacuacaagcugccggacgacuucacgggcugcgugaucgcguggaacagcaacaaccucgacuccaaggucgggggcaacuacaacuaccuguaccgccuguuccgcaagagcaaccucaagcccuucgagcgggacaucuccaccgagaucuaccaggccggcagcacccccugcaacgggguggagggcuucaacugcuacuucccccugcaguccuacggguuccagccgaccaacggcgugggguaccagcccuaccggguggucgugcugagcuucgagcuccugcacgcccccgccacggugugcggccccaagaaguccaccaaccuggucaagaacaagugcgugaacuucaacuucaacggccucaccgggaccggcgugcugaccgagagcaacaagaaguuccugccguuccagcaguucgggcgcgacaucgccgacacgaccgacgcgguccgcgacccccagacccuggagauccucgacaucacccccugcagcuucggcgggguguccgugaucacgccgggcaccaacaccagcaaccaggucgccgugcuguaccagggcgugaacugcaccgagguccccguggccauccacgccgaccagcugacgcccaccuggcggguguacuccaccggcagcaacgucuuccagacccgcgccgggugccucaucggcgcggagcacgugaacaacuccuacgagugcgacauccccaucggggccggcaucugcgccagcuaccagacgcagaccaacuccccgcggcgcgcccggagcguggcgucccagagcaucaucgccuacaccaugucccugggcgccgagaacagcgucgccuacuccaacaacagcaucgccauccccaccaacuucacgaucuccgugaccaccgagauccugcccgugagcaugaccaagacgagcgucgacugcaccauguacaucugcggggacuccaccgagugcagcaaccuccugcugcaguacggcuccuucugcacccagcucaaccgcgcgcugacggggaucgccguggagcaggacaagaacacccaggagguguucgcccaggucaagcagaucuacaagacgcccccgaucaaggacuucggcggguucaacuucagccagauccugcccgaccccuccaagcccagcaagcgguccuucaucgaggaccuccuguucaacaaggugacccuggccgacgccggcuucaucaagcaguacggcgacugccucggggacaucgcggcccgcgaccugaucugcgcccagaaguucaacggccugaccgugcucccgccccugcugaccgacgagaugaucgcccaguacaccagcgcccuccuggcggggaccaucacguccggcuggaccuucggggccggcgccgcccugcagauccccuucgcgaugcagauggccuaccgguucaacggcaucggggucacccagaacgugcucuacgagaaccagaagcugaucgccaaccaguucaacagcgccaucggcaagauccaggacucccugagcuccaccgccagcgcgcucgggaagcugcaggacguggucaaccagaacgcccaggcccugaacacgcucgugaagcagcuguccagcaacuucggcgccaucuccagcgugcugaacgacauccucucccgccuggacaaggucgaggccgaggugcagaucgaccggcugaucaccgggcgccuccagagccugcagaccuacgugacccagcagcugauccgggcggccgagauccgcgccagcgccaaccucgccgcgaccaagauguccgagugcguccugggccagagcaagcggguggacuucugcggcaagggguaccaccugauguccuucccccagagcgccccgcacggcguggucuuccuccacgugacguacguccccgcccaggagaagaacuucaccaccgcccccgcgaucugccacgacgggaaggcccacuucccccgcgagggcguguucguguccaacgggacccacugguucgucacgcagcggaacuucuacgagccgcagaucaucaccaccgacaacaccuucgugagcggcaacugcgacguggucaucggcaucgugaacaacacgguguacgacccccugcagcccgagcuggacuccuucaaggaggagcucgacaaguacuucaagaaccacaccagccccgacgucgaccugggggacaucuccggcaucaacgccagcguggugaacauccagaaggagaucgaccgccugaacgaggucgccaagaaccucaacgagucccugaucgaccugcaggagcucgggaaguacgagcaguacaucaaguggccgugguacaucuggcugggcuucaucgccggccugaucgcgaucgugauggugaccaucaugcucugcugcaugaccagcugcugcuccugccugaaggggugcugcagcugcggcuccugcugcaaguucgacgaggacgacagcgagcccguccugaagggggugaagcuccacuacacgugaugacucgagcugguacugcaugcacgcaaugcuagcugccccuuucccguccuggguaccccgagucucccccgaccucgggucccagguaugcucccaccuccaccugccccacucaccaccucugcuaguuccagacaccucccaagcacgcagcaaugcagcucaaaacgcuuagccuagccacacccccacgggaaacagcagugauuaaccuuuagcaauaaacgaaaguuuaacuaagcuauacuaaccccaggguuggucaauuucgugccagccacacccuggagcuagcaaaaaaaaaaaaaaaaaaaaaaaaaaaaaagcauaugacuaaaaaaaaaaaaaaaaaaaaaaaaaaaaaaaaaaaaaaaaaaaaaaaaaaaaaaaaaaaaaaaaaaaaaa

SEQ ID NO: 26712 - RNA, 4283 nt, Artificial Sequence
  SARS-CoV-2/Wuhan/WIV05/2019__EPI_ISL_402128 spike protein mRNA gc (1-1273)(N439K_D614G)
agaauaaacuaguauucuucugguccccacagacucagagagaacccgccaccauguucguguuccugguccuccugccccuggugagcucccagugcgugaaccucaccacccgcacgcagcugccgcccgccuacaccaacagcuucacccggggcgucuacuaccccgacaagguguuccgcuccagcgugcugcacuccacccaggaccucuuccugcccuucuucagcaacgucacgugguuccacgccauccacguguccgggaccaacggcaccaagcgguucgacaacccggugcugcccuucaacgacggggucuacuucgcgagcaccgagaaguccaacaucauccgcggcuggaucuucgggacgacccucgacagcaagacccagucccugcugaucgugaacaacgccaccaacguggucaucaaggugugcgaguuccaguucugcaacgaccccuuccucggcguguacuaccacaagaacaacaagagcuggauggaguccgaguuccgggucuacagcuccgccaacaacugcacguucgaguacgugagccagcccuuccugauggaccuggagggcaagcaggggaacuucaagaaccuccgcgaguucguguucaagaacaucgacggcuacuucaagaucuacuccaagcacaccccgaucaaccugguccgggaccugccccagggguucagcgcccucgagccccugguggaccugcccaucggcaucaacaucacccgcuuccagacccuccuggcccugcaccgguccuaccucacgccgggggacagcagcuccggcuggaccgcgggcgccgccgccuacuacgugggguaccugcagccccgcaccuuccugcucaaguacaacgagaacggcaccaucacggacgcggucgacugcgcccuggacccccugagcgagaccaagugcacccucaaguccuucaccguggagaaggggaucuaccagacgagcaacuuccgggugcagcccaccgaguccaucguccgcuucccgaacaucaccaaccugugccccuucggcgagguguucaacgccacccgguucgccagcgucuacgccuggaaccgcaagcggaucuccaacugcguggcggacuacagcgugcuguacaacuccgccagcuucuccacguucaagugcuacggcgucagccccaccaagcucaacgaccugugcuucaccaacguguacgccgacuccuucgugauccgcggggacgagguccggcagaucgcccccggccagaccgggaagaucgccgacuacaacuacaagcugccggacgacuucacgggcugcgugaucgcguggaacagcaagaaccucgacuccaaggucgggggcaacuacaacuaccuguaccgccuguuccgcaagagcaaccucaagcccuucgagcgggacaucuccaccgagaucuaccaggccggcagcacccccugcaacgggguggagggcuucaacugcuacuucccccugcaguccuacggguuccagccgaccaacggcgugggguaccagcccuaccggguggucgugcugagcuucgagcuccugcacgcccccgccacggugugcggccccaagaaguccaccaaccuggucaagaacaagugcgugaacuucaacuucaacggccucaccgggaccggcgugcugaccgagagcaacaagaaguuccugccguuccagcaguucgggcgcgacaucgccgacacgaccgacgcgguccgcgacccccagacccuggagauccucgacaucacccccugcagcuucggcgggguguccgugaucacgccgggcaccaacaccagcaaccaggucgccgugcuguaccagggcgugaacugcaccgagguccccguggccauccacgccgaccagcugacgcccaccuggcggguguacuccaccggcagcaacgucuuccagacccgcgccgggugccucaucggcgcggagcacgugaacaacuccuacgagugcgacauccccaucggggccggcaucugcgccagcuaccagacgcagaccaacuccccgcggcgcgcccggagcguggcgucccagagcaucaucgccuacaccaugucccugggcgccgagaacagcgucgccuacuccaacaacagcaucgccauccccaccaacuucacgaucuccgugaccaccgagauccugcccgugagcaugaccaagacgagcgucgacugcaccauguacaucugcggggacuccaccgagugcagcaaccuccugcugcaguacggcuccuucugcacccagcucaaccgcgcgcugacggggaucgccguggagcaggacaagaacacccaggagguguucgcccaggucaagcagaucuacaagacgcccccgaucaaggacuucggcggguucaacuucagccagauccugcccgaccccuccaagcccagcaagcgguccuucaucgaggaccuccuguucaacaaggugacccuggccgacgccggcuucaucaagcaguacggcgacugccucggggacaucgcggcccgcgaccugaucugcgcccagaaguucaacggccugaccgugcucccgccccugcugaccgacgagaugaucgcccaguacaccagcgcccuccuggcggggaccaucacguccggcuggaccuucggggccggcgccgcccugcagauccccuucgcgaugcagauggccuaccgguucaacggcaucggggucacccagaacgugcucuacgagaaccagaagcugaucgccaaccaguucaacagcgccaucggcaagauccaggacucccugagcuccaccgccagcgcgcucgggaagcugcaggacguggucaaccagaacgcccaggcccugaacacgcucgugaagcagcuguccagcaacuucggcgccaucuccagcgugcugaacgacauccucucccgccuggacaaggucgaggccgaggugcagaucgaccggcugaucaccgggcgccuccagagccugcagaccuacgugacccagcagcugauccgggcggccgagauccgcgccagcgccaaccucgccgcgaccaagauguccgagugcguccugggccagagcaagcggguggacuucugcggcaagggguaccaccugauguccuucccccagagcgccccgcacggcguggucuuccuccacgugacguacguccccgcccaggagaagaacuucaccaccgcccccgcgaucugccacgacgggaaggcccacuucccccgcgagggcguguucguguccaacgggacccacugguucgucacgcagcggaacuucuacgagccgcagaucaucaccaccgacaacaccuucgugagcggcaacugcgacguggucaucggcaucgugaacaacacgguguacgacccccugcagcccgagcuggacuccuucaaggaggagcucgacaaguacuucaagaaccacaccagccccgacgucgaccugggggacaucuccggcaucaacgccagcguggugaacauccagaaggagaucgaccgccugaacgaggucgccaagaaccucaacgagucccugaucgaccugcaggagcucgggaaguacgagcaguacaucaaguggccgugguacaucuggcugggcuucaucgccggccugaucgcgaucgugauggugaccaucaugcucugcugcaugaccagcugcugcuccugccugaaggggugcugcagcugcggcuccugcugcaaguucgacgaggacgacagcgagcccguccugaagggggugaagcuccacuacacgugaugacucgagcugguacugcaugcacgcaaugcuagcugccccuuucccguccuggguaccccgagucucccccgaccucgggucccagguaugcucccaccuccaccugccccacucaccaccucugcuaguuccagacaccucccaagcacgcagcaaugcagcucaaaacgcuuagccuagccacacccccacgggaaacagcagugauuaaccuuuagcaauaaacgaaaguuuaacuaagcuauacuaaccccaggguuggucaauuucgugccagccacacccuggagcuagcaaaaaaaaaaaaaaaaaaaaaaaaaaaaaagcauaugacuaaaaaaaaaaaaaaaaaaaaaaaaaaaaaaaaaaaaaaaaaaaaaaaaaaaaaaaaaaaaaaaaaaaaaa

SEQ ID NO: 26713 - RNA, 4283 nt, Artificial Sequence
  SARS-CoV-2/Wuhan/WIV05/2019__EPI_ISL_402128 spike protein mRNA gc (1-1273)(S477N_D614G)
agaauaaacuaguauucuucugguccccacagacucagagagaacccgccaccauguucguguuccugguccuccugccccuggugagcucccagugcgugaaccucaccacccgcacgcagcugccgcccgccuacaccaacagcuucacccggggcgucuacuaccccgacaagguguuccgcuccagcgugcugcacuccacccaggaccucuuccugcccuucuucagcaacgucacgugguuccacgccauccacguguccgggaccaacggcaccaagcgguucgacaacccggugcugcccuucaacgacggggucuacuucgcgagcaccgagaaguccaacaucauccgcggcuggaucuucgggacgacccucgacagcaagacccagucccugcugaucgugaacaacgccaccaacguggucaucaaggugugcgaguuccaguucugcaacgaccccuuccucggcguguacuaccacaagaacaacaagagcuggauggaguccgaguuccgggucuacagcuccgccaacaacugcacguucgaguacgugagccagcccuuccugauggaccuggagggcaagcaggggaacuucaagaaccuccgcgaguucguguucaagaacaucgacggcuacuucaagaucuacuccaagcacaccccgaucaaccugguccgggaccugccccagggguucagcgcccucgagccccugguggaccugcccaucggcaucaacaucacccgcuuccagacccuccuggcccugcaccgguccuaccucacgccgggggacagcagcuccggcuggaccgcgggcgccgccgccuacuacgugggguaccugcagccccgcaccuuccugcucaaguacaacgagaacggcaccaucacggacgcggucgacugcgcccuggacccccugagcgagaccaagugcacccucaaguccuucaccguggagaaggggaucuaccagacgagcaacuuccgggugcagcccaccgaguccaucguccgcuucccgaacaucaccaaccugugccccuucggcgagguguucaacgccacccgguucgccagcgucuacgccuggaaccgcaagcggaucuccaacugcguggcggacuacagcgugcuguacaacuccgccagcuucuccacguucaagugcuacggcgucagccccaccaagcucaacgaccugugcuucaccaacguguacgccgacuccuucgugauccgcggggacgagguccggcagaucgcccccggccagaccgggaagaucgccgacuacaacuacaagcugccggacgacuucacgggcugcgugaucgcguggaacagcaacaaccucgacuccaaggucgggggcaacuacaacuaccuguaccgccuguuccgcaagagcaaccucaagcccuucgagcgggacaucuccaccgagaucuaccaggccggcaacacccccugcaacgggguggagggcuucaacugcuacuucccccugcaguccuacggguuccagccgaccaacggcgugggguaccagcccuaccggguggucgugcugagcuucgagcuccugcacgcccccgccacggugugcggccccaagaaguccaccaaccuggucaagaacaagugcgugaacuucaacuucaacggccucaccgggaccggcgugcugaccgagagcaacaagaaguuccugccguuccagcaguucgggcgcgacaucgccgacacgaccgacgcgguccgcgacccccagacccuggagauccucgacaucacccccugcagcuucggcgggguguccgugaucacgccgggcaccaacaccagcaaccaggucgccgugcuguaccagggcgugaacugcaccgagguccccguggccauccacgccgaccagcugacgcccaccuggcggguguacuccaccggcagcaacgucuuccagacccgcgccgggugccucaucggcgcggagcacgugaacaacuccuacgagugcgacauccccaucggggccggcaucugcgccagcuaccagacgcagaccaacuccccgcggcgcgcccggagcguggcgucccagagcaucaucgccuacaccaugucccugggcgccgagaacagcgucgccuacuccaacaacagcaucgccauccccaccaacuucacgaucuccgugaccaccgagauccugcccgugagcaugaccaagacgagcgucgacugcaccauguacaucugcggggacuccaccgagugcagcaaccuccugcugcaguacggcuccuucugcacccagcucaaccgcgcgcugacggggaucgccguggagcaggacaagaacacccaggagguguucgcccaggucaagcagaucuacaagacgcccccgaucaaggacuucggcggguucaacuucagccagauccugcccgaccccuccaagcccagcaagcgguccuucaucgaggaccuccuguucaacaaggugacccuggccgacgccggcuucaucaagcaguacggcgacugccucggggacaucgcggcccgcgaccugaucugcgcccagaaguucaacggccugaccgugcucccgccccugcugaccgacgagaugaucgcccaguacaccagcgcccuccuggcggggaccaucacguccggcuggaccuucggggccggcgccgcccugcagauccccuucgcgaugcagauggccuaccgguucaacggcaucggggucacccagaacgugcucuacgagaaccagaagcugaucgccaaccaguucaacagcgccaucggcaagauccaggacucccugagcuccaccgccagcgcgcucgggaagcugcaggacguggucaaccagaacgcccaggcccugaacacgcucgugaagcagcuguccagcaacuucggcgccaucuccagcgugcugaacgacauccucucccgccuggacaaggucgaggccgaggugcagaucgaccggcugaucaccgggcgccuccagagccugcagaccuacgugacccagcagcugauccgggcggccgagauccgcgccagcgccaaccucgccgcgaccaagauguccgagugcguccugggccagagcaagcggguggacuucugcggcaagggguaccaccugauguccuucccccagagcgccccgcacggcguggucuuccuccacgugacguacguccccgcccaggagaagaacuucaccaccgcccccgcgaucugccacgacgggaaggcccacuucccccgcgagggcguguucguguccaacgggacccacugguucgucacgcagcggaacuucuacgagccgcagaucaucaccaccgacaacaccuucgugagcggcaacugcgacguggucaucggcaucgugaacaacacgguguacgacccccugcagcccgagcuggacuccuucaaggaggagcucgacaaguacuucaagaaccacaccagccccgacgucgaccugggggacaucuccggcaucaacgccagcguggugaacauccagaaggagaucgaccgccugaacgaggucgccaagaaccucaacgagucccugaucgaccugcaggagcucgggaaguacgagcaguacaucaaguggccgugguacaucuggcugggcuucaucgccggccugaucgcgaucgugauggugaccaucaugcucugcugcaugaccagcugcugcuccugccugaaggggugcugcagcugcggcuccugcugcaaguucgacgaggacgacagcgagcccguccugaagggggugaagcuccacuacacgugaugacucgagcugguacugcaugcacgcaaugcuagcugccccuuucccguccuggguaccccgagucucccccgaccucgggucccagguaugcucccaccuccaccugccccacucaccaccucugcuaguuccagacaccucccaagcacgcagcaaugcagcucaaaacgcuuagccuagccacacccccacgggaaacagcagugauuaaccuuuagcaauaaacgaaaguuuaacuaagcuauacuaaccccaggguuggucaauuucgugccagccacacccuggagcuagcaaaaaaaaaaaaaaaaaaaaaaaaaaaaaagcauaugacuaaaaaaaaaaaaaaaaaaaaaaaaaaaaaaaaaaaaaaaaaaaaaaaaaaaaaaaaaaaaaaaaaaaaaa

SEQ ID NO: 26714 - RNA, 4283 nt, Artificial Sequence
  SARS-CoV-2/Wuhan/WIV05/2019__EPI_ISL_402128 spike protein mRNA gc (1-1273)(N501Y_D614G)
agaauaaacuaguauucuucugguccccacagacucagagagaacccgccaccauguucguguuccugguccuccugccccuggugagcucccagugcgugaaccucaccacccgcacgcagcugccgcccgccuacaccaacagcuucacccggggcgucuacuaccccgacaagguguuccgcuccagcgugcugcacuccacccaggaccucuuccugcccuucuucagcaacgucacgugguuccacgccauccacguguccgggaccaacggcaccaagcgguucgacaacccggugcugcccuucaacgacggggucuacuucgcgagcaccgagaaguccaacaucauccgcggcuggaucuucgggacgacccucgacagcaagacccagucccugcugaucgugaacaacgccaccaacguggucaucaaggugugcgaguuccaguucugcaacgaccccuuccucggcguguacuaccacaagaacaacaagagcuggauggaguccgaguuccgggucuacagcuccgccaacaacugcacguucgaguacgugagccagcccuuccugauggaccuggagggcaagcaggggaacuucaagaaccuccgcgaguucguguucaagaacaucgacggcuacuucaagaucuacuccaagcacaccccgaucaaccugguccgggaccugccccagggguucagcgcccucgagccccugguggaccugcccaucggcaucaacaucacccgcuuccagacccuccuggcccugcaccgguccuaccucacgccgggggacagcagcuccggcuggaccgcgggcgccgccgccuacuacgugggguaccugcagccccgcaccuuccugcucaaguacaacgagaacggcaccaucacggacgcggucgacugcgcccuggacccccugagcgagaccaagugcacccucaaguccuucaccguggagaaggggaucuaccagacgagcaacuuccgggugcagcccaccgaguccaucguccgcuucccgaacaucaccaaccugugccccuucggcgagguguucaacgccacccgguucgccagcgucuacgccuggaaccgcaagcggaucuccaacugcguggcggacuacagcgugcuguacaacuccgccagcuucuccacguucaagugcuacggcgucagccccaccaagcucaacgaccugugcuucaccaacguguacgccgacuccuucgugauccgcggggacgagguccggcagaucgcccccggccagaccgggaagaucgccgacuacaacuacaagcugccggacgacuucacgggcugcgugaucgcguggaacagcaacaaccucgacuccaaggucgggggcaacuacaacuaccuguaccgccuguuccgcaagagcaaccucaagcccuucgagcgggacaucuccaccgagaucuaccaggccggcagcacccccugcaacgggguggagggcuucaacugcuacuucccccugcaguccuacggguuccagccgaccuacggcgugggguaccagcccuaccggguggucgugcugagcuucgagcuccugcacgcccccgccacggugugcggccccaagaaguccaccaaccuggucaagaacaagugcgugaacuucaacuucaacggccucaccgggaccggcgugcugaccgagagcaacaagaaguuccugccguuccagcaguucgggcgcgacaucgccgacacgaccgacgcgguccgcgacccccagacccuggagauccucgacaucacccccugcagcuucggcgggguguccgugaucacgccgggcaccaacaccagcaaccaggucgccgugcuguaccagggcgugaacugcaccgagguccccguggccauccacgccgaccagcugacgcccaccuggcggguguacuccaccggcagcaacgucuuccagacccgcgccgggugccucaucggcgcggagcacgugaacaacuccuacgagugcgacauccccaucggggccggcaucugcgccagcuaccagacgcagaccaacuccccgcggcgcgcccggagcguggcgucccagagcaucaucgccuacaccaugucccugggcgccgagaacagcgucgccuacuccaacaacagcaucgccauccccaccaacuucacgaucuccgugaccaccgagauccugcccgugagcaugaccaagacgagcgucgacugcaccauguacaucugcggggacuccaccgagugcagcaaccuccugcugcaguacggcuccuucugcacccagcucaaccgcgcgcugacggggaucgccguggagcaggacaagaacacccaggagguguucgcccaggucaagcagaucuacaagacgcccccgaucaaggacuucggcggguucaacuucagccagauccugcccgaccccuccaagcccagcaagcgguccuucaucgaggaccuccuguucaacaaggugacccuggccgacgccggcuucaucaagcaguacggcgacugccucggggacaucgcggcccgcgaccugaucugcgcccagaaguucaacggccugaccgugcucccgccccugcugaccgacgagaugaucgcccaguacaccagcgcccuccuggcggggaccaucacguccggcuggaccuucggggccggcgccgcccugcagauccccuucgcgaugcagauggccuaccgguucaacggcaucggggucacccagaacgugcucuacgagaaccagaagcugaucgccaaccaguucaacagcgccaucggcaagauccaggacucccugagcuccaccgccagcgcgcucgggaagcugcaggacguggucaaccagaacgcccaggcccugaacacgcucgugaagcagcuguccagcaacuucggcgccaucuccagcgugcugaacgacauccucucccgccuggacaaggucgaggccgaggugcagaucgaccggcugaucaccgggcgccuccagagccugcagaccuacgugacccagcagcugauccgggcggccgagauccgcgccagcgccaaccucgccgcgaccaagauguccgagugcguccugggccagagcaagcggguggacuucugcggcaagggguaccaccugauguccuucccccagagcgccccgcacggcguggucuuccuccacgugacguacguccccgcccaggagaagaacuucaccaccgcccccgcgaucugccacgacgggaaggcccacuucccccgcgagggcguguucguguccaacgggacccacugguucgucacgcagcggaacuucuacgagccgcagaucaucaccaccgacaacaccuucgugagcggcaacugcgacguggucaucggcaucgugaacaacacgguguacgacccccugcagcccgagcuggacuccuucaaggaggagcucgacaaguacuucaagaaccacaccagccccgacgucgaccugggggacaucuccggcaucaacgccagcguggugaacauccagaaggagaucgaccgccugaacgaggucgccaagaaccucaacgagucccugaucgaccugcaggagcucgggaaguacgagcaguacaucaaguggccgugguacaucuggcugggcuucaucgccggccugaucgcgaucgugauggugaccaucaugcucugcugcaugaccagcugcugcuccugccugaaggggugcugcagcugcggcuccugcugcaaguucgacgaggacgacagcgagcccguccugaagggggugaagcuccacuacacgugaugacucgagcugguacugcaugcacgcaaugcuagcugccccuuucccguccuggguaccccgagucucccccgaccucgggucccagguaugcucccaccuccaccugccccacucaccaccucugcuaguuccagacaccucccaagcacgcagcaaugcagcucaaaacgcuuagccuagccacacccccacgggaaacagcagugauuaaccuuuagcaauaaacgaaaguuuaacuaagcuauacuaaccccaggguuggucaauuucgugccagccacacccuggagcuagcaaaaaaaaaaaaaaaaaaaaaaaaaaaaaagcauaugacuaaaaaaaaaaaaaaaaaaaaaaaaaaaaaaaaaaaaaaaaaaaaaaaaaaaaaaaaaaaaaaaaaaaaaa

SEQ ID NO: 26715 - RNA, 4277 nt, Artificial Sequence
  SARS-CoV-2/Wuhan/WIV05/2019__EPI_ISL_402128 spike protein mRNA gc (1-1273)(H69del_V70del_D614G)
agaauaaacuaguauucuucugguccccacagacucagagagaacccgccaccauguucguguuccugguccuccugccccuggugagcucccagugcgugaaccucaccacccgcacgcagcugccgcccgccuacaccaacagcuucacccggggcgucuacuaccccgacaagguguuccgcuccagcgugcugcacuccacccaggaccucuuccugcccuucuucagcaacgucacgugguuccacgccaucuccgggaccaacggcaccaagcgguucgacaacccggugcugcccuucaacgacggggucuacuucgcgagcaccgagaaguccaacaucauccgcggcuggaucuucgggacgacccucgacagcaagacccagucccugcugaucgugaacaacgccaccaacguggucaucaaggugugcgaguuccaguucugcaacgaccccuuccucggcguguacuaccacaagaacaacaagagcuggauggaguccgaguuccgggucuacagcuccgccaacaacugcacguucgaguacgugagccagcccuuccugauggaccuggagggcaagcaggggaacuucaagaaccuccgcgaguucguguucaagaacaucgacggcuacuucaagaucuacuccaagcacaccccgaucaaccugguccgggaccugccccagggguucagcgcccucgagccccugguggaccugcccaucggcaucaacaucacccgcuuccagacccuccuggcccugcaccgguccuaccucacgccgggggacagcagcuccggcuggaccgcgggcgccgccgccuacuacgugggguaccugcagccccgcaccuuccugcucaaguacaacgagaacggcaccaucacggacgcggucgacugcgcccuggacccccugagcgagaccaagugcacccucaaguccuucaccguggagaaggggaucuaccagacgagcaacuuccgggugcagcccaccgaguccaucguccgcuucccgaacaucaccaaccugugccccuucggcgagguguucaacgccacccgguucgccagcgucuacgccuggaaccgcaagcggaucuccaacugcguggcggacuacagcgugcuguacaacuccgccagcuucuccacguucaagugcuacggcgucagccccaccaagcucaacgaccugugcuucaccaacguguacgccgacuccuucgugauccgcggggacgagguccggcagaucgcccccggccagaccgggaagaucgccgacuacaacuacaagcugccggacgacuucacgggcugcgugaucgcguggaacagcaacaaccucgacuccaaggucgggggcaacuacaacuaccuguaccgccuguuccgcaagagcaaccucaagcccuucgagcgggacaucuccaccgagaucuaccaggccggcagcacccccugcaacgggguggagggcuucaacugcuacuucccccugcaguccuacggguuccagccgaccaacggcgugggguaccagcccuaccggguggucgugcugagcuucgagcuccugcacgcccccgccacggugugcggccccaagaaguccaccaaccuggucaagaacaagugcgugaacuucaacuucaacggccucaccgggaccggcgugcugaccgagagcaacaagaaguuccugccguuccagcaguucgggcgcgacaucgccgacacgaccgacgcgguccgcgacccccagacccuggagauccucgacaucacccccugcagcuucggcgggguguccgugaucacgccgggcaccaacaccagcaaccaggucgccgugcuguaccagggcgugaacugcaccgagguccccguggccauccacgccgaccagcugacgcccaccuggcggguguacuccaccggcagcaacgucuuccagacccgcgccgggugccucaucggcgcggagcacgugaacaacuccuacgagugcgacauccccaucggggccggcaucugcgccagcuaccagacgcagaccaacuccccgcggcgcgcccggagcguggcgucccagagcaucaucgccuacaccaugucccugggcgccgagaacagcgucgccuacuccaacaacagcaucgccauccccaccaacuucacgaucuccgugaccaccgagauccugcccgugagcaugaccaagacgagcgucgacugcaccauguacaucugcggggacuccaccgagugcagcaaccuccugcugcaguacggcuccuucugcacccagcucaaccgcgcgcugacggggaucgccguggagcaggacaagaacacccaggagguguucgcccaggucaagcagaucuacaagacgcccccgaucaaggacuucggcggguucaacuucagccagauccugcccgaccccuccaagcccagcaagcgguccuucaucgaggaccuccuguucaacaaggugacccuggccgacgccggcuucaucaagcaguacggcgacugccucggggacaucgcggcccgcgaccugaucugcgcccagaaguucaacggccugaccgugcucccgccccugcugaccgacgagaugaucgcccaguacaccagcgcccuccuggcggggaccaucacguccggcuggaccuucggggccggcgccgcccugcagauccccuucgcgaugcagauggccuaccgguucaacggcaucggggucacccagaacgugcucuacgagaaccagaagcugaucgccaaccaguucaacagcgccaucggcaagauccaggacucccugagcuccaccgccagcgcgcucgggaagcugcaggacguggucaaccagaacgcccaggcccugaacacgcucgugaagcagcuguccagcaacuucggcgccaucuccagcgugcugaacgacauccucucccgccuggacaaggucgaggccgaggugcagaucgaccggcugaucaccgggcgccuccagagccugcagaccuacgugacccagcagcugauccgggcggccgagauccgcgccagcgccaaccucgccgcgaccaagauguccgagugcguccugggccagagcaagcggguggacuucugcggcaagggguaccaccugauguccuucccccagagcgccccgcacggcguggucuuccuccacgugacguacguccccgcccaggagaagaacuucaccaccgcccccgcgaucugccacgacgggaaggcccacuucccccgcgagggcguguucguguccaacgggacccacugguucgucacgcagcggaacuucuacgagccgcagaucaucaccaccgacaacaccuucgugagcggcaacugcgacguggucaucggcaucgugaacaacacgguguacgacccccugcagcccgagcuggacuccuucaaggaggagcucgacaaguacuucaagaaccacaccagccccgacgucgaccugggggacaucuccggcaucaacgccagcguggugaacauccagaaggagaucgaccgccugaacgaggucgccaagaaccucaacgagucccugaucgaccugcaggagcucgggaaguacgagcaguacaucaaguggccgugguacaucuggcugggcuucaucgccggccugaucgcgaucgugauggugaccaucaugcucugcugcaugaccagcugcugcuccugccugaaggggugcugcagcugcggcuccugcugcaaguucgacgaggacgacagcgagcccguccugaagggggugaagcuccacuacacgugaugacucgagcugguacugcaugcacgcaaugcuagcugccccuuucccguccuggguaccccgagucucccccgaccucgggucccagguaugcucccaccuccaccugccccacucaccaccucugcuaguuccagacaccucccaagcacgcagcaaugcagcucaaaacgcuuagccuagccacacccccacgggaaacagcagugauuaaccuuuagcaauaaacgaaaguuuaacuaagcuauacuaaccccaggguuggucaauuucgugccagccacacccuggagcuagcaaaaaaaaaaaaaaaaaaaaaaaaaaaaaagcauaugacuaaaaaaaaaaaaaaaaaaaaaaaaaaaaaaaaaaaaaaaaaaaaaaaaaaaaaaaaaaaaaaaaaaaaaa

SEQ ID NO: 26716 - RNA, 4283 nt, Artificial Sequence
  SARS-CoV-2/Wuhan/WIV05/2019__EPI_ISL_402128 spike protein mRNA gc (1-1273)(Y453F_D614G)
agaauaaacuaguauucuucugguccccacagacucagagagaacccgccaccauguucguguuccugguccuccugccccuggugagcucccagugcgugaaccucaccacccgcacgcagcugccgcccgccuacaccaacagcuucacccggggcgucuacuaccccgacaagguguuccgcuccagcgugcugcacuccacccaggaccucuuccugcccuucuucagcaacgucacgugguuccacgccauccacguguccgggaccaacggcaccaagcgguucgacaacccggugcugcccuucaacgacggggucuacuucgcgagcaccgagaaguccaacaucauccgcggcuggaucuucgggacgacccucgacagcaagacccagucccugcugaucgugaacaacgccaccaacguggucaucaaggugugcgaguuccaguucugcaacgaccccuuccucggcguguacuaccacaagaacaacaagagcuggauggaguccgaguuccgggucuacagcuccgccaacaacugcacguucgaguacgugagccagcccuuccugauggaccuggagggcaagcaggggaacuucaagaaccuccgcgaguucguguucaagaacaucgacggcuacuucaagaucuacuccaagcacaccccgaucaaccugguccgggaccugccccagggguucagcgcccucgagccccugguggaccugcccaucggcaucaacaucacccgcuuccagacccuccuggcccugcaccgguccuaccucacgccgggggacagcagcuccggcuggaccgcgggcgccgccgccuacuacgugggguaccugcagccccgcaccuuccugcucaaguacaacgagaacggcaccaucacggacgcggucgacugcgcccuggacccccugagcgagaccaagugcacccucaaguccuucaccguggagaaggggaucuaccagacgagcaacuuccgggugcagcccaccgaguccaucguccgcuucccgaacaucaccaaccugugccccuucggcgagguguucaacgccacccgguucgccagcgucuacgccuggaaccgcaagcggaucuccaacugcguggcggacuacagcgugcuguacaacuccgccagcuucuccacguucaagugcuacggcgucagccccaccaagcucaacgaccugugcuucaccaacguguacgccgacuccuucgugauccgcggggacgagguccggcagaucgcccccggccagaccgggaagaucgccgacuacaacuacaagcugccggacgacuucacgggcugcgugaucgcguggaacagcaacaaccucgacuccaaggucgggggcaacuacaacuaccuguuccgccuguuccgcaagagcaaccucaagcccuucgagcgggacaucuccaccgagaucuaccaggccggcagcacccccugcaacgggguggagggcuucaacugcuacuucccccugcaguccuacggguuccagccgaccaacggcgugggguaccagcccuaccggguggucgugcugagcuucgagcuccugcacgcccccgccacggugugcggccccaagaaguccaccaaccuggucaagaacaagugcgugaacuucaacuucaacggccucaccgggaccggcgugcugaccgagagcaacaagaaguuccugccguuccagcaguucgggcgcgacaucgccgacacgaccgacgcgguccgcgacccccagacccuggagauccucgacaucacccccugcagcuucggcgggguguccgugaucacgccgggcaccaacaccagcaaccaggucgccgugcuguaccagggcgugaacugcaccgagguccccguggccauccacgccgaccagcugacgcccaccuggcggguguacuccaccggcagcaacgucuuccagacccgcgccgggugccucaucggcgcggagcacgugaacaacuccuacgagugcgacauccccaucggggccggcaucugcgccagcuaccagacgcagaccaacuccccgcggcgcgcccggagcguggcgucccagagcaucaucgccuacaccaugucccugggcgccgagaacagcgucgccuacuccaacaacagcaucgccauccccaccaacuucacgaucuccgugaccaccgagauccugcccgugagcaugaccaagacgagcgucgacugcaccauguacaucugcggggacuccaccgagugcagcaaccuccugcugcaguacggcuccuucugcacccagcucaaccgcgcgcugacggggaucgccguggagcaggacaagaacacccaggagguguucgcccaggucaagcagaucuacaagacgcccccgaucaaggacuucggcggguucaacuucagccagauccugcccgaccccuccaagcccagcaagcgguccuucaucgaggaccuccuguucaacaaggugacccuggccgacgccggcuucaucaagcaguacggcgacugccucggggacaucgcggcccgcgaccugaucugcgcccagaaguucaacggccugaccgugcucccgccccugcugaccgacgagaugaucgcccaguacaccagcgcccuccuggcggggaccaucacguccggcuggaccuucggggccggcgccgcccugcagauccccuucgcgaugcagauggccuaccgguucaacggcaucggggucacccagaacgugcucuacgagaaccagaagcugaucgccaaccaguucaacagcgccaucggcaagauccaggacucccugagcuccaccgccagcgcgcucgggaagcugcaggacguggucaaccagaacgcccaggcccugaacacgcucgugaagcagcuguccagcaacuucggcgccaucuccagcgugcugaacgacauccucucccgccuggacaaggucgaggccgaggugcagaucgaccggcugaucaccgggcgccuccagagccugcagaccuacgugacccagcagcugauccgggcggccgagauccgcgccagcgccaaccucgccgcgaccaagauguccgagugcguccugggccagagcaagcggguggacuucugcggcaagggguaccaccugauguccuucccccagagcgccccgcacggcguggucuuccuccacgugacguacguccccgcccaggagaagaacuucaccaccgcccccgcgaucugccacgacgggaaggcccacuucccccgcgagggcguguucguguccaacgggacccacugguucgucacgcagcggaacuucuacgagccgcagaucaucaccaccgacaacaccuucgugagcggcaacugcgacguggucaucggcaucgugaacaacacgguguacgacccccugcagcccgagcuggacuccuucaaggaggagcucgacaaguacuucaagaaccacaccagccccgacgucgaccugggggacaucuccggcaucaacgccagcguggugaacauccagaaggagaucgaccgccugaacgaggucgccaagaaccucaacgagucccugaucgaccugcaggagcucgggaaguacgagcaguacaucaaguggccgugguacaucuggcugggcuucaucgccggccugaucgcgaucgugauggugaccaucaugcucugcugcaugaccagcugcugcuccugccugaaggggugcugcagcugcggcuccugcugcaaguucgacgaggacgacagcgagcccguccugaagggggugaagcuccacuacacgugaugacucgagcugguacugcaugcacgcaaugcuagcugccccuuucccguccuggguaccccgagucucccccgaccucgggucccagguaugcucccaccuccaccugccccacucaccaccucugcuaguuccagacaccucccaagcacgcagcaaugcagcucaaaacgcuuagccuagccacacccccacgggaaacagcagugauuaaccuuuagcaauaaacgaaaguuuaacuaagcuauacuaaccccaggguuggucaauuucgugccagccacacccuggagcuagcaaaaaaaaaaaaaaaaaaaaaaaaaaaaaagcauaugacuaaaaaaaaaaaaaaaaaaaaaaaaaaaaaaaaaaaaaaaaaaaaaaaaaaaaaaaaaaaaaaaaaaaaaa

SEQ ID NO: 26717 - RNA, 4283 nt, Artificial Sequence
  SARS-CoV-2/Wuhan/WIV05/2019__EPI_ISL_402128 spike protein mRNA gc (1-1273)(D614G_I692V)
agaauaaacuaguauucuucugguccccacagacucagagagaacccgccaccauguucguguuccugguccuccugccccuggugagcucccagugcgugaaccucaccacccgcacgcagcugccgcccgccuacaccaacagcuucacccggggcgucuacuaccccgacaagguguuccgcuccagcgugcugcacuccacccaggaccucuuccugcccuucuucagcaacgucacgugguuccacgccauccacguguccgggaccaacggcaccaagcgguucgacaacccggugcugcccuucaacgacggggucuacuucgcgagcaccgagaaguccaacaucauccgcggcuggaucuucgggacgacccucgacagcaagacccagucccugcugaucgugaacaacgccaccaacguggucaucaaggugugcgaguuccaguucugcaacgaccccuuccucggcguguacuaccacaagaacaacaagagcuggauggaguccgaguuccgggucuacagcuccgccaacaacugcacguucgaguacgugagccagcccuuccugauggaccuggagggcaagcaggggaacuucaagaaccuccgcgaguucguguucaagaacaucgacggcuacuucaagaucuacuccaagcacaccccgaucaaccugguccgggaccugccccagggguucagcgcccucgagccccugguggaccugcccaucggcaucaacaucacccgcuuccagacccuccuggcccugcaccgguccuaccucacgccgggggacagcagcuccggcuggaccgcgggcgccgccgccuacuacgugggguaccugcagccccgcaccuuccugcucaaguacaacgagaacggcaccaucacggacgcggucgacugcgcccuggacccccugagcgagaccaagugcacccucaaguccuucaccguggagaaggggaucuaccagacgagcaacuuccgggugcagcccaccgaguccaucguccgcuucccgaacaucaccaaccugugccccuucggcgagguguucaacgccacccgguucgccagcgucuacgccuggaaccgcaagcggaucuccaacugcguggcggacuacagcgugcuguacaacuccgccagcuucuccacguucaagugcuacggcgucagccccaccaagcucaacgaccugugcuucaccaacguguacgccgacuccuucgugauccgcggggacgagguccggcagaucgcccccggccagaccgggaagaucgccgacuacaacuacaagcugccggacgacuucacgggcugcgugaucgcguggaacagcaacaaccucgacuccaaggucgggggcaacuacaacuaccuguaccgccuguuccgcaagagcaaccucaagcccuucgagcgggacaucuccaccgagaucuaccaggccggcagcacccccugcaacgggguggagggcuucaacugcuacuucccccugcaguccuacggguuccagccgaccaacggcgugggguaccagcccuaccggguggucgugcugagcuucgagcuccugcacgcccccgccacggugugcggccccaagaaguccaccaaccuggucaagaacaagugcgugaacuucaacuucaacggccucaccgggaccggcgugcugaccgagagcaacaagaaguuccugccguuccagcaguucgggcgcgacaucgccgacacgaccgacgcgguccgcgacccccagacccuggagauccucgacaucacccccugcagcuucggcgggguguccgugaucacgccgggcaccaacaccagcaaccaggucgccgugcuguaccagggcgugaacugcaccgagguccccguggccauccacgccgaccagcugacgcccaccuggcggguguacuccaccggcagcaacgucuuccagacccgcgccgggugccucaucggcgcggagcacgugaacaacuccuacgagugcgacauccccaucggggccggcaucugcgccagcuaccagacgcagaccaacuccccgcggcgcgcccggagcguggcgucccagagcgucaucgccuacaccaugucccugggcgccgagaacagcgucgccuacuccaacaacagcaucgccauccccaccaacuucacgaucuccgugaccaccgagauccugcccgugagcaugaccaagacgagcgucgacugcaccauguacaucugcggggacuccaccgagugcagcaaccuccugcugcaguacggcuccuucugcacccagcucaaccgcgcgcugacggggaucgccguggagcaggacaagaacacccaggagguguucgcccaggucaagcagaucuacaagacgcccccgaucaaggacuucggcggguucaacuucagccagauccugcccgaccccuccaagcccagcaagcgguccuucaucgaggaccuccuguucaacaaggugacccuggccgacgccggcuucaucaagcaguacggcgacugccucggggacaucgcggcccgcgaccugaucugcgcccagaaguucaacggccugaccgugcucccgccccugcugaccgacgagaugaucgcccaguacaccagcgcccuccuggcggggaccaucacguccggcuggaccuucggggccggcgccgcccugcagauccccuucgcgaugcagauggccuaccgguucaacggcaucggggucacccagaacgugcucuacgagaaccagaagcugaucgccaaccaguucaacagcgccaucggcaagauccaggacucccugagcuccaccgccagcgcgcucgggaagcugcaggacguggucaaccagaacgcccaggcccugaacacgcucgugaagcagcuguccagcaacuucggcgccaucuccagcgugcugaacgacauccucucccgccuggacaaggucgaggccgaggugcagaucgaccggcugaucaccgggcgccuccagagccugcagaccuacgugacccagcagcugauccgggcggccgagauccgcgccagcgccaaccucgccgcgaccaagauguccgagugcguccugggccagagcaagcggguggacuucugcggcaagggguaccaccugauguccuucccccagagcgccccgcacggcguggucuuccuccacgugacguacguccccgcccaggagaagaacuucaccaccgcccccgcgaucugccacgacgggaaggcccacuucccccgcgagggcguguucguguccaacgggacccacugguucgucacgcagcggaacuucuacgagccgcagaucaucaccaccgacaacaccuucgugagcggcaacugcgacguggucaucggcaucgugaacaacacgguguacgacccccugcagcccgagcuggacuccuucaaggaggagcucgacaaguacuucaagaaccacaccagccccgacgucgaccugggggacaucuccggcaucaacgccagcguggugaacauccagaaggagaucgaccgccugaacgaggucgccaagaaccucaacgagucccugaucgaccugcaggagcucgggaaguacgagcaguacaucaaguggccgugguacaucuggcugggcuucaucgccggccugaucgcgaucgugauggugaccaucaugcucugcugcaugaccagcugcugcuccugccugaaggggugcugcagcugcggcuccugcugcaaguucgacgaggacgacagcgagcccguccugaagggggugaagcuccacuacacgugaugacucgagcugguacugcaugcacgcaaugcuagcugccccuuucccguccuggguaccccgagucucccccgaccucgggucccagguaugcucccaccuccaccugccccacucaccaccucugcuaguuccagacaccucccaagcacgcagcaaugcagcucaaaacgcuuagccuagccacacccccacgggaaacagcagugauuaaccuuuagcaauaaacgaaaguuuaacuaagcuauacuaaccccaggguuggucaauuucgugccagccacacccuggagcuagcaaaaaaaaaaaaaaaaaaaaaaaaaaaaaagcauaugacuaaaaaaaaaaaaaaaaaaaaaaaaaaaaaaaaaaaaaaaaaaaaaaaaaaaaaaaaaaaaaaaaaaaaaa

SEQ ID NO: 26718 - RNA, 4283 nt, Artificial Sequence
  SARS-CoV-2/Wuhan/WIV05/2019__EPI_ISL_402128 spike protein mRNA gc (1-1273)(D614G_M1229I)
agaauaaacuaguauucuucugguccccacagacucagagagaacccgccaccauguucguguuccugguccuccugccccuggugagcucccagugcgugaaccucaccacccgcacgcagcugccgcccgccuacaccaacagcuucacccggggcgucuacuaccccgacaagguguuccgcuccagcgugcugcacuccacccaggaccucuuccugcccuucuucagcaacgucacgugguuccacgccauccacguguccgggaccaacggcaccaagcgguucgacaacccggugcugcccuucaacgacggggucuacuucgcgagcaccgagaaguccaacaucauccgcggcuggaucuucgggacgacccucgacagcaagacccagucccugcugaucgugaacaacgccaccaacguggucaucaaggugugcgaguuccaguucugcaacgaccccuuccucggcguguacuaccacaagaacaacaagagcuggauggaguccgaguuccgggucuacagcuccgccaacaacugcacguucgaguacgugagccagcccuuccugauggaccuggagggcaagcaggggaacuucaagaaccuccgcgaguucguguucaagaacaucgacggcuacuucaagaucuacuccaagcacaccccgaucaaccugguccgggaccugccccagggguucagcgcccucgagccccugguggaccugcccaucggcaucaacaucacccgcuuccagacccuccuggcccugcaccgguccuaccucacgccgggggacagcagcuccggcuggaccgcgggcgccgccgccuacuacgugggguaccugcagccccgcaccuuccugcucaaguacaacgagaacggcaccaucacggacgcggucgacugcgcccuggacccccugagcgagaccaagugcacccucaaguccuucaccguggagaaggggaucuaccagacgagcaacuuccgggugcagcccaccgaguccaucguccgcuucccgaacaucaccaaccugugccccuucggcgagguguucaacgccacccgguucgccagcgucuacgccuggaaccgcaagcggaucuccaacugcguggcggacuacagcgugcuguacaacuccgccagcuucuccacguucaagugcuacggcgucagccccaccaagcucaacgaccugugcuucaccaacguguacgccgacuccuucgugauccgcggggacgagguccggcagaucgcccccggccagaccgggaagaucgccgacuacaacuacaagcugccggacgacuucacgggcugcgugaucgcguggaacagcaacaaccucgacuccaaggucgggggcaacuacaacuaccuguaccgccuguuccgcaagagcaaccucaagcccuucgagcgggacaucuccaccgagaucuaccaggccggcagcacccccugcaacgggguggagggcuucaacugcuacuucccccugcaguccuacggguuccagccgaccaacggcgugggguaccagcccuaccggguggucgugcugagcuucgagcuccugcacgcccccgccacggugugcggccccaagaaguccaccaaccuggucaagaacaagugcgugaacuucaacuucaacggccucaccgggaccggcgugcugaccgagagcaacaagaaguuccugccguuccagcaguucgggcgcgacaucgccgacacgaccgacgcgguccgcgacccccagacccuggagauccucgacaucacccccugcagcuucggcgggguguccgugaucacgccgggcaccaacaccagcaaccaggucgccgugcuguaccagggcgugaacugcaccgagguccccguggccauccacgccgaccagcugacgcccaccuggcggguguacuccaccggcagcaacgucuuccagacccgcgccgggugccucaucggcgcggagcacgugaacaacuccuacgagugcgacauccccaucggggccggcaucugcgccagcuaccagacgcagaccaacuccccgcggcgcgcccggagcguggcgucccagagcaucaucgccuacaccaugucccugggcgccgagaacagcgucgccuacuccaacaacagcaucgccauccccaccaacuucacgaucuccgugaccaccgagauccugcccgugagcaugaccaagacgagcgucgacugcaccauguacaucugcggggacuccaccgagugcagcaaccuccugcugcaguacggcuccuucugcacccagcucaaccgcgcgcugacggggaucgccguggagcaggacaagaacacccaggagguguucgcccaggucaagcagaucuacaagacgcccccgaucaaggacuucggcggguucaacuucagccagauccugcccgaccccuccaagcccagcaagcgguccuucaucgaggaccuccuguucaacaaggugacccuggccgacgccggcuucaucaagcaguacggcgacugccucggggacaucgcggcccgcgaccugaucugcgcccagaaguucaacggccugaccgugcucccgccccugcugaccgacgagaugaucgcccaguacaccagcgcccuccuggcggggaccaucacguccggcuggaccuucggggccggcgccgcccugcagauccccuucgcgaugcagauggccuaccgguucaacggcaucggggucacccagaacgugcucuacgagaaccagaagcugaucgccaaccaguucaacagcgccaucggcaagauccaggacucccugagcuccaccgccagcgcgcucgggaagcugcaggacguggucaaccagaacgcccaggcccugaacacgcucgugaagcagcuguccagcaacuucggcgccaucuccagcgugcugaacgacauccucucccgccuggacaaggucgaggccgaggugcagaucgaccggcugaucaccgggcgccuccagagccugcagaccuacgugacccagcagcugauccgggcggccgagauccgcgccagcgccaaccucgccgcgaccaagauguccgagugcguccugggccagagcaagcggguggacuucugcggcaagggguaccaccugauguccuucccccagagcgccccgcacggcguggucuuccuccacgugacguacguccccgcccaggagaagaacuucaccaccgcccccgcgaucugccacgacgggaaggcccacuucccccgcgagggcguguucguguccaacgggacccacugguucgucacgcagcggaacuucuacgagccgcagaucaucaccaccgacaacaccuucgugagcggcaacugcgacguggucaucggcaucgugaacaacacgguguacgacccccugcagcccgagcuggacuccuucaaggaggagcucgacaaguacuucaagaaccacaccagccccgacgucgaccugggggacaucuccggcaucaacgccagcguggugaacauccagaaggagaucgaccgccugaacgaggucgccaagaaccucaacgagucccugaucgaccugcaggagcucgggaaguacgagcaguacaucaaguggccgugguacaucuggcugggcuucaucgccggccugaucgcgaucgugaucgugaccaucaugcucugcugcaugaccagcugcugcuccugccugaaggggugcugcagcugcggcuccugcugcaaguucgacgaggacgacagcgagcccguccugaagggggugaagcuccacuacacgugaugacucgagcugguacugcaugcacgcaaugcuagcugccccuuucccguccuggguaccccgagucucccccgaccucgggucccagguaugcucccaccuccaccugccccacucaccaccucugcuaguuccagacaccucccaagcacgcagcaaugcagcucaaaacgcuuagccuagccacacccccacgggaaacagcagugauuaaccuuuagcaauaaacgaaaguuuaacuaagcuauacuaaccccaggguuggucaauuucgugccagccacacccuggagcuagcaaaaaaaaaaaaaaaaaaaaaaaaaaaaaagcauaugacuaaaaaaaaaaaaaaaaaaaaaaaaaaaaaaaaaaaaaaaaaaaaaaaaaaaaaaaaaaaaaaaaaaaaaa

SEQ ID NO: 26719 - RNA, 4277 nt, Artificial Sequence
  SARS-CoV-2/Wuhan/WIV05/2019__EPI_ISL_402128 spike protein mRNA gc (1-1273)(H69del_V70del_A222V_Y453F_S477N_D614G_I692V)
agaauaaacuaguauucuucugguccccacagacucagagagaacccgccaccauguucguguuccugguccuccugccccuggugagcucccagugcgugaaccucaccacccgcacgcagcugccgcccgccuacaccaacagcuucacccggggcgucuacuaccccgacaagguguuccgcuccagcgugcugcacuccacccaggaccucuuccugcccuucuucagcaacgucacgugguuccacgccaucuccgggaccaacggcaccaagcgguucgacaacccggugcugcccuucaacgacggggucuacuucgcgagcaccgagaaguccaacaucauccgcggcuggaucuucgggacgacccucgacagcaagacccagucccugcugaucgugaacaacgccaccaacguggucaucaaggugugcgaguuccaguucugcaacgaccccuuccucggcguguacuaccacaagaacaacaagagcuggauggaguccgaguuccgggucuacagcuccgccaacaacugcacguucgaguacgugagccagcccuuccugauggaccuggagggcaagcaggggaacuucaagaaccuccgcgaguucguguucaagaacaucgacggcuacuucaagaucuacuccaagcacaccccgaucaaccugguccgggaccugccccagggguucagcguccucgagccccugguggaccugcccaucggcaucaacaucacccgcuuccagacccuccuggcccugcaccgguccuaccucacgccgggggacagcagcuccggcuggaccgcgggcgccgccgccuacuacgugggguaccugcagccccgcaccuuccugcucaaguacaacgagaacggcaccaucacggacgcggucgacugcgcccuggacccccugagcgagaccaagugcacccucaaguccuucaccguggagaaggggaucuaccagacgagcaacuuccgggugcagcccaccgaguccaucguccgcuucccgaacaucaccaaccugugccccuucggcgagguguucaacgccacccgguucgccagcgucuacgccuggaaccgcaagcggaucuccaacugcguggcggacuacagcgugcuguacaacuccgccagcuucuccacguucaagugcuacggcgucagccccaccaagcucaacgaccugugcuucaccaacguguacgccgacuccuucgugauccgcggggacgagguccggcagaucgcccccggccagaccgggaagaucgccgacuacaacuacaagcugccggacgacuucacgggcugcgugaucgcguggaacagcaacaaccucgacuccaaggucgggggcaacuacaacuaccuguuccgccuguuccgcaagagcaaccucaagcccuucgagcgggacaucuccaccgagaucuaccaggccggcaacacccccugcaacgggguggagggcuucaacugcuacuucccccugcaguccuacggguuccagccgaccaacggcgugggguaccagcccuaccggguggucgugcugagcuucgagcuccugcacgcccccgccacggugugcggccccaagaaguccaccaaccuggucaagaacaagugcgugaacuucaacuucaacggccucaccgggaccggcgugcugaccgagagcaacaagaaguuccugccguuccagcaguucgggcgcgacaucgccgacacgaccgacgcgguccgcgacccccagacccuggagauccucgacaucacccccugcagcuucggcgggguguccgugaucacgccgggcaccaacaccagcaaccaggucgccgugcuguaccagggcgugaacugcaccgagguccccguggccauccacgccgaccagcugacgcccaccuggcggguguacuccaccggcagcaacgucuuccagacccgcgccgggugccucaucggcgcggagcacgugaacaacuccuacgagugcgacauccccaucggggccggcaucugcgccagcuaccagacgcagaccaacuccccgcggcgcgcccggagcguggcgucccagagcgucaucgccuacaccaugucccugggcgccgagaacagcgucgccuacuccaacaacagcaucgccauccccaccaacuucacgaucuccgugaccaccgagauccugcccgugagcaugaccaagacgagcgucgacugcaccauguacaucugcggggacuccaccgagugcagcaaccuccugcugcaguacggcuccuucugcacccagcucaaccgcgcgcugacggggaucgccguggagcaggacaagaacacccaggagguguucgcccaggucaagcagaucuacaagacgcccccgaucaaggacuucggcggguucaacuucagccagauccugcccgaccccuccaagcccagcaagcgguccuucaucgaggaccuccuguucaacaaggugacccuggccgacgccggcuucaucaagcaguacggcgacugccucggggacaucgcggcccgcgaccugaucugcgcccagaaguucaacggccugaccgugcucccgccccugcugaccgacgagaugaucgcccaguacaccagcgcccuccuggcggggaccaucacguccggcuggaccuucggggccggcgccgcccugcagauccccuucgcgaugcagauggccuaccgguucaacggcaucggggucacccagaacgugcucuacgagaaccagaagcugaucgccaaccaguucaacagcgccaucggcaagauccaggacucccugagcuccaccgccagcgcgcucgggaagcugcaggacguggucaaccagaacgcccaggcccugaacacgcucgugaagcagcuguccagcaacuucggcgccaucuccagcgugcugaacgacauccucucccgccuggacaaggucgaggccgaggugcagaucgaccggcugaucaccgggcgccuccagagccugcagaccuacgugacccagcagcugauccgggcggccgagauccgcgccagcgccaaccucgccgcgaccaagauguccgagugcguccugggccagagcaagcggguggacuucugcggcaagggguaccaccugauguccuucccccagagcgccccgcacggcguggucuuccuccacgugacguacguccccgcccaggagaagaacuucaccaccgcccccgcgaucugccacgacgggaaggcccacuucccccgcgagggcguguucguguccaacgggacccacugguucgucacgcagcggaacuucuacgagccgcagaucaucaccaccgacaacaccuucgugagcggcaacugcgacguggucaucggcaucgugaacaacacgguguacgacccccugcagcccgagcuggacuccuucaaggaggagcucgacaaguacuucaagaaccacaccagccccgacgucgaccugggggacaucuccggcaucaacgccagcguggugaacauccagaaggagaucgaccgccugaacgaggucgccaagaaccucaacgagucccugaucgaccugcaggagcucgggaaguacgagcaguacaucaaguggccgugguacaucuggcugggcuucaucgccggccugaucgcgaucgugauggugaccaucaugcucugcugcaugaccagcugcugcuccugccugaaggggugcugcagcugcggcuccugcugcaaguucgacgaggacgacagcgagcccguccugaagggggugaagcuccacuacacgugaugacucgagcugguacugcaugcacgcaaugcuagcugccccuuucccguccuggguaccccgagucucccccgaccucgggucccagguaugcucccaccuccaccugccccacucaccaccucugcuaguuccagacaccucccaagcacgcagcaaugcagcucaaaacgcuuagccuagccacacccccacgggaaacagcagugauuaaccuuuagcaauaaacgaaaguuuaacuaagcuauacuaaccccaggguuggucaauuucgugccagccacacccuggagcuagcaaaaaaaaaaaaaaaaaaaaaaaaaaaaaagcauaugacuaaaaaaaaaaaaaaaaaaaaaaaaaaaaaaaaaaaaaaaaaaaaaaaaaaaaaaaaaaaaaaaaaaaaaa

SEQ ID NO: 26720 - RNA, 4277 nt, Artificial Sequence
  SARS-CoV-2/Wuhan/WIV05/2019__EPI_ISL_402128 spike protein mRNA gc (1-1273)(H69del_V70del_Y453F_D614G_I692V_M1229I)
agaauaaacuaguauucuucugguccccacagacucagagagaacccgccaccauguucguguuccugguccuccugccccuggugagcucccagugcgugaaccucaccacccgcacgcagcugccgcccgccuacaccaacagcuucacccggggcgucuacuaccccgacaagguguuccgcuccagcgugcugcacuccacccaggaccucuuccugcccuucuucagcaacgucacgugguuccacgccaucuccgggaccaacggcaccaagcgguucgacaacccggugcugcccuucaacgacggggucuacuucgcgagcaccgagaaguccaacaucauccgcggcuggaucuucgggacgacccucgacagcaagacccagucccugcugaucgugaacaacgccaccaacguggucaucaaggugugcgaguuccaguucugcaacgaccccuuccucggcguguacuaccacaagaacaacaagagcuggauggaguccgaguuccgggucuacagcuccgccaacaacugcacguucgaguacgugagccagcccuuccugauggaccuggagggcaagcaggggaacuucaagaaccuccgcgaguucguguucaagaacaucgacggcuacuucaagaucuacuccaagcacaccccgaucaaccugguccgggaccugccccagggguucagcgcccucgagccccugguggaccugcccaucggcaucaacaucacccgcuuccagacccuccuggcccugcaccgguccuaccucacgccgggggacagcagcuccggcuggaccgcgggcgccgccgccuacuacgugggguaccugcagccccgcaccuuccugcucaaguacaacgagaacggcaccaucacggacgcggucgacugcgcccuggacccccugagcgagaccaagugcacccucaaguccuucaccguggagaaggggaucuaccagacgagcaacuuccgggugcagcccaccgaguccaucguccgcuucccgaacaucaccaaccugugccccuucggcgagguguucaacgccacccgguucgccagcgucuacgccuggaaccgcaagcggaucuccaacugcguggcggacuacagcgugcuguacaacuccgccagcuucuccacguucaagugcuacggcgucagccccaccaagcucaacgaccugugcuucaccaacguguacgccgacuccuucgugauccgcggggacgagguccggcagaucgcccccggccagaccgggaagaucgccgacuacaacuacaagcugccggacgacuucacgggcugcgugaucgcguggaacagcaacaaccucgacuccaaggucgggggcaacuacaacuaccuguuccgccuguuccgcaagagcaaccucaagcccuucgagcgggacaucuccaccgagaucuaccaggccggcagcacccccugcaacgggguggagggcuucaacugcuacuucccccugcaguccuacggguuccagccgaccaacggcgugggguaccagcccuaccggguggucgugcugagcuucgagcuccugcacgcccccgccacggugugcggccccaagaaguccaccaaccuggucaagaacaagugcgugaacuucaacuucaacggccucaccgggaccggcgugcugaccgagagcaacaagaaguuccugccguuccagcaguucgggcgcgacaucgccgacacgaccgacgcgguccgcgacccccagacccuggagauccucgacaucacccccugcagcuucggcgggguguccgugaucacgccgggcaccaacaccagcaaccaggucgccgugcuguaccagggcgugaacugcaccgagguccccguggccauccacgccgaccagcugacgcccaccuggcggguguacuccaccggcagcaacgucuuccagacccgcgccgggugccucaucggcgcggagcacgugaacaacuccuacgagugcgacauccccaucggggccggcaucugcgccagcuaccagacgcagaccaacuccccgcggcgcgcccggagcguggcgucccagagcgugaucgccuacaccaugucccugggcgccgagaacagcgucgccuacuccaacaacagcaucgccauccccaccaacuucacgaucuccgugaccaccgagauccugcccgugagcaugaccaagacgagcgucgacugcaccauguacaucugcggggacuccaccgagugcagcaaccuccugcugcaguacggcuccuucugcacccagcucaaccgcgcgcugacggggaucgccguggagcaggacaagaacacccaggagguguucgcccaggucaagcagaucuacaagacgcccccgaucaaggacuucggcggguucaacuucagccagauccugcccgaccccuccaagcccagcaagcgguccuucaucgaggaccuccuguucaacaaggugacccuggccgacgccggcuucaucaagcaguacggcgacugccucggggacaucgcggcccgcgaccugaucugcgcccagaaguucaacggccugaccgugcucccgccccugcugaccgacgagaugaucgcccaguacaccagcgcccuccuggcggggaccaucacguccggcuggaccuucggggccggcgccgcccugcagauccccuucgcgaugcagauggccuaccgguucaacggcaucggggucacccagaacgugcucuacgagaaccagaagcugaucgccaaccaguucaacagcgccaucggcaagauccaggacucccugagcuccaccgccagcgcgcucgggaagcugcaggacguggucaaccagaacgcccaggcccugaacacgcucgugaagcagcuguccagcaacuucggcgccaucuccagcgugcugaacgacauccucucccgccuggacaaggucgaggccgaggugcagaucgaccggcugaucaccgggcgccuccagagccugcagaccuacgugacccagcagcugauccgggcggccgagauccgcgccagcgccaaccucgccgcgaccaagauguccgagugcguccugggccagagcaagcggguggacuucugcggcaagggguaccaccugauguccuucccccagagcgccccgcacggcguggucuuccuccacgugacguacguccccgcccaggagaagaacuucaccaccgcccccgcgaucugccacgacgggaaggcccacuucccccgcgagggcguguucguguccaacgggacccacugguucgucacgcagcggaacuucuacgagccgcagaucaucaccaccgacaacaccuucgugagcggcaacugcgacguggucaucggcaucgugaacaacacgguguacgacccccugcagcccgagcuggacuccuucaaggaggagcucgacaaguacuucaagaaccacaccagccccgacgucgaccugggggacaucuccggcaucaacgccagcguggugaacauccagaaggagaucgaccgccugaacgaggucgccaagaaccucaacgagucccugaucgaccugcaggagcucgggaaguacgagcaguacaucaaguggccgugguacaucuggcugggcuucaucgccggccugaucgcgaucgugaucgugaccaucaugcucugcugcaugaccagcugcugcuccugccugaaggggugcugcagcugcggcuccugcugcaaguucgacgaggacgacagcgagcccguccugaagggggugaagcuccacuacacgugaugacucgagcugguacugcaugcacgcaaugcuagcugccccuuucccguccuggguaccccgagucucccccgaccucgggucccagguaugcucccaccuccaccugccccacucaccaccucugcuaguuccagacaccucccaagcacgcagcaaugcagcucaaaacgcuuagccuagccacacccccacgggaaacagcagugauuaaccuuuagcaauaaacgaaaguuuaacuaagcuauacuaaccccaggguuggucaauuucgugccagccacacccuggagcuagcaaaaaaaaaaaaaaaaaaaaaaaaaaaaaagcauaugacuaaaaaaaaaaaaaaaaaaaaaaaaaaaaaaaaaaaaaaaaaaaaaaaaaaaaaaaaaaaaaaaaaaaaaa

SEQ ID NO: 26721 - RNA, 4274 nt, Artificial Sequence
  SARS-CoV-2/Wuhan/WIV05/2019__EPI_ISL_402128 spike protein mRNA gc (1-1273)(H69del_V70del_Y144del_N501Y_A570D_D614G_P681H_T716I_S982 A_D1118H)
agaauaaacuaguauucuucugguccccacagacucagagagaacccgccaccauguucguguuccugguccuccugccccuggugagcucccagugcgugaaccucaccacccgcacgcagcugccgcccgccuacaccaacagcuucacccggggcgucuacuaccccgacaagguguuccgcuccagcgugcugcacuccacccaggaccucuuccugcccuucuucagcaacgucacgugguuccacgccaucuccgggaccaacggcaccaagcgguucgacaacccggugcugcccuucaacgacggggucuacuucgcgagcaccgagaaguccaacaucauccgcggcuggaucuucgggacgacccucgacagcaagacccagucccugcugaucgugaacaacgccaccaacguggucaucaaggugugcgaguuccaguucugcaacgaccccuuccucggcguguaccacaagaacaacaagagcuggauggaguccgaguuccgggucuacagcuccgccaacaacugcacguucgaguacgugagccagcccuuccugauggaccuggagggcaagcaggggaacuucaagaaccuccgcgaguucguguucaagaacaucgacggcuacuucaagaucuacuccaagcacaccccgaucaaccugguccgggaccugccccagggguucagcgcccucgagccccugguggaccugcccaucggcaucaacaucacccgcuuccagacccuccuggcccugcaccgguccuaccucacgccgggggacagcagcuccggcuggaccgcgggcgccgccgccuacuacgugggguaccugcagccccgcaccuuccugcucaaguacaacgagaacggcaccaucacggacgcggucgacugcgcccuggacccccugagcgagaccaagugcacccucaaguccuucaccguggagaaggggaucuaccagacgagcaacuuccgggugcagcccaccgaguccaucguccgcuucccgaacaucaccaaccugugccccuucggcgagguguucaacgccacccgguucgccagcgucuacgccuggaaccgcaagcggaucuccaacugcguggcggacuacagcgugcuguacaacuccgccagcuucuccacguucaagugcuacggcgucagccccaccaagcucaacgaccugugcuucaccaacguguacgccgacuccuucgugauccgcggggacgagguccggcagaucgcccccggccagaccgggaagaucgccgacuacaacuacaagcugccggacgacuucacgggcugcgugaucgcguggaacagcaacaaccucgacuccaaggucgggggcaacuacaacuaccuguaccgccuguuccgcaagagcaaccucaagcccuucgagcgggacaucuccaccgagaucuaccaggccggcagcacccccugcaacgggguggagggcuucaacugcuacuucccccugcaguccuacggguuccagccgaccuacggcgugggguaccagcccuaccggguggucgugcugagcuucgagcuccugcacgcccccgccacggugugcggccccaagaaguccaccaaccuggucaagaacaagugcgugaacuucaacuucaacggccucaccgggaccggcgugcugaccgagagcaacaagaaguuccugccguuccagcaguucgggcgcgacaucgacgacacgaccgacgcgguccgcgacccccagacccuggagauccucgacaucacccccugcagcuucggcgggguguccgugaucacgccgggcaccaacaccagcaaccaggucgccgugcuguaccagggcgugaacugcaccgagguccccguggccauccacgccgaccagcugacgcccaccuggcggguguacuccaccggcagcaacgucuuccagacccgcgccgggugccucaucggcgcggagcacgugaacaacuccuacgagugcgacauccccaucggggccggcaucugcgccagcuaccagacgcagaccaacucccaccggcgcgcccggagcguggcgucccagagcaucaucgccuacaccaugucccugggcgccgagaacagcgucgccuacuccaacaacagcaucgccauccccaucaacuucacgaucuccgugaccaccgagauccugcccgugagcaugaccaagacgagcgucgacugcaccauguacaucugcggggacuccaccgagugcagcaaccuccugcugcaguacggcuccuucugcacccagcucaaccgcgcgcugacggggaucgccguggagcaggacaagaacacccaggagguguucgcccaggucaagcagaucuacaagacgcccccgaucaaggacuucggcggguucaacuucagccagauccugcccgaccccuccaagcccagcaagcgguccuucaucgaggaccuccuguucaacaaggugacccuggccgacgccggcuucaucaagcaguacggcgacugccucggggacaucgcggcccgcgaccugaucugcgcccagaaguucaacggccugaccgugcucccgccccugcugaccgacgagaugaucgcccaguacaccagcgcccuccuggcggggaccaucacguccggcuggaccuucggggccggcgccgcccugcagauccccuucgcgaugcagauggccuaccgguucaacggcaucggggucacccagaacgugcucuacgagaaccagaagcugaucgccaaccaguucaacagcgccaucggcaagauccaggacucccugagcuccaccgccagcgcgcucgggaagcugcaggacguggucaaccagaacgcccaggcccugaacacgcucgugaagcagcuguccagcaacuucggcgccaucuccagcgugcugaacgacauccucgcccgccuggacaaggucgaggccgaggugcagaucgaccggcugaucaccgggcgccuccagagccugcagaccuacgugacccagcagcugauccgggcggccgagauccgcgccagcgccaaccucgccgcgaccaagauguccgagugcguccugggccagagcaagcggguggacuucugcggcaagggguaccaccugauguccuucccccagagcgccccgcacggcguggucuuccuccacgugacguacguccccgcccaggagaagaacuucaccaccgcccccgcgaucugccacgacgggaaggcccacuucccccgcgagggcguguucguguccaacgggacccacugguucgucacgcagcggaacuucuacgagccgcagaucaucaccacccacaacaccuucgugagcggcaacugcgacguggucaucggcaucgugaacaacacgguguacgacccccugcagcccgagcuggacuccuucaaggaggagcucgacaaguacuucaagaaccacaccagccccgacgucgaccugggggacaucuccggcaucaacgccagcguggugaacauccagaaggagaucgaccgccugaacgaggucgccaagaaccucaacgagucccugaucgaccugcaggagcucgggaaguacgagcaguacaucaaguggccgugguacaucuggcugggcuucaucgccggccugaucgcgaucgugauggugaccaucaugcucugcugcaugaccagcugcugcuccugccugaaggggugcugcagcugcggcuccugcugcaaguucgacgaggacgacagcgagcccguccugaagggggugaagcuccacuacacgugaugacucgagcugguacugcaugcacgcaaugcuagcugccccuuucccguccuggguaccccgagucucccccgaccucgggucccagguaugcucccaccuccaccugccccacucaccaccucugcuaguuccagacaccucccaagcacgcagcaaugcagcucaaaacgcuuagccuagccacacccccacgggaaacagcagugauuaaccuuuagcaauaaacgaaaguuuaacuaagcuauacuaaccccaggguuggucaauuucgugccagccacacccuggagcuagcaaaaaaaaaaaaaaaaaaaaaaaaaaaaaagcauaugacuaaaaaaaaaaaaaaaaaaaaaaaaaaaaaaaaaaaaaaaaaaaaaaaaaaaaaaaaaaaaaaaaaaaaaa

SEQ ID NO: 26722 - RNA, 4283 nt, Artificial Sequence
  SARS-CoV-2/Wuhan/WIV05/2019__EPI_ISL_402128 spike protein mRNA gc (1-1273)(K417N_E484K_N501Y_D614G)
agaauaaacuaguauucuucugguccccacagacucagagagaacccgccaccauguucguguuccugguccuccugccccuggugagcucccagugcgugaaccucaccacccgcacgcagcugccgcccgccuacaccaacagcuucacccggggcgucuacuaccccgacaagguguuccgcuccagcgugcugcacuccacccaggaccucuuccugcccuucuucagcaacgucacgugguuccacgccauccacguguccgggaccaacggcaccaagcgguucgacaacccggugcugcccuucaacgacggggucuacuucgcgagcaccgagaaguccaacaucauccgcggcuggaucuucgggacgacccucgacagcaagacccagucccugcugaucgugaacaacgccaccaacguggucaucaaggugugcgaguuccaguucugcaacgaccccuuccucggcguguacuaccacaagaacaacaagagcuggauggaguccgaguuccgggucuacagcuccgccaacaacugcacguucgaguacgugagccagcccuuccugauggaccuggagggcaagcaggggaacuucaagaaccuccgcgaguucguguucaagaacaucgacggcuacuucaagaucuacuccaagcacaccccgaucaaccugguccgggaccugccccagggguucagcgcccucgagccccugguggaccugcccaucggcaucaacaucacccgcuuccagacccuccuggcccugcaccgguccuaccucacgccgggggacagcagcuccggcuggaccgcgggcgccgccgccuacuacgugggguaccugcagccccgcaccuuccugcucaaguacaacgagaacggcaccaucacggacgcggucgacugcgcccuggacccccugagcgagaccaagugcacccucaaguccuucaccguggagaaggggaucuaccagacgagcaacuuccgggugcagcccaccgaguccaucguccgcuucccgaacaucaccaaccugugccccuucggcgagguguucaacgccacccgguucgccagcgucuacgccuggaaccgcaagcggaucuccaacugcguggcggacuacagcgugcuguacaacuccgccagcuucuccacguucaagugcuacggcgucagccccaccaagcucaacgaccugugcuucaccaacguguacgccgacuccuucgugauccgcggggacgagguccggcagaucgcccccggccagaccgggaacaucgccgacuacaacuacaagcugccggacgacuucacgggcugcgugaucgcguggaacagcaacaaccucgacuccaaggucgggggcaacuacaacuaccuguaccgccuguuccgcaagagcaaccucaagcccuucgagcgggacaucuccaccgagaucuaccaggccggcagcacccccugcaacggggugaagggcuucaacugcuacuucccccugcaguccuacggguuccagccgaccuacggcgugggguaccagcccuaccggguggucgugcugagcuucgagcuccugcacgcccccgccacggugugcggccccaagaaguccaccaaccuggucaagaacaagugcgugaacuucaacuucaacggccucaccgggaccggcgugcugaccgagagcaacaagaaguuccugccguuccagcaguucgggcgcgacaucgccgacacgaccgacgcgguccgcgacccccagacccuggagauccucgacaucacccccugcagcuucggcgggguguccgugaucacgccgggcaccaacaccagcaaccaggucgccgugcuguaccagggcgugaacugcaccgagguccccguggccauccacgccgaccagcugacgcccaccuggcggguguacuccaccggcagcaacgucuuccagacccgcgccgggugccucaucggcgcggagcacgugaacaacuccuacgagugcgacauccccaucggggccggcaucugcgccagcuaccagacgcagaccaacuccccgcggcgcgcccggagcguggcgucccagagcaucaucgccuacaccaugucccugggcgccgagaacagcgucgccuacuccaacaacagcaucgccauccccaccaacuucacgaucuccgugaccaccgagauccugcccgugagcaugaccaagacgagcgucgacugcaccauguacaucugcggggacuccaccgagugcagcaaccuccugcugcaguacggcuccuucugcacccagcucaaccgcgcgcugacggggaucgccguggagcaggacaagaacacccaggagguguucgcccaggucaagcagaucuacaagacgcccccgaucaaggacuucggcggguucaacuucagccagauccugcccgaccccuccaagcccagcaagcgguccuucaucgaggaccuccuguucaacaaggugacccuggccgacgccggcuucaucaagcaguacggcgacugccucggggacaucgcggcccgcgaccugaucugcgcccagaaguucaacggccugaccgugcucccgccccugcugaccgacgagaugaucgcccaguacaccagcgcccuccuggcggggaccaucacguccggcuggaccuucggggccggcgccgcccugcagauccccuucgcgaugcagauggccuaccgguucaacggcaucggggucacccagaacgugcucuacgagaaccagaagcugaucgccaaccaguucaacagcgccaucggcaagauccaggacucccugagcuccaccgccagcgcgcucgggaagcugcaggacguggucaaccagaacgcccaggcccugaacacgcucgugaagcagcuguccagcaacuucggcgccaucuccagcgugcugaacgacauccucucccgccuggacaaggucgaggccgaggugcagaucgaccggcugaucaccgggcgccuccagagccugcagaccuacgugacccagcagcugauccgggcggccgagauccgcgccagcgccaaccucgccgcgaccaagauguccgagugcguccugggccagagcaagcggguggacuucugcggcaagggguaccaccugauguccuucccccagagcgccccgcacggcguggucuuccuccacgugacguacguccccgcccaggagaagaacuucaccaccgcccccgcgaucugccacgacgggaaggcccacuucccccgcgagggcguguucguguccaacgggacccacugguucgucacgcagcggaacuucuacgagccgcagaucaucaccaccgacaacaccuucgugagcggcaacugcgacguggucaucggcaucgugaacaacacgguguacgacccccugcagcccgagcuggacuccuucaaggaggagcucgacaaguacuucaagaaccacaccagccccgacgucgaccugggggacaucuccggcaucaacgccagcguggugaacauccagaaggagaucgaccgccugaacgaggucgccaagaaccucaacgagucccugaucgaccugcaggagcucgggaaguacgagcaguacaucaaguggccgugguacaucuggcugggcuucaucgccggccugaucgcgaucgugauggugaccaucaugcucugcugcaugaccagcugcugcuccugccugaaggggugcugcagcugcggcuccugcugcaaguucgacgaggacgacagcgagcccguccugaagggggugaagcuccacuacacgugaugacucgagcugguacugcaugcacgcaaugcuagcugccccuuucccguccuggguaccccgagucucccccgaccucgggucccagguaugcucccaccuccaccugccccacucaccaccucugcuaguuccagacaccucccaagcacgcagcaaugcagcucaaaacgcuuagccuagccacacccccacgggaaacagcagugauuaaccuuuagcaauaaacgaaaguuuaacuaagcuauacuaaccccaggguuggucaauuucgugccagccacacccuggagcuagcaaaaaaaaaaaaaaaaaaaaaaaaaaaaaagcauaugacuaaaaaaaaaaaaaaaaaaaaaaaaaaaaaaaaaaaaaaaaaaaaaaaaaaaaaaaaaaaaaaaaaaaaaa

SEQ ID NO: 26723 - RNA, 4274 nt, Artificial Sequence
  SARS-CoV-2/Wuhan/WIV05/2019__EPI_ISL_402128 spike protein mRNA gc (1-1273)(L18F_D80A_D215G_L242del_A243del_L244del_R246I_K417N_E484 K_N501Y_D614G_A701V)
agaauaaacuaguauucuucugguccccacagacucagagagaacccgccaccauguucguguuccugguccuccugccccuggugagcucccagugcgugaacuucaccacccgcacgcagcugccgcccgccuacaccaacagcuucacccggggcgucuacuaccccgacaagguguuccgcuccagcgugcugcacuccacccaggaccucuuccugcccuucuucagcaacgucacgugguuccacgccauccacguguccgggaccaacggcaccaagcgguucgccaacccggugcugcccuucaacgacggggucuacuucgcgagcaccgagaaguccaacaucauccgcggcuggaucuucgggacgacccucgacagcaagacccagucccugcugaucgugaacaacgccaccaacguggucaucaaggugugcgaguuccaguucugcaacgaccccuuccucggcguguacuaccacaagaacaacaagagcuggauggaguccgaguuccgggucuacagcuccgccaacaacugcacguucgaguacgugagccagcccuuccugauggaccuggagggcaagcaggggaacuucaagaaccuccgcgaguucguguucaagaacaucgacggcuacuucaagaucuacuccaagcacaccccgaucaaccugguccggggccugccccagggguucagcgcccucgagccccugguggaccugcccaucggcaucaacaucacccgcuuccagacccuccacaucuccuaccucacgccgggggacagcagcuccggcuggaccgcgggcgccgccgccuacuacgugggguaccugcagccccgcaccuuccugcucaaguacaacgagaacggcaccaucacggacgcggucgacugcgcccuggacccccugagcgagaccaagugcacccucaaguccuucaccguggagaaggggaucuaccagacgagcaacuuccgggugcagcccaccgaguccaucguccgcuucccgaacaucaccaaccugugccccuucggcgagguguucaacgccacccgguucgccagcgucuacgccuggaaccgcaagcggaucuccaacugcguggcggacuacagcgugcuguacaacuccgccagcuucuccacguucaagugcuacggcgucagccccaccaagcucaacgaccugugcuucaccaacguguacgccgacuccuucgugauccgcggggacgagguccggcagaucgcccccggccagaccgggaacaucgccgacuacaacuacaagcugccggacgacuucacgggcugcgugaucgcguggaacagcaacaaccucgacuccaaggucgggggcaacuacaacuaccuguaccgccuguuccgcaagagcaaccucaagcccuucgagcgggacaucuccaccgagaucuaccaggccggcagcacccccugcaacggggugaagggcuucaacugcuacuucccccugcaguccuacggguuccagccgaccuacggcgugggguaccagcccuaccggguggucgugcugagcuucgagcuccugcacgcccccgccacggugugcggccccaagaaguccaccaaccuggucaagaacaagugcgugaacuucaacuucaacggccucaccgggaccggcgugcugaccgagagcaacaagaaguuccugccguuccagcaguucgggcgcgacaucgccgacacgaccgacgcgguccgcgacccccagacccuggagauccucgacaucacccccugcagcuucggcgggguguccgugaucacgccgggcaccaacaccagcaaccaggucgccgugcuguaccagggcgugaacugcaccgagguccccguggccauccacgccgaccagcugacgcccaccuggcggguguacuccaccggcagcaacgucuuccagacccgcgccgggugccucaucggcgcggagcacgugaacaacuccuacgagugcgacauccccaucggggccggcaucugcgccagcuaccagacgcagaccaacuccccgcggcgcgcccggagcguggcgucccagagcaucaucgccuacaccaugucccugggcguggagaacagcgucgccuacuccaacaacagcaucgccauccccaccaacuucacgaucuccgugaccaccgagauccugcccgugagcaugaccaagacgagcgucgacugcaccauguacaucugcggggacuccaccgagugcagcaaccuccugcugcaguacggcuccuucugcacccagcucaaccgcgcgcugacggggaucgccguggagcaggacaagaacacccaggagguguucgcccaggucaagcagaucuacaagacgcccccgaucaaggacuucggcggguucaacuucagccagauccugcccgaccccuccaagcccagcaagcgguccuucaucgaggaccuccuguucaacaaggugacccuggccgacgccggcuucaucaagcaguacggcgacugccucggggacaucgcggcccgcgaccugaucugcgcccagaaguucaacggccugaccgugcucccgccccugcugaccgacgagaugaucgcccaguacaccagcgcccuccuggcggggaccaucacguccggcuggaccuucggggccggcgccgcccugcagauccccuucgcgaugcagauggccuaccgguucaacggcaucggggucacccagaacgugcucuacgagaaccagaagcugaucgccaaccaguucaacagcgccaucggcaagauccaggacucccugagcuccaccgccagcgcgcucgggaagcugcaggacguggucaaccagaacgcccaggcccugaacacgcucgugaagcagcuguccagcaacuucggcgccaucuccagcgugcugaacgacauccucucccgccuggacaaggucgaggccgaggugcagaucgaccggcugaucaccgggcgccuccagagccugcagaccuacgugacccagcagcugauccgggcggccgagauccgcgccagcgccaaccucgccgcgaccaagauguccgagugcguccugggccagagcaagcggguggacuucugcggcaagggguaccaccugauguccuucccccagagcgccccgcacggcguggucuuccuccacgugacguacguccccgcccaggagaagaacuucaccaccgcccccgcgaucugccacgacgggaaggcccacuucccccgcgagggcguguucguguccaacgggacccacugguucgucacgcagcggaacuucuacgagccgcagaucaucaccaccgacaacaccuucgugagcggcaacugcgacguggucaucggcaucgugaacaacacgguguacgacccccugcagcccgagcuggacuccuucaaggaggagcucgacaaguacuucaagaaccacaccagccccgacgucgaccugggggacaucuccggcaucaacgccagcguggugaacauccagaaggagaucgaccgccugaacgaggucgccaagaaccucaacgagucccugaucgaccugcaggagcucgggaaguacgagcaguacaucaaguggccgugguacaucuggcugggcuucaucgccggccugaucgcgaucgugauggugaccaucaugcucugcugcaugaccagcugcugcuccugccugaaggggugcugcagcugcggcuccugcugcaaguucgacgaggacgacagcgagcccguccugaagggggugaagcuccacuacacgugaugacucgagcugguacugcaugcacgcaaugcuagcugccccuuucccguccuggguaccccgagucucccccgaccucgggucccagguaugcucccaccuccaccugccccacucaccaccucugcuaguuccagacaccucccaagcacgcagcaaugcagcucaaaacgcuuagccuagccacacccccacgggaaacagcagugauuaaccuuuagcaauaaacgaaaguuuaacuaagcuauacuaaccccaggguuggucaauuucgugccagccacacccuggagcuagcaaaaaaaaaaaaaaaaaaaaaaaaaaaaaagcauaugacuaaaaaaaaaaaaaaaaaaaaaaaaaaaaaaaaaaaaaaaaaaaaaaaaaaaaaaaaaaaaaaaaaaaaaa

SEQ ID NO: 26724 - RNA, 4283 nt, Artificial Sequence
  SARS-CoV-2/Wuhan/WIV05/2019__EPI_ISL_402128 spike protein mRNA gc (1-1273)(E484K_D614G)
agaauaaacuaguauucuucugguccccacagacucagagagaacccgccaccauguucguguuccugguccuccugccccuggugagcucccagugcgugaaccucaccacccgcacgcagcugccgcccgccuacaccaacagcuucacccggggcgucuacuaccccgacaagguguuccgcuccagcgugcugcacuccacccaggaccucuuccugcccuucuucagcaacgucacgugguuccacgccauccacguguccgggaccaacggcaccaagcgguucgacaacccggugcugcccuucaacgacggggucuacuucgcgagcaccgagaaguccaacaucauccgcggcuggaucuucgggacgacccucgacagcaagacccagucccugcugaucgugaacaacgccaccaacguggucaucaaggugugcgaguuccaguucugcaacgaccccuuccucggcguguacuaccacaagaacaacaagagcuggauggaguccgaguuccgggucuacagcuccgccaacaacugcacguucgaguacgugagccagcccuuccugauggaccuggagggcaagcaggggaacuucaagaaccuccgcgaguucguguucaagaacaucgacggcuacuucaagaucuacuccaagcacaccccgaucaaccugguccgggaccugccccagggguucagcgcccucgagccccugguggaccugcccaucggcaucaacaucacccgcuuccagacccuccuggcccugcaccgguccuaccucacgccgggggacagcagcuccggcuggaccgcgggcgccgccgccuacuacgugggguaccugcagccccgcaccuuccugcucaaguacaacgagaacggcaccaucacggacgcggucgacugcgcccuggacccccugagcgagaccaagugcacccucaaguccuucaccguggagaaggggaucuaccagacgagcaacuuccgggugcagcccaccgaguccaucguccgcuucccgaacaucaccaaccugugccccuucggcgagguguucaacgccacccgguucgccagcgucuacgccuggaaccgcaagcggaucuccaacugcguggcggacuacagcgugcuguacaacuccgccagcuucuccacguucaagugcuacggcgucagccccaccaagcucaacgaccugugcuucaccaacguguacgccgacuccuucgugauccgcggggacgagguccggcagaucgcccccggccagaccgggaagaucgccgacuacaacuacaagcugccggacgacuucacgggcugcgugaucgcguggaacagcaacaaccucgacuccaaggucgggggcaacuacaacuaccuguaccgccuguuccgcaagagcaaccucaagcccuucgagcgggacaucuccaccgagaucuaccaggccggcagcacccccugcaacggggugaagggcuucaacugcuacuucccccugcaguccuacggguuccagccgaccaacggcgugggguaccagcccuaccggguggucgugcugagcuucgagcuccugcacgcccccgccacggugugcggccccaagaaguccaccaaccuggucaagaacaagugcgugaacuucaacuucaacggccucaccgggaccggcgugcugaccgagagcaacaagaaguuccugccguuccagcaguucgggcgcgacaucgccgacacgaccgacgcgguccgcgacccccagacccuggagauccucgacaucacccccugcagcuucggcgggguguccgugaucacgccgggcaccaacaccagcaaccaggucgccgugcuguaccagggcgugaacugcaccgagguccccguggccauccacgccgaccagcugacgcccaccuggcggguguacuccaccggcagcaacgucuuccagacccgcgccgggugccucaucggcgcggagcacgugaacaacuccuacgagugcgacauccccaucggggccggcaucugcgccagcuaccagacgcagaccaacuccccgcggcgcgcccggagcguggcgucccagagcaucaucgccuacaccaugucccugggcgccgagaacagcgucgccuacuccaacaacagcaucgccauccccaccaacuucacgaucuccgugaccaccgagauccugcccgugagcaugaccaagacgagcgucgacugcaccauguacaucugcggggacuccaccgagugcagcaaccuccugcugcaguacggcuccuucugcacccagcucaaccgcgcgcugacggggaucgccguggagcaggacaagaacacccaggagguguucgcccaggucaagcagaucuacaagacgcccccgaucaaggacuucggcggguucaacuucagccagauccugcccgaccccuccaagcccagcaagcgguccuucaucgaggaccuccuguucaacaaggugacccuggccgacgccggcuucaucaagcaguacggcgacugccucggggacaucgcggcccgcgaccugaucugcgcccagaaguucaacggccugaccgugcucccgccccugcugaccgacgagaugaucgcccaguacaccagcgcccuccuggcggggaccaucacguccggcuggaccuucggggccggcgccgcccugcagauccccuucgcgaugcagauggccuaccgguucaacggcaucggggucacccagaacgugcucuacgagaaccagaagcugaucgccaaccaguucaacagcgccaucggcaagauccaggacucccugagcuccaccgccagcgcgcucgggaagcugcaggacguggucaaccagaacgcccaggcccugaacacgcucgugaagcagcuguccagcaacuucggcgccaucuccagcgugcugaacgacauccucucccgccuggacaaggucgaggccgaggugcagaucgaccggcugaucaccgggcgccuccagagccugcagaccuacgugacccagcagcugauccgggcggccgagauccgcgccagcgccaaccucgccgcgaccaagauguccgagugcguccugggccagagcaagcggguggacuucugcggcaagggguaccaccugauguccuucccccagagcgccccgcacggcguggucuuccuccacgugacguacguccccgcccaggagaagaacuucaccaccgcccccgcgaucugccacgacgggaaggcccacuucccccgcgagggcguguucguguccaacgggacccacugguucgucacgcagcggaacuucuacgagccgcagaucaucaccaccgacaacaccuucgugagcggcaacugcgacguggucaucggcaucgugaacaacacgguguacgacccccugcagcccgagcuggacuccuucaaggaggagcucgacaaguacuucaagaaccacaccagccccgacgucgaccugggggacaucuccggcaucaacgccagcguggugaacauccagaaggagaucgaccgccugaacgaggucgccaagaaccucaacgagucccugaucgaccugcaggagcucgggaaguacgagcaguacaucaaguggccgugguacaucuggcugggcuucaucgccggccugaucgcgaucgugauggugaccaucaugcucugcugcaugaccagcugcugcuccugccugaaggggugcugcagcugcggcuccugcugcaaguucgacgaggacgacagcgagcccguccugaagggggugaagcuccacuacacgugaugacucgagcugguacugcaugcacgcaaugcuagcugccccuuucccguccuggguaccccgagucucccccgaccucgggucccagguaugcucccaccuccaccugccccacucaccaccucugcuaguuccagacaccucccaagcacgcagcaaugcagcucaaaacgcuuagccuagccacacccccacgggaaacagcagugauuaaccuuuagcaauaaacgaaaguuuaacuaagcuauacuaaccccaggguuggucaauuucgugccagccacacccuggagcuagcaaaaaaaaaaaaaaaaaaaaaaaaaaaaaagcauaugacuaaaaaaaaaaaaaaaaaaaaaaaaaaaaaaaaaaaaaaaaaaaaaaaaaaaaaaaaaaaaaaaaaaaaaa

SEQ ID NO: 26725 - RNA, 4283 nt, Artificial Sequence
  SARS-CoV-2/Wuhan/WIV05/2019__EPI_ISL_402128 spike protein mRNA gc (1-1273)(L18F_T20N_P26S_D138Y_R190S_K417T_E484K_N501Y_D614G_H655Y _T1027I)
agaauaaacuaguauucuucugguccccacagacucagagagaacccgccaccauguucguguuccugguccuccugccccuggugagcucccagugcgugaacuucaccaaccgcacgcagcugccgagcgccuacaccaacagcuucacccggggcgucuacuaccccgacaagguguuccgcuccagcgugcugcacuccacccaggaccucuuccugcccuucuucagcaacgucacgugguuccacgccauccacguguccgggaccaacggcaccaagcgguucgacaacccggugcugcccuucaacgacggggucuacuucgcgagcaccgagaaguccaacaucauccgcggcuggaucuucgggacgacccucgacagcaagacccagucccugcugaucgugaacaacgccaccaacguggucaucaaggugugcgaguuccaguucugcaacuaccccuuccucggcguguacuaccacaagaacaacaagagcuggauggaguccgaguuccgggucuacagcuccgccaacaacugcacguucgaguacgugagccagcccuuccugauggaccuggagggcaagcaggggaacuucaagaaccucagcgaguucguguucaagaacaucgacggcuacuucaagaucuacuccaagcacaccccgaucaaccugguccgggaccugccccagggguucagcgcccucgagccccugguggaccugcccaucggcaucaacaucacccgcuuccagacccuccuggcccugcaccgguccuaccucacgccgggggacagcagcuccggcuggaccgcgggcgccgccgccuacuacgugggguaccugcagccccgcaccuuccugcucaaguacaacgagaacggcaccaucacggacgcggucgacugcgcccuggacccccugagcgagaccaagugcacccucaaguccuucaccguggagaaggggaucuaccagacgagcaacuuccgggugcagcccaccgaguccaucguccgcuucccgaacaucaccaaccugugccccuucggcgagguguucaacgccacccgguucgccagcgucuacgccuggaaccgcaagcggaucuccaacugcguggcggacuacagcgugcuguacaacuccgccagcuucuccacguucaagugcuacggcgucagccccaccaagcucaacgaccugugcuucaccaacguguacgccgacuccuucgugauccgcggggacgagguccggcagaucgcccccggccagaccgggaccaucgccgacuacaacuacaagcugccggacgacuucacgggcugcgugaucgcguggaacagcaacaaccucgacuccaaggucgggggcaacuacaacuaccuguaccgccuguuccgcaagagcaaccucaagcccuucgagcgggacaucuccaccgagaucuaccaggccggcagcacccccugcaacggggugaagggcuucaacugcuacuucccccugcaguccuacggguuccagccgaccuacggcgugggguaccagcccuaccggguggucgugcugagcuucgagcuccugcacgcccccgccacggugugcggccccaagaaguccaccaaccuggucaagaacaagugcgugaacuucaacuucaacggccucaccgggaccggcgugcugaccgagagcaacaagaaguuccugccguuccagcaguucgggcgcgacaucgccgacacgaccgacgcgguccgcgacccccagacccuggagauccucgacaucacccccugcagcuucggcgggguguccgugaucacgccgggcaccaacaccagcaaccaggucgccgugcuguaccagggcgugaacugcaccgagguccccguggccauccacgccgaccagcugacgcccaccuggcggguguacuccaccggcagcaacgucuuccagacccgcgccgggugccucaucggcgcggaguacgugaacaacuccuacgagugcgacauccccaucggggccggcaucugcgccagcuaccagacgcagaccaacuccccgcggcgcgcccggagcguggcgucccagagcaucaucgccuacaccaugucccugggcgccgagaacagcgucgccuacuccaacaacagcaucgccauccccaccaacuucacgaucuccgugaccaccgagauccugcccgugagcaugaccaagacgagcgucgacugcaccauguacaucugcggggacuccaccgagugcagcaaccuccugcugcaguacggcuccuucugcacccagcucaaccgcgcgcugacggggaucgccguggagcaggacaagaacacccaggagguguucgcccaggucaagcagaucuacaagacgcccccgaucaaggacuucggcggguucaacuucagccagauccugcccgaccccuccaagcccagcaagcgguccuucaucgaggaccuccuguucaacaaggugacccuggccgacgccggcuucaucaagcaguacggcgacugccucggggacaucgcggcccgcgaccugaucugcgcccagaaguucaacggccugaccgugcucccgccccugcugaccgacgagaugaucgcccaguacaccagcgcccuccuggcggggaccaucacguccggcuggaccuucggggccggcgccgcccugcagauccccuucgcgaugcagauggccuaccgguucaacggcaucggggucacccagaacgugcucuacgagaaccagaagcugaucgccaaccaguucaacagcgccaucggcaagauccaggacucccugagcuccaccgccagcgcgcucgggaagcugcaggacguggucaaccagaacgcccaggcccugaacacgcucgugaagcagcuguccagcaacuucggcgccaucuccagcgugcugaacgacauccucucccgccuggacaaggucgaggccgaggugcagaucgaccggcugaucaccgggcgccuccagagccugcagaccuacgugacccagcagcugauccgggcggccgagauccgcgccagcgccaaccucgccgcgaucaagauguccgagugcguccugggccagagcaagcggguggacuucugcggcaagggguaccaccugauguccuucccccagagcgccccgcacggcguggucuuccuccacgugacguacguccccgcccaggagaagaacuucaccaccgcccccgcgaucugccacgacgggaaggcccacuucccccgcgagggcguguucguguccaacgggacccacugguucgucacgcagcggaacuucuacgagccgcagaucaucaccaccgacaacaccuucgugagcggcaacugcgacguggucaucggcaucgugaacaacacgguguacgacccccugcagcccgagcuggacuccuucaaggaggagcucgacaaguacuucaagaaccacaccagccccgacgucgaccugggggacaucuccggcaucaacgccagcguggugaacauccagaaggagaucgaccgccugaacgaggucgccaagaaccucaacgagucccugaucgaccugcaggagcucgggaaguacgagcaguacaucaaguggccgugguacaucuggcugggcuucaucgccggccugaucgcgaucgugauggugaccaucaugcucugcugcaugaccagcugcugcuccugccugaaggggugcugcagcugcggcuccugcugcaaguucgacgaggacgacagcgagcccguccugaagggggugaagcuccacuacacgugaugacucgagcugguacugcaugcacgcaaugcuagcugccccuuucccguccuggguaccccgagucucccccgaccucgggucccagguaugcucccaccuccaccugccccacucaccaccucugcuaguuccagacaccucccaagcacgcagcaaugcagcucaaaacgcuuagccuagccacacccccacgggaaacagcagugauuaaccuuuagcaauaaacgaaaguuuaacuaagcuauacuaaccccaggguuggucaauuucgugccagccacacccuggagcuagcaaaaaaaaaaaaaaaaaaaaaaaaaaaaaagcauaugacuaaaaaaaaaaaaaaaaaaaaaaaaaaaaaaaaaaaaaaaaaaaaaaaaaaaaaaaaaaaaaaaaaaaaaa

SEQ ID NO: 26726 - RNA, 4283 nt, Artificial Sequence
  SARS-CoV-2/Wuhan/WIV05/2019__EPI_ISL_402128 spike protein mRNA gc (1-1273)(S13I_W152C_L452R_D614G)
agaauaaacuaguauucuucugguccccacagacucagagagaacccgccaccauguucguguuccugguccuccugccccuggugagcauccagugcgugaaccucaccacccgcacgcagcugccgcccgccuacaccaacagcuucacccggggcgucuacuaccccgacaagguguuccgcuccagcgugcugcacuccacccaggaccucuuccugcccuucuucagcaacgucacgugguuccacgccauccacguguccgggaccaacggcaccaagcgguucgacaacccggugcugcccuucaacgacggggucuacuucgcgagcaccgagaaguccaacaucauccgcggcuggaucuucgggacgacccucgacagcaagacccagucccugcugaucgugaacaacgccaccaacguggucaucaaggugugcgaguuccaguucugcaacgaccccuuccucggcguguacuaccacaagaacaacaagagcugcauggaguccgaguuccgggucuacagcuccgccaacaacugcacguucgaguacgugagccagcccuuccugauggaccuggagggcaagcaggggaacuucaagaaccuccgcgaguucguguucaagaacaucgacggcuacuucaagaucuacuccaagcacaccccgaucaaccugguccgggaccugccccagggguucagcgcccucgagccccugguggaccugcccaucggcaucaacaucacccgcuuccagacccuccuggcccugcaccgguccuaccucacgccgggggacagcagcuccggcuggaccgcgggcgccgccgccuacuacgugggguaccugcagccccgcaccuuccugcucaaguacaacgagaacggcaccaucacggacgcggucgacugcgcccuggacccccugagcgagaccaagugcacccucaaguccuucaccguggagaaggggaucuaccagacgagcaacuuccgggugcagcccaccgaguccaucguccgcuucccgaacaucaccaaccugugccccuucggcgagguguucaacgccacccgguucgccagcgucuacgccuggaaccgcaagcggaucuccaacugcguggcggacuacagcgugcuguacaacuccgccagcuucuccacguucaagugcuacggcgucagccccaccaagcucaacgaccugugcuucaccaacguguacgccgacuccuucgugauccgcggggacgagguccggcagaucgcccccggccagaccgggaagaucgccgacuacaacuacaagcugccggacgacuucacgggcugcgugaucgcguggaacagcaacaaccucgacuccaaggucgggggcaacuacaacuaccgcuaccgccuguuccgcaagagcaaccucaagcccuucgagcgggacaucuccaccgagaucuaccaggccggcagcacccccugcaacgggguggagggcuucaacugcuacuucccccugcaguccuacggguuccagccgaccaacggcgugggguaccagcccuaccggguggucgugcugagcuucgagcuccugcacgcccccgccacggugugcggccccaagaaguccaccaaccuggucaagaacaagugcgugaacuucaacuucaacggccucaccgggaccggcgugcugaccgagagcaacaagaaguuccugccguuccagcaguucgggcgcgacaucgccgacacgaccgacgcgguccgcgacccccagacccuggagauccucgacaucacccccugcagcuucggcgggguguccgugaucacgccgggcaccaacaccagcaaccaggucgccgugcuguaccagggcgugaacugcaccgagguccccguggccauccacgccgaccagcugacgcccaccuggcggguguacuccaccggcagcaacgucuuccagacccgcgccgggugccucaucggcgcggagcacgugaacaacuccuacgagugcgacauccccaucggggccggcaucugcgccagcuaccagacgcagaccaacuccccgcggcgcgcccggagcguggcgucccagagcaucaucgccuacaccaugucccugggcgccgagaacagcgucgccuacuccaacaacagcaucgccauccccaccaacuucacgaucuccgugaccaccgagauccugcccgugagcaugaccaagacgagcgucgacugcaccauguacaucugcggggacuccaccgagugcagcaaccuccugcugcaguacggcuccuucugcacccagcucaaccgcgcgcugacggggaucgccguggagcaggacaagaacacccaggagguguucgcccaggucaagcagaucuacaagacgcccccgaucaaggacuucggcggguucaacuucagccagauccugcccgaccccuccaagcccagcaagcgguccuucaucgaggaccuccuguucaacaaggugacccuggccgacgccggcuucaucaagcaguacggcgacugccucggggacaucgcggcccgcgaccugaucugcgcccagaaguucaacggccugaccgugcucccgccccugcugaccgacgagaugaucgcccaguacaccagcgcccuccuggcggggaccaucacguccggcuggaccuucggggccggcgccgcccugcagauccccuucgcgaugcagauggccuaccgguucaacggcaucggggucacccagaacgugcucuacgagaaccagaagcugaucgccaaccaguucaacagcgccaucggcaagauccaggacucccugagcuccaccgccagcgcgcucgggaagcugcaggacguggucaaccagaacgcccaggcccugaacacgcucgugaagcagcuguccagcaacuucggcgccaucuccagcgugcugaacgacauccucucccgccuggacaaggucgaggccgaggugcagaucgaccggcugaucaccgggcgccuccagagccugcagaccuacgugacccagcagcugauccgggcggccgagauccgcgccagcgccaaccucgccgcgaccaagauguccgagugcguccugggccagagcaagcggguggacuucugcggcaagggguaccaccugauguccuucccccagagcgccccgcacggcguggucuuccuccacgugacguacguccccgcccaggagaagaacuucaccaccgcccccgcgaucugccacgacgggaaggcccacuucccccgcgagggcguguucguguccaacgggacccacugguucgucacgcagcggaacuucuacgagccgcagaucaucaccaccgacaacaccuucgugagcggcaacugcgacguggucaucggcaucgugaacaacacgguguacgacccccugcagcccgagcuggacuccuucaaggaggagcucgacaaguacuucaagaaccacaccagccccgacgucgaccugggggacaucuccggcaucaacgccagcguggugaacauccagaaggagaucgaccgccugaacgaggucgccaagaaccucaacgagucccugaucgaccugcaggagcucgggaaguacgagcaguacaucaaguggccgugguacaucuggcugggcuucaucgccggccugaucgcgaucgugauggugaccaucaugcucugcugcaugaccagcugcugcuccugccugaaggggugcugcagcugcggcuccugcugcaaguucgacgaggacgacagcgagcccguccugaagggggugaagcuccacuacacgugaugacucgagcugguacugcaugcacgcaaugcuagcugccccuuucccguccuggguaccccgagucucccccgaccucgggucccagguaugcucccaccuccaccugccccacucaccaccucugcuaguuccagacaccucccaagcacgcagcaaugcagcucaaaacgcuuagccuagccacacccccacgggaaacagcagugauuaaccuuuagcaauaaacgaaaguuuaacuaagcuauacuaaccccaggguuggucaauuucgugccagccacacccuggagcuagcaaaaaaaaaaaaaaaaaaaaaaaaaaaaaagcauaugacuaaaaaaaaaaaaaaaaaaaaaaaaaaaaaaaaaaaaaaaaaaaaaaaaaaaaaaaaaaaaaaaaaaaaaa

SEQ ID NO: 26727 - RNA, 4283 nt, Artificial Sequence; identical to SEQ ID NO: 26709
  SARS-CoV-2/Wuhan/WIV05/2019__EPI_ISL_402128 spike protein mRNA gc (1-1273)

SEQ ID NO: 26728 - RNA, 4283 nt, Artificial Sequence
  SARS-CoV-2/Wuhan/WIV05/2019__EPI_ISL_402128 spike protein mRNA gc (1-1273)(D614G)
agaauaaacuaguauucuucugguccccacagacucagagagaacccgccaccauguucguguuccugguccuccugccccuggugagcucccagugcgugaaccucaccacccgcacgcagcugccgcccgccuacaccaacagcuucacccggggcgucuacuaccccgacaagguguuccgcuccagcgugcugcacuccacccaggaccucuuccugcccuucuucagcaacgucacgugguuccacgccauccacguguccgggaccaacggcaccaagcgguucgacaacccggugcugcccuucaacgacggggucuacuucgcgagcaccgagaaguccaacaucauccgcggcuggaucuucgggacgacccucgacagcaagacccagucccugcugaucgugaacaacgccaccaacguggucaucaaggugugcgaguuccaguucugcaacgaccccuuccucggcguguacuaccacaagaacaacaagagcuggauggaguccgaguuccgggucuacagcuccgccaacaacugcacguucgaguacgugagccagcccuuccugauggaccuggagggcaagcaggggaacuucaagaaccuccgcgaguucguguucaagaacaucgacggcuacuucaagaucuacuccaagcacaccccgaucaaccugguccgggaccugccccagggguucagcgcccucgagccccugguggaccugcccaucggcaucaacaucacccgcuuccagacccuccuggcccugcaccgguccuaccucacgccgggggacagcagcuccggcuggaccgcgggcgccgccgccuacuacgugggguaccugcagccccgcaccuuccugcucaaguacaacgagaacggcaccaucacggacgcggucgacugcgcccuggacccccugagcgagaccaagugcacccucaaguccuucaccguggagaaggggaucuaccagacgagcaacuuccgggugcagcccaccgaguccaucguccgcuucccgaacaucaccaaccugugccccuucggcgagguguucaacgccacccgguucgccagcgucuacgccuggaaccgcaagcggaucuccaacugcguggcggacuacagcgugcuguacaacuccgccagcuucuccacguucaagugcuacggcgucagccccaccaagcucaacgaccugugcuucaccaacguguacgccgacuccuucgugauccgcggggacgagguccggcagaucgcccccggccagaccgggaagaucgccgacuacaacuacaagcugccggacgacuucacgggcugcgugaucgcguggaacagcaacaaccucgacuccaaggucgggggcaacuacaacuaccuguaccgccuguuccgcaagagcaaccucaagcccuucgagcgggacaucuccaccgagaucuaccaggccggcagcacccccugcaacgggguggagggcuucaacugcuacuucccccugcaguccuacggguuccagccgaccaacggcgugggguaccagcccuaccggguggucgugcugagcuucgagcuccugcacgcccccgccacggugugcggccccaagaaguccaccaaccuggucaagaacaagugcgugaacuucaacuucaacggccucaccgggaccggcgugcugaccgagagcaacaagaaguuccugccguuccagcaguucgggcgcgacaucgccgacacgaccgacgcgguccgcgacccccagacccuggagauccucgacaucacccccugcagcuucggcgggguguccgugaucacgccgggcaccaacaccagcaaccaggucgccgugcuguaccagggcgugaacugcaccgagguccccguggccauccacgccgaccagcugacgcccaccuggcggguguacuccaccgggagcaacgucuuccagacccgcgccggcugccucaucggggcggagcacgugaacaacuccuacgagugcgacauccccaucggcgccggcaucugcgccagcuaccagacgcagaccaacuccccgcggcgcgcccggagcguggcgucccagagcaucaucgccuacaccaugucccugggggccgagaacagcgucgccuacuccaacaacagcaucgccauccccaccaacuucacgaucuccgugaccaccgagauccugcccgugagcaugaccaagacgagcgucgacugcaccauguacaucugcggcgacuccaccgagugcagcaaccuccugcugcaguacggguccuucugcacccagcucaaccgcgcgcugacgggcaucgccguggagcaggacaagaacacccaggagguguucgcccaggucaagcagaucuacaagacgcccccgaucaaggacuucgggggcuucaacuucagccagauccugcccgaccccuccaagcccagcaagcgguccuucaucgaggaccuccuguucaacaaggugacccuggccgacgccggcuucaucaagcaguacggggacugccucggcgacaucgcggcccgcgaccugaucugcgcccagaaguucaacgggcugaccgugcucccgccccugcugaccgacgagaugaucgcccaguacaccagcgcccuccuggcgggcaccaucacguccggguggaccuucggcgccggcgccgcccugcagauccccuucgcgaugcagauggccuaccgguucaacgggaucggcgucacccagaacgugcucuacgagaaccagaagcugaucgccaaccaguucaacagcgccaucgggaagauccaggacucccugagcuccaccgccagcgcgcucggcaagcugcaggacguggucaaccagaacgcccaggcccugaacacgcucgugaagcagcuguccagcaacuucggggccaucuccagcgugcugaacgacauccucucccgccuggacaaggucgaggccgaggugcagaucgaccggcugaucaccggccgccuccagagccugcagaccuacgugacccagcagcugauccgggcggccgagauccgcgccagcgccaaccucgccgcgaccaagauguccgagugcguccugggccagagcaagcggguggacuucugcgggaagggcuaccaccugauguccuucccccagagcgccccgcacgggguggucuuccuccacgugacguacguccccgcccaggagaagaacuucaccaccgcccccgcgaucugccacgacggcaaggcccacuucccccgcgaggggguguucguguccaacggcacccacugguucgucacgcagcggaacuucuacgagccgcagaucaucaccaccgacaacaccuucgugagcggcaacugcgacguggucaucgggaucgugaacaacacgguguacgacccccugcagcccgagcuggacuccuucaaggaggagcucgacaaguacuucaagaaccacaccagccccgacgucgaccugggcgacaucuccgggaucaacgccagcguggugaacauccagaaggagaucgaccgccugaacgaggucgccaagaaccucaacgagucccugaucgaccugcaggagcucggcaaguacgagcaguacaucaaguggccgugguacaucuggcugggcuucaucgccgggcugaucgcgaucgugauggugaccaucaugcucugcugcaugaccagcugcugcuccugccugaagggcugcugcagcugcggguccugcugcaaguucgacgaggacgacagcgagcccguccugaagggcgugaagcuccacuacacgugaugacucgagcugguacugcaugcacgcaaugcuagcugccccuuucccguccuggguaccccgagucucccccgaccucgggucccagguaugcucccaccuccaccugccccacucaccaccucugcuaguuccagacaccucccaagcacgcagcaaugcagcucaaaacgcuuagccuagccacacccccacgggaaacagcagugauuaaccuuuagcaauaaacgaaaguuuaacuaagcuauacuaaccccaggguuggucaauuucgugccagccacacccuggagcuagcaaaaaaaaaaaaaaaaaaaaaaaaaaaaaagcauaugacuaaaaaaaaaaaaaaaaaaaaaaaaaaaaaaaaaaaaaaaaaaaaaaaaaaaaaaaaaaaaaaaaaaaaaa

SEQ ID NO: 26729 - RNA, 4283 nt, Artificial Sequence
  SARS-CoV-2/Wuhan/WIV05/2019__EPI_ISL_402128 spike protein mRNA gc (1-1273)(A222V_D614G)
agaauaaacuaguauucuucugguccccacagacucagagagaacccgccaccauguucguguuccugguccuccugccccuggugagcucccagugcgugaaccucaccacccgcacgcagcugccgcccgccuacaccaacagcuucacccggggcgucuacuaccccgacaagguguuccgcuccagcgugcugcacuccacccaggaccucuuccugcccuucuucagcaacgucacgugguuccacgccauccacguguccgggaccaacggcaccaagcgguucgacaacccggugcugcccuucaacgacggggucuacuucgcgagcaccgagaaguccaacaucauccgcggcuggaucuucgggacgacccucgacagcaagacccagucccugcugaucgugaacaacgccaccaacguggucaucaaggugugcgaguuccaguucugcaacgaccccuuccucggcguguacuaccacaagaacaacaagagcuggauggaguccgaguuccgggucuacagcuccgccaacaacugcacguucgaguacgugagccagcccuuccugauggaccuggagggcaagcaggggaacuucaagaaccuccgcgaguucguguucaagaacaucgacggcuacuucaagaucuacuccaagcacaccccgaucaaccugguccgggaccugccccagggguucagcgugcucgagccccugguggaccugcccaucggcaucaacaucacccgcuuccagacccuccuggcccugcaccgguccuaccucacgccgggggacagcagcuccggcuggaccgccggcgcggccgccuacuacgucggguaccugcagccccgcaccuuccugcucaaguacaacgagaacggcaccaucacggacgccguggacugcgcgcuggacccccugagcgagaccaagugcacccucaaguccuucaccguggagaaggggaucuaccagacgagcaacuuccggguccagcccaccgaguccaucgugcgcuucccgaacaucaccaaccugugccccuucggcgaggucuucaacgccacccgguucgccagcguguacgccuggaaccgcaagcggaucuccaacugcguggccgacuacagcguccuguacaacuccgcgagcuucuccacguucaagugcuacggcgugagccccaccaagcucaacgaccugugcuucaccaacguguacgccgacuccuucgucauccgcggggacgaggugcggcagaucgcccccggccagaccgggaagaucgccgacuacaacuacaagcugccggacgacuucacgggcugcgugaucgccuggaacagcaacaaccucgacuccaaggucgggggcaacuacaacuaccuguaccgccuguuccgcaagagcaaccucaagcccuucgagcgggacaucuccaccgagaucuaccaggcgggcagcacccccugcaacgggguggagggcuucaacugcuacuucccccugcaguccuacggguuccagccgaccaacggcgugggguaccagcccuaccgggucguggugcugagcuucgagcuccugcacgcccccgccacggucugcggccccaagaaguccaccaaccuggugaagaacaagugcgugaacuucaacuucaacggccucaccgggaccggcguccugaccgagagcaacaagaaguuccugccguuccagcaguucgggcgcgacaucgccgacacgaccgacgccgugcgcgacccccagacccuggagauccucgacaucacccccugcagcuucggcgggguguccgucaucacgccgggcaccaacaccagcaaccagguggcggugcuguaccagggcgucaacugcaccgaggugcccguggccauccacgccgaccagcugacgcccaccuggcgggucuacuccaccgggagcaacguguuccagacccgcgccggcugccucaucggggccgagcacgugaacaacuccuacgagugcgacauccccaucggcgcgggcaucugcgccagcuaccagacgcagaccaacuccccgcggcgcgcccggagcgucgccucccagagcaucaucgcguacaccaugucccugggggccgagaacagcguggccuacuccaacaacagcaucgccauccccaccaacuucacgaucuccgugaccaccgagauccugcccgucagcaugaccaagacgagcguggacugcaccauguacaucugcggcgacuccaccgagugcagcaaccuccugcugcaguacggguccuucugcacccagcucaaccgcgcccugacgggcaucgcgguggagcaggacaagaacacccaggaggucuucgcccaggugaagcagaucuacaagacgcccccgaucaaggacuucgggggcuucaacuucagccagauccugcccgaccccuccaagcccagcaagcgguccuucaucgaggaccuccuguucaacaaggugacccuggccgacgccggcuucaucaagcaguacggggacugccucggcgacaucgccgcgcgcgaccugaucugcgcccagaaguucaacgggcugaccguccucccgccccugcugaccgacgagaugaucgcccaguacaccagcgcccuccuggccggcaccaucacguccggguggaccuucggcgcgggcgccgcccugcagauccccuucgccaugcagauggcguaccgguucaacgggaucggcgugacccagaacgugcucuacgagaaccagaagcugaucgccaaccaguucaacagcgccaucgggaagauccaggacucccugagcuccaccgccagcgcccucggcaagcugcaggacgucgugaaccagaacgcgcaggcccugaacacgcucgugaagcagcuguccagcaacuucggggccaucuccagcguccugaacgacauccucucccgccuggacaagguggaggccgaggugcagaucgaccggcugaucaccggccgccuccagagccugcagaccuacgucacccagcagcugauccgggccgcggagauccgcgccagcgccaaccucgccgccaccaagauguccgagugcgugcugggccagagcaagcggguggacuucugcgggaagggcuaccaccugauguccuucccccagagcgcgccgcacggggucguguuccuccacgucacguacgugcccgcccaggagaagaacuucaccaccgcccccgccaucugccacgacggcaaggcgcacuucccccgcgaggggguguucgucuccaacggcacccacugguucgugacgcagcggaacuucuacgagccgcagaucaucaccaccgacaacaccuucgugagcggcaacugcgacgucgugaucgggaucgugaacaacacggucuacgacccccugcagcccgagcuggacuccuucaaggaggagcucgacaaguacuucaagaaccacaccagccccgacguggaccugggcgacaucuccgggaucaacgccagcguggucaacauccagaaggagaucgaccgccugaacgagguggccaagaaccucaacgagucccugaucgaccugcaggagcucggcaaguacgagcaguacaucaaguggccgugguacaucuggcugggcuucaucgccgggcugaucgccaucgugauggucaccaucaugcucugcugcaugaccagcugcugcuccugccugaagggcugcugcagcugcggguccugcugcaaguucgacgaggacgacagcgagcccgugcugaagggcgugaagcuccacuacacgugaugacucgagcugguacugcaugcacgcaaugcuagcugccccuuucccguccuggguaccccgagucucccccgaccucgggucccagguaugcucccaccuccaccugccccacucaccaccucugcuaguuccagacaccucccaagcacgcagcaaugcagcucaaaacgcuuagccuagccacacccccacgggaaacagcagugauuaaccuuuagcaauaaacgaaaguuuaacuaagcuauacuaaccccaggguuggucaauuucgugccagccacacccuggagcuagcaaaaaaaaaaaaaaaaaaaaaaaaaaaaaagcauaugacuaaaaaaaaaaaaaaaaaaaaaaaaaaaaaaaaaaaaaaaaaaaaaaaaaaaaaaaaaaaaaaaaaaaaaa

SEQ ID NO: 26730 - RNA, 4283 nt, Artificial Sequence
  SARS-CoV-2/Wuhan/WIV05/2019__EPI_ISL_402128 spike protein mRNA gc (1-1273)(N439K_D614G)
agaauaaacuaguauucuucugguccccacagacucagagagaacccgccaccauguucguguuccugguccuccugccccuggugagcucccagugcgugaaccucaccacccgcacgcagcugccgcccgccuacaccaacagcuucacccggggcgucuacuaccccgacaagguguuccgcuccagcgugcugcacuccacccaggaccucuuccugcccuucuucagcaacgucacgugguuccacgccauccacguguccgggaccaacggcaccaagcgguucgacaacccggugcugcccuucaacgacggggucuacuucgcgagcaccgagaaguccaacaucauccgcggcuggaucuucgggacgacccucgacagcaagacccagucccugcugaucgugaacaacgccaccaacguggucaucaaggugugcgaguuccaguucugcaacgaccccuuccucggcguguacuaccacaagaacaacaagagcuggauggaguccgaguuccgggucuacagcuccgccaacaacugcacguucgaguacgugagccagcccuuccugauggaccuggagggcaagcaggggaacuucaagaaccuccgcgaguucguguucaagaacaucgacggcuacuucaagaucuacuccaagcacaccccgaucaaccugguccgggaccugccccagggguucagcgcccucgagccccugguggaccugcccaucggcaucaacaucacccgcuuccagacccuccuggcccugcaccgguccuaccucacgccgggggacagcagcuccggcuggaccgcgggcgccgccgccuacuacgugggguaccugcagccccgcaccuuccugcucaaguacaacgagaacggcaccaucacggacgcggucgacugcgcccuggacccccugagcgagaccaagugcacccucaaguccuucaccguggagaaggggaucuaccagacgagcaacuuccgggugcagcccaccgaguccaucguccgcuucccgaacaucaccaaccugugccccuucggcgagguguucaacgccacccgguucgccagcgucuacgccuggaaccgcaagcggaucuccaacugcguggcggacuacagcgugcuguacaacuccgccagcuucuccacguucaagugcuacggcgucagccccaccaagcucaacgaccugugcuucaccaacguguacgccgacuccuucgugauccgcggggacgagguccggcagaucgcccccggccagaccgggaagaucgccgacuacaacuacaagcugccggacgacuucacgggcugcgugaucgcguggaacagcaagaaccucgacuccaaggucgggggcaacuacaacuaccuguaccgccuguuccgcaagagcaaccucaagcccuucgagcgggacaucuccaccgagaucuaccaggccggcagcacccccugcaacgggguggagggcuucaacugcuacuucccccugcaguccuacggguuccagccgaccaacggcgugggguaccagcccuaccggguggucgugcugagcuucgagcuccugcacgcccccgccacggugugcggccccaagaaguccaccaaccuggucaagaacaagugcgugaacuucaacuucaacggccucaccgggaccggcgugcugaccgagagcaacaagaaguuccugccguuccagcaguucgggcgcgacaucgccgacacgaccgacgcgguccgcgacccccagacccuggagauccucgacaucacccccugcagcuucggcgggguguccgugaucacgccgggcaccaacaccagcaaccaggucgccgugcuguaccagggcgugaacugcaccgagguccccguggccauccacgccgaccagcugacgcccaccuggcggguguacuccaccgggagcaacgucuuccagacccgcgccggcugccucaucggggcggagcacgugaacaacuccuacgagugcgacauccccaucggcgccggcaucugcgccagcuaccagacgcagaccaacuccccgcggcgcgcccggagcguggcgucccagagcaucaucgccuacaccaugucccugggggccgagaacagcgucgccuacuccaacaacagcaucgccauccccaccaacuucacgaucuccgugaccaccgagauccugcccgugagcaugaccaagacgagcgucgacugcaccauguacaucugcggcgacuccaccgagugcagcaaccuccugcugcaguacggguccuucugcacccagcucaaccgcgcgcugacgggcaucgccguggagcaggacaagaacacccaggagguguucgcccaggucaagcagaucuacaagacgcccccgaucaaggacuucgggggcuucaacuucagccagauccugcccgaccccuccaagcccagcaagcgguccuucaucgaggaccuccuguucaacaaggugacccuggccgacgccggcuucaucaagcaguacggggacugccucggcgacaucgcggcccgcgaccugaucugcgcccagaaguucaacgggcugaccgugcucccgccccugcugaccgacgagaugaucgcccaguacaccagcgcccuccuggcgggcaccaucacguccggguggaccuucggcgccggcgccgcccugcagauccccuucgcgaugcagauggccuaccgguucaacgggaucggcgucacccagaacgugcucuacgagaaccagaagcugaucgccaaccaguucaacagcgccaucgggaagauccaggacucccugagcuccaccgccagcgcgcucggcaagcugcaggacguggucaaccagaacgcccaggcccugaacacgcucgugaagcagcuguccagcaacuucggggccaucuccagcgugcugaacgacauccucucccgccuggacaaggucgaggccgaggugcagaucgaccggcugaucaccggccgccuccagagccugcagaccuacgugacccagcagcugauccgggcggccgagauccgcgccagcgccaaccucgccgcgaccaagauguccgagugcguccugggccagagcaagcggguggacuucugcgggaagggcuaccaccugauguccuucccccagagcgccccgcacgggguggucuuccuccacgugacguacguccccgcccaggagaagaacuucaccaccgcccccgcgaucugccacgacggcaaggcccacuucccccgcgaggggguguucguguccaacggcacccacugguucgucacgcagcggaacuucuacgagccgcagaucaucaccaccgacaacaccuucgugagcggcaacugcgacguggucaucgggaucgugaacaacacgguguacgacccccugcagcccgagcuggacuccuucaaggaggagcucgacaaguacuucaagaaccacaccagccccgacgucgaccugggcgacaucuccgggaucaacgccagcguggugaacauccagaaggagaucgaccgccugaacgaggucgccaagaaccucaacgagucccugaucgaccugcaggagcucggcaaguacgagcaguacaucaaguggccgugguacaucuggcugggcuucaucgccgggcugaucgcgaucgugauggugaccaucaugcucugcugcaugaccagcugcugcuccugccugaagggcugcugcagcugcggguccugcugcaaguucgacgaggacgacagcgagcccguccugaagggcgugaagcuccacuacacgugaugacucgagcugguacugcaugcacgcaaugcuagcugccccuuucccguccuggguaccccgagucucccccgaccucgggucccagguaugcucccaccuccaccugccccacucaccaccucugcuaguuccagacaccucccaagcacgcagcaaugcagcucaaaacgcuuagccuagccacacccccacgggaaacagcagugauuaaccuuuagcaauaaacgaaaguuuaacuaagcuauacuaaccccaggguuggucaauuucgugccagccacacccuggagcuagcaaaaaaaaaaaaaaaaaaaaaaaaaaaaaagcauaugacuaaaaaaaaaaaaaaaaaaaaaaaaaaaaaaaaaaaaaaaaaaaaaaaaaaaaaaaaaaaaaaaaaaaaaa

SEQ ID NO: 26731 - RNA, 4283 nt, Artificial Sequence
  SARS-CoV-2/Wuhan/WIV05/2019__EPI_ISL_402128 spike protein mRNA gc (1-1273)(S477N_D614G)
agaauaaacuaguauucuucugguccccacagacucagagagaacccgccaccauguucguguuccugguccuccugccccuggugagcucccagugcgugaaccucaccacccgcacgcagcugccgcccgccuacaccaacagcuucacccggggcgucuacuaccccgacaagguguuccgcuccagcgugcugcacuccacccaggaccucuuccugcccuucuucagcaacgucacgugguuccacgccauccacguguccgggaccaacggcaccaagcgguucgacaacccggugcugcccuucaacgacggggucuacuucgcgagcaccgagaaguccaacaucauccgcggcuggaucuucgggacgacccucgacagcaagacccagucccugcugaucgugaacaacgccaccaacguggucaucaaggugugcgaguuccaguucugcaacgaccccuuccucggcguguacuaccacaagaacaacaagagcuggauggaguccgaguuccgggucuacagcuccgccaacaacugcacguucgaguacgugagccagcccuuccugauggaccuggagggcaagcaggggaacuucaagaaccuccgcgaguucguguucaagaacaucgacggcuacuucaagaucuacuccaagcacaccccgaucaaccugguccgggaccugccccagggguucagcgcccucgagccccugguggaccugcccaucggcaucaacaucacccgcuuccagacccuccuggcccugcaccgguccuaccucacgccgggggacagcagcuccggcuggaccgcgggcgccgccgccuacuacgugggguaccugcagccccgcaccuuccugcucaaguacaacgagaacggcaccaucacggacgcggucgacugcgcccuggacccccugagcgagaccaagugcacccucaaguccuucaccguggagaaggggaucuaccagacgagcaacuuccgggugcagcccaccgaguccaucguccgcuucccgaacaucaccaaccugugccccuucggcgagguguucaacgccacccgguucgccagcgucuacgccuggaaccgcaagcggaucuccaacugcguggcggacuacagcgugcuguacaacuccgccagcuucuccacguucaagugcuacggcgucagccccaccaagcucaacgaccugugcuucaccaacguguacgccgacuccuucgugauccgcggggacgagguccggcagaucgcccccggccagaccgggaagaucgccgacuacaacuacaagcugccggacgacuucacgggcugcgugaucgcguggaacagcaacaaccucgacuccaaggucgggggcaacuacaacuaccuguaccgccuguuccgcaagagcaaccucaagcccuucgagcgggacaucuccaccgagaucuaccaggccggcaacacccccugcaacgggguggagggcuucaacugcuacuucccccugcagagcuacggguuccagccgaccaacggcgugggguaccagcccuaccggguggucgugcuguccuucgagcuccugcacgcccccgccacggugugcggccccaagaaguccaccaaccuggucaagaacaagugcgugaacuucaacuucaacggccucaccgggaccggcgugcugaccgagagcaacaagaaguuccugccguuccagcaguucgggcgcgacaucgccgacacgaccgacgcgguccgcgacccccagacccuggagauccucgacaucacccccugcagcuucggcggggugagcgugaucacgccgggcaccaacaccuccaaccaggucgccgugcuguaccagggcgugaacugcaccgagguccccguggccauccacgccgaccagcugacgcccaccuggcggguguacagcaccggguccaacgucuuccagacccgcgccggcugccucaucggggcggagcacgugaacaacagcuacgagugcgacauccccaucggcgccggcaucugcgccuccuaccagacgcagaccaacagcccgcggcgcgcccgguccguggcgagccaguccaucaucgccuacaccaugagccugggggccgagaacuccgucgccuacagcaacaacuccaucgccauccccaccaacuucacgaucagcgugaccaccgagauccugcccguguccaugaccaagacgagcgucgacugcaccauguacaucugcggcgacagcaccgagugcuccaaccuccugcugcaguacgggagcuucugcacccagcucaaccgcgcgcugacgggcaucgccguggagcaggacaagaacacccaggagguguucgcccaggucaagcagaucuacaagacgcccccgaucaaggacuucgggggcuucaacuucucccagauccugcccgaccccagcaagcccuccaagcggagcuucaucgaggaccuccuguucaacaaggugacccuggccgacgccggcuucaucaagcaguacggggacugccucggcgacaucgcggcccgcgaccugaucugcgcccagaaguucaacgggcugaccgugcucccgccccugcugaccgacgagaugaucgcccaguacaccuccgcccuccuggcgggcaccaucacgagcggguggaccuucggcgccggcgccgcccugcagauccccuucgcgaugcagauggccuaccgguucaacgggaucggcgucacccagaacgugcucuacgagaaccagaagcugaucgccaaccaguucaacuccgccaucgggaagauccaggacagccuguccagcaccgccuccgcgcucggcaagcugcaggacguggucaaccagaacgcccaggcccugaacacgcucgugaagcagcugagcuccaacuucggggccaucagcuccgugcugaacgacauccucagccgccuggacaaggucgaggccgaggugcagaucgaccggcugaucaccggccgccuccagucccugcagaccuacgugacccagcagcugauccgggcggccgagauccgcgccagcgccaaccucgccgcgaccaagaugagcgagugcguccugggccaguccaagcggguggacuucugcgggaagggcuaccaccugaugagcuucccccaguccgccccgcacgggguggucuuccuccacgugacguacguccccgcccaggagaagaacuucaccaccgcccccgcgaucugccacgacggcaaggcccacuucccccgcgaggggguguucgugagcaacggcacccacugguucgucacgcagcggaacuucuacgagccgcagaucaucaccaccgacaacaccuucguguccggcaacugcgacguggucaucgggaucgugaacaacacgguguacgacccccugcagcccgagcuggacagcuucaaggaggagcucgacaaguacuucaagaaccacaccucccccgacgucgaccugggcgacaucagcgggaucaacgccuccguggugaacauccagaaggagaucgaccgccugaacgaggucgccaagaaccucaacgagagccugaucgaccugcaggagcucggcaaguacgagcaguacaucaaguggccgugguacaucuggcugggcuucaucgccgggcugaucgcgaucgugauggugaccaucaugcucugcugcaugaccuccugcugcagcugccugaagggcugcugcuccugcgggagcugcugcaaguucgacgaggacgacuccgagcccguccugaagggcgugaagcuccacuacacgugaugacucgagcugguacugcaugcacgcaaugcuagcugccccuuucccguccuggguaccccgagucucccccgaccucgggucccagguaugcucccaccuccaccugccccacucaccaccucugcuaguuccagacaccucccaagcacgcagcaaugcagcucaaaacgcuuagccuagccacacccccacgggaaacagcagugauuaaccuuuagcaauaaacgaaaguuuaacuaagcuauacuaaccccaggguuggucaauuucgugccagccacacccuggagcuagcaaaaaaaaaaaaaaaaaaaaaaaaaaaaaagcauaugacuaaaaaaaaaaaaaaaaaaaaaaaaaaaaaaaaaaaaaaaaaaaaaaaaaaaaaaaaaaaaaaaaaaaaaa

SEQ ID NO: 26732 - RNA, 4283 nt, Artificial Sequence
  SARS-CoV-2/Wuhan/WIV05/2019__EPI_ISL_402128 spike protein mRNA gc (1-1273)(N501Y_D614G)
agaauaaacuaguauucuucugguccccacagacucagagagaacccgccaccauguucguguuccugguccuccugccccuggugagcucccagugcgugaaccucaccacccgcacgcagcugccgcccgccuacaccaacagcuucacccggggcgucuacuaccccgacaagguguuccgcuccagcgugcugcacuccacccaggaccucuuccugcccuucuucagcaacgucacgugguuccacgccauccacguguccgggaccaacggcaccaagcgguucgacaacccggugcugcccuucaacgacggggucuacuucgcgagcaccgagaaguccaacaucauccgcggcuggaucuucgggacgacccucgacagcaagacccagucccugcugaucgugaacaacgccaccaacguggucaucaaggugugcgaguuccaguucugcaacgaccccuuccucggcguguacuaccacaagaacaacaagagcuggauggaguccgaguuccgggucuacagcuccgccaacaacugcacguucgaguacgugagccagcccuuccugauggaccuggagggcaagcaggggaacuucaagaaccuccgcgaguucguguucaagaacaucgacggcuacuucaagaucuacuccaagcacaccccgaucaaccugguccgggaccugccccagggguucagcgcccucgagccccugguggaccugcccaucggcaucaacaucacccgcuuccagacccuccuggcccugcaccgguccuaccucacgccgggggacagcagcuccggcuggaccgcgggcgccgccgccuacuacgugggguaccugcagccccgcaccuuccugcucaaguacaacgagaacggcaccaucacggacgcggucgacugcgcccuggacccccugagcgagaccaagugcacccucaaguccuucaccguggagaaggggaucuaccagacgagcaacuuccgggugcagcccaccgaguccaucguccgcuucccgaacaucaccaaccugugccccuucggcgagguguucaacgccacccgguucgccagcgucuacgccuggaaccgcaagcggaucuccaacugcguggcggacuacagcgugcuguacaacuccgccagcuucuccacguucaagugcuacggcgucagccccaccaagcucaacgaccugugcuucaccaacguguacgccgacuccuucgugauccgcggggacgagguccggcagaucgcccccggccagaccgggaagaucgccgacuacaacuacaagcugccggacgacuucacgggcugcgugaucgcguggaacagcaacaaccucgacuccaaggucgggggcaacuacaacuaccuguaccgccuguuccgcaagagcaaccucaagcccuucgagcgggacaucuccaccgagaucuaccaggccggcagcacccccugcaacgggguggagggcuucaacugcuacuucccccugcaguccuacggguuccagccgaccuacggcgugggguaccagcccuaccggguggucgugcugagcuucgagcuccugcacgcccccgccacggugugcggccccaagaaguccaccaaccuggucaagaacaagugcgugaacuucaacuucaacggccucaccgggaccggcgugcugaccgagagcaacaagaaguuccugccguuccagcaguucgggcgcgacaucgccgacacgaccgacgcgguccgcgacccccagacccuggagauccucgacaucacccccugcagcuucggcgggguguccgugaucacgccgggcaccaacaccagcaaccaggucgccgugcuguaccagggcgugaacugcaccgagguccccguggccauccacgccgaccagcugacgcccaccuggcggguguacuccaccgggagcaacgucuuccagacccgcgccggcugccucaucggggcggagcacgugaacaacuccuacgagugcgacauccccaucggcgccggcaucugcgccagcuaccagacgcagaccaacuccccgcggcgcgcccggagcguggcgucccagagcaucaucgccuacaccaugucccugggggccgagaacagcgucgccuacuccaacaacagcaucgccauccccaccaacuucacgaucuccgugaccaccgagauccugcccgugagcaugaccaagacgagcgucgacugcaccauguacaucugcggcgacuccaccgagugcagcaaccuccugcugcaguacggguccuucugcacccagcucaaccgcgcgcugacgggcaucgccguggagcaggacaagaacacccaggagguguucgcccaggucaagcagaucuacaagacgcccccgaucaaggacuucgggggcuucaacuucagccagauccugcccgaccccuccaagcccagcaagcgguccuucaucgaggaccuccuguucaacaaggugacccuggccgacgccggcuucaucaagcaguacggggacugccucggcgacaucgcggcccgcgaccugaucugcgcccagaaguucaacgggcugaccgugcucccgccccugcugaccgacgagaugaucgcccaguacaccagcgcccuccuggcgggcaccaucacguccggguggaccuucggcgccggcgccgcccugcagauccccuucgcgaugcagauggccuaccgguucaacgggaucggcgucacccagaacgugcucuacgagaaccagaagcugaucgccaaccaguucaacagcgccaucgggaagauccaggacucccugagcuccaccgccagcgcgcucggcaagcugcaggacguggucaaccagaacgcccaggcccugaacacgcucgugaagcagcuguccagcaacuucggggccaucuccagcgugcugaacgacauccucucccgccuggacaaggucgaggccgaggugcagaucgaccggcugaucaccggccgccuccagagccugcagaccuacgugacccagcagcugauccgggcggccgagauccgcgccagcgccaaccucgccgcgaccaagauguccgagugcguccugggccagagcaagcggguggacuucugcgggaagggcuaccaccugauguccuucccccagagcgccccgcacgggguggucuuccuccacgugacguacguccccgcccaggagaagaacuucaccaccgcccccgcgaucugccacgacggcaaggcccacuucccccgcgaggggguguucguguccaacggcacccacugguucgucacgcagcggaacuucuacgagccgcagaucaucaccaccgacaacaccuucgugagcggcaacugcgacguggucaucgggaucgugaacaacacgguguacgacccccugcagcccgagcuggacuccuucaaggaggagcucgacaaguacuucaagaaccacaccagccccgacgucgaccugggcgacaucuccgggaucaacgccagcguggugaacauccagaaggagaucgaccgccugaacgaggucgccaagaaccucaacgagucccugaucgaccugcaggagcucggcaaguacgagcaguacaucaaguggccgugguacaucuggcugggcuucaucgccgggcugaucgcgaucgugauggugaccaucaugcucugcugcaugaccagcugcugcuccugccugaagggcugcugcagcugcggguccugcugcaaguucgacgaggacgacagcgagcccguccugaagggcgugaagcuccacuacacgugaugacucgagcugguacugcaugcacgcaaugcuagcugccccuuucccguccuggguaccccgagucucccccgaccucgggucccagguaugcucccaccuccaccugccccacucaccaccucugcuaguuccagacaccucccaagcacgcagcaaugcagcucaaaacgcuuagccuagccacacccccacgggaaacagcagugauuaaccuuuagcaauaaacgaaaguuuaacuaagcuauacuaaccccaggguuggucaauuucgugccagccacacccuggagcuagcaaaaaaaaaaaaaaaaaaaaaaaaaaaaaagcauaugacuaaaaaaaaaaaaaaaaaaaaaaaaaaaaaaaaaaaaaaaaaaaaaaaaaaaaaaaaaaaaaaaaaaaaaa

SEQ ID NO: 26733 - RNA, 4277 nt, Artificial Sequence
  SARS-CoV-2/Wuhan/WIV05/2019__EPI_ISL_402128 spike protein mRNA gc (1-1273)(H69del_V70del_D614G)
agaauaaacuaguauucuucugguccccacagacucagagagaacccgccaccauguucguguuccugguccuccugccccuggugagcucccagugcgugaaccucaccacccgcacgcagcugccgcccgccuacaccaacagcuucacccggggcgucuacuaccccgacaagguguuccgcuccagcgugcugcacuccacccaggaccucuuccugcccuucuucagcaacgucacgugguuccacgccaucuccgggaccaacggcaccaagcgguucgacaacccggugcugcccuucaacgacgggguguacuucgcgagcaccgagaaguccaacaucauccgcggcuggaucuucgggacgacccucgacagcaagacccagucccugcugaucgucaacaacgccaccaacguggugaucaaggucugcgaguuccaguucugcaacgaccccuuccucggcguguacuaccacaagaacaacaagagcuggauggaguccgaguuccggguguacagcuccgccaacaacugcacguucgaguacgucagccagcccuuccugauggaccuggagggcaagcaggggaacuucaagaaccuccgcgaguucguguucaagaacaucgacggcuacuucaagaucuacuccaagcacaccccgaucaaccuggugcgggaccugccccagggguucagcgcccucgagccccuggucgaccugcccaucggcaucaacaucacccgcuuccagacccuccuggcccugcaccgguccuaccucacgccgggggacagcagcuccggcuggaccgcgggcgccgccgccuacuacgugggguaccugcagccccgcaccuuccugcucaaguacaacgagaacggcaccaucacggacgcgguggacugcgcccuggacccccugagcgagaccaagugcacccucaaguccuucaccgucgagaaggggaucuaccagacgagcaacuuccgggugcagcccaccgaguccaucgugcgcuucccgaacaucaccaaccugugccccuucggcgaggucuucaacgccacccgguucgccagcguguacgccuggaaccgcaagcggaucuccaacugcgucgcggacuacagcgugcuguacaacuccgccagcuucuccacguucaagugcuacggcgugagccccaccaagcucaacgaccugugcuucaccaacgucuacgccgacuccuucgugauccgcggggacgaggugcggcagaucgcccccggccagaccgggaagaucgccgacuacaacuacaagcugccggacgacuucacgggcugcgucaucgcguggaacagcaacaaccucgacuccaaggucgggggcaacuacaacuaccuguaccgccuguuccgcaagagcaaccucaagcccuucgagcgggacaucuccaccgagaucuaccaggccggcagcacccccugcaacgggguggagggcuucaacugcuacuucccccugcaguccuacggguuccagccgaccaacggcgugggguaccagcccuaccggguggugguccugagcuucgagcuccugcacgcccccgccacggugugcggccccaagaaguccaccaaccuggugaagaacaagugcgucaacuucaacuucaacggccucaccgggaccggcgugcugaccgagagcaacaagaaguuccugccguuccagcaguucgggcgcgacaucgccgacacgaccgacgcggugcgcgacccccagacccuggagauccucgacaucacccccugcagcuucggcggggucuccgugaucacgccgggcaccaacaccagcaaccagguggccguccuguaccagggcgugaacugcaccgaggugcccgucgccauccacgccgaccagcugacgcccaccuggcggguguacuccaccgggagcaacguguuccagacccgcgccggcugccucaucggggcggagcacgucaacaacuccuacgagugcgacauccccaucggcgccggcaucugcgccagcuaccagacgcagaccaacuccccgcggcgcgcccggagcguggcgucccagagcaucaucgccuacaccaugucccugggggccgagaacagcguggccuacuccaacaacagcaucgccauccccaccaacuucacgaucuccgucaccaccgagauccugcccgugagcaugaccaagacgagcguggacugcaccauguacaucugcggcgacuccaccgagugcagcaaccuccugcugcaguacggguccuucugcacccagcucaaccgcgcgcugacgggcaucgccgucgagcaggacaagaacacccaggagguguucgcccaggugaagcagaucuacaagacgcccccgaucaaggacuucgggggcuucaacuucagccagauccugcccgaccccuccaagcccagcaagcgguccuucaucgaggaccuccuguucaacaaggucacccuggccgacgccggcuucaucaagcaguacggggacugccucggcgacaucgcggcccgcgaccugaucugcgcccagaaguucaacgggcugaccgugcucccgccccugcugaccgacgagaugaucgcccaguacaccagcgcccuccuggcgggcaccaucacguccggguggaccuucggcgccggcgccgcccugcagauccccuucgcgaugcagauggccuaccgguucaacgggaucggcgugacccagaacguccucuacgagaaccagaagcugaucgccaaccaguucaacagcgccaucgggaagauccaggacucccugagcuccaccgccagcgcgcucggcaagcugcaggacguggugaaccagaacgcccaggcccugaacacgcucgucaagcagcuguccagcaacuucggggccaucuccagcgugcugaacgacauccucucccgccuggacaagguggaggccgagguccagaucgaccggcugaucaccggccgccuccagagccugcagaccuacgugacccagcagcugauccgggcggccgagauccgcgccagcgccaaccucgccgcgaccaagauguccgagugcgugcugggccagagcaagcgggucgacuucugcgggaagggcuaccaccugauguccuucccccagagcgccccgcacggggugguguuccuccacgucacguacgugcccgcccaggagaagaacuucaccaccgcccccgcgaucugccacgacggcaaggcccacuucccccgcgagggggucuucguguccaacggcacccacugguucgugacgcagcggaacuucuacgagccgcagaucaucaccaccgacaacaccuucgucagcggcaacugcgacguggugaucgggaucgucaacaacacgguguacgacccccugcagcccgagcuggacuccuucaaggaggagcucgacaaguacuucaagaaccacaccagccccgacguggaccugggcgacaucuccgggaucaacgccagcgucgugaacauccagaaggagaucgaccgccugaacgagguggccaagaaccucaacgagucccugaucgaccugcaggagcucggcaaguacgagcaguacaucaaguggccgugguacaucuggcugggcuucaucgccgggcugaucgcgaucgucauggugaccaucaugcucugcugcaugaccagcugcugcuccugccugaagggcugcugcagcugcggguccugcugcaaguucgacgaggacgacagcgagcccgugcugaagggcgucaagcuccacuacacgugaugacucgagcugguacugcaugcacgcaaugcuagcugccccuuucccguccuggguaccccgagucucccccgaccucgggucccagguaugcucccaccuccaccugccccacucaccaccucugcuaguuccagacaccucccaagcacgcagcaaugcagcucaaaacgcuuagccuagccacacccccacgggaaacagcagugauuaaccuuuagcaauaaacgaaaguuuaacuaagcuauacuaaccccaggguuggucaauuucgugccagccacacccuggagcuagcaaaaaaaaaaaaaaaaaaaaaaaaaaaaaagcauaugacuaaaaaaaaaaaaaaaaaaaaaaaaaaaaaaaaaaaaaaaaaaaaaaaaaaaaaaaaaaaaaaaaaaaaaa

SEQ ID NO: 26734 - RNA, 4283 nt, Artificial Sequence
  SARS-CoV-2/Wuhan/WIV05/2019__EPI_ISL_402128 spike protein mRNA gc (1-1273)(Y453F_D614G)
agaauaaacuaguauucuucugguccccacagacucagagagaacccgccaccauguucguguuccugguccuccugccccuggugagcucccagugcgugaaccucaccacccgcacgcagcugccgcccgccuacaccaacagcuucacccggggcgucuacuaccccgacaagguguuccgcuccagcgugcugcacuccacccaggaccucuuccugcccuucuucagcaacgucacgugguuccacgccauccacguguccgggaccaacggcaccaagcgguucgacaacccggugcugcccuucaacgacggggucuacuucgcgagcaccgagaaguccaacaucauccgcggcuggaucuucgggacgacccucgacagcaagacccagucccugcugaucgugaacaacgccaccaacguggucaucaaggugugcgaguuccaguucugcaacgaccccuuccucggcguguacuaccacaagaacaacaagagcuggauggaguccgaguuccgggucuacagcuccgccaacaacugcacguucgaguacgugagccagcccuuccugauggaccuggagggcaagcaggggaacuucaagaaccuccgcgaguucguguucaagaacaucgacggcuacuucaagaucuacuccaagcacaccccgaucaaccugguccgggaccugccccagggguucagcgcccucgagccccugguggaccugcccaucggcaucaacaucacccgcuuccagacccuccuggcccugcaccgguccuaccucacgccgggggacagcagcuccggcuggaccgcgggcgccgccgccuacuacgugggguaccugcagccccgcaccuuccugcucaaguacaacgagaacggcaccaucacggacgcggucgacugcgcccuggacccccugagcgagaccaagugcacccucaaguccuucaccguggagaaggggaucuaccagacgagcaacuuccgggugcagcccaccgaguccaucguccgcuucccgaacaucaccaaccugugccccuucggcgagguguucaacgccacccgguucgccagcgucuacgccuggaaccgcaagcggaucuccaacugcguggcggacuacagcgugcuguacaacuccgccagcuucuccacguucaagugcuacggcgucagccccaccaagcucaacgaccugugcuucaccaacguguacgccgacuccuucgugauccgcggggacgagguccggcagaucgcccccggccagaccgggaagaucgccgacuacaacuacaagcugccggacgacuucacgggcugcgugaucgcguggaacagcaacaaccucgacuccaaggucgggggcaacuacaacuaccuguuccgccuguuccgcaagagcaaccucaagcccuucgagcgggacaucuccaccgagaucuaccaggccggcagcacccccugcaacgggguggagggcuucaacugcuacuucccccugcaguccuacggguuccagccgaccaacggcgugggguaccagcccuaccggguggucgugcugagcuucgagcuccugcacgcccccgccacggugugcggccccaagaaguccaccaaccuggucaagaacaagugcgugaacuucaacuucaacggccucaccgggaccggcgugcugaccgagagcaacaagaaguuccugccguuccagcaguucgggcgcgacaucgccgacacgaccgacgcgguccgcgacccccagacccuggagauccucgacaucacccccugcagcuucggcgggguguccgugaucacgccgggcaccaacaccagcaaccaggucgccgugcuguaccagggcgugaacugcaccgagguccccguggccauccacgccgaccagcugacgcccaccuggcggguguacuccaccgggagcaacgucuuccagacccgcgccggcugccucaucggggcggagcacgugaacaacuccuacgagugcgacauccccaucggcgccggcaucugcgccagcuaccagacgcagaccaacuccccgcggcgcgcccggagcguggcgucccagagcaucaucgccuacaccaugucccugggggccgagaacagcgucgccuacuccaacaacagcaucgccauccccaccaacuucacgaucuccgugaccaccgagauccugcccgugagcaugaccaagacgagcgucgacugcaccauguacaucugcggcgacuccaccgagugcagcaaccuccugcugcaguacggguccuucugcacccagcucaaccgcgcgcugacgggcaucgccguggagcaggacaagaacacccaggagguguucgcccaggucaagcagaucuacaagacgcccccgaucaaggacuucgggggcuucaacuucagccagauccugcccgaccccuccaagcccagcaagcgguccuucaucgaggaccuccuguucaacaaggugacccuggccgacgccggcuucaucaagcaguacggggacugccucggcgacaucgcggcccgcgaccugaucugcgcccagaaguucaacgggcugaccgugcucccgccccugcugaccgacgagaugaucgcccaguacaccagcgcccuccuggcgggcaccaucacguccggguggaccuucggcgccggcgccgcccugcagauccccuucgcgaugcagauggccuaccgguucaacgggaucggcgucacccagaacgugcucuacgagaaccagaagcugaucgccaaccaguucaacagcgccaucgggaagauccaggacucccugagcuccaccgccagcgcgcucggcaagcugcaggacguggucaaccagaacgcccaggcccugaacacgcucgugaagcagcuguccagcaacuucggggccaucuccagcgugcugaacgacauccucucccgccuggacaaggucgaggccgaggugcagaucgaccggcugaucaccggccgccuccagagccugcagaccuacgugacccagcagcugauccgggcggccgagauccgcgccagcgccaaccucgccgcgaccaagauguccgagugcguccugggccagagcaagcggguggacuucugcgggaagggcuaccaccugauguccuucccccagagcgccccgcacgggguggucuuccuccacgugacguacguccccgcccaggagaagaacuucaccaccgcccccgcgaucugccacgacggcaaggcccacuucccccgcgaggggguguucguguccaacggcacccacugguucgucacgcagcggaacuucuacgagccgcagaucaucaccaccgacaacaccuucgugagcggcaacugcgacguggucaucgggaucgugaacaacacgguguacgacccccugcagcccgagcuggacuccuucaaggaggagcucgacaaguacuucaagaaccacaccagccccgacgucgaccugggcgacaucuccgggaucaacgccagcguggugaacauccagaaggagaucgaccgccugaacgaggucgccaagaaccucaacgagucccugaucgaccugcaggagcucggcaaguacgagcaguacaucaaguggccgugguacaucuggcugggcuucaucgccgggcugaucgcgaucgugauggugaccaucaugcucugcugcaugaccagcugcugcuccugccugaagggcugcugcagcugcggguccugcugcaaguucgacgaggacgacagcgagcccguccugaagggcgugaagcuccacuacacgugaugacucgagcugguacugcaugcacgcaaugcuagcugccccuuucccguccuggguaccccgagucucccccgaccucgggucccagguaugcucccaccuccaccugccccacucaccaccucugcuaguuccagacaccucccaagcacgcagcaaugcagcucaaaacgcuuagccuagccacacccccacgggaaacagcagugauuaaccuuuagcaauaaacgaaaguuuaacuaagcuauacuaaccccaggguuggucaauuucgugccagccacacccuggagcuagcaaaaaaaaaaaaaaaaaaaaaaaaaaaaaagcauaugacuaaaaaaaaaaaaaaaaaaaaaaaaaaaaaaaaaaaaaaaaaaaaaaaaaaaaaaaaaaaaaaaaaaaaaa

SEQ ID NO: 26735 - RNA, 4283 nt, Artificial Sequence
  SARS-CoV-2/Wuhan/WIV05/2019__EPI_ISL_402128 spike protein mRNA gc (1-1273)(D614G_I692V)
agaauaaacuaguauucuucugguccccacagacucagagagaacccgccaccauguucguguuccugguccuccugccccuggugagcucccagugcgugaaccucaccacccgcacgcagcugccgcccgccuacaccaacagcuucacccggggcgucuacuaccccgacaagguguuccgcuccagcgugcugcacuccacccaggaccucuuccugcccuucuucagcaacgucacgugguuccacgccauccacguguccgggaccaacggcaccaagcgguucgacaacccggugcugcccuucaacgacggggucuacuucgcgagcaccgagaaguccaacaucauccgcggcuggaucuucgggacgacccucgacagcaagacccagucccugcugaucgugaacaacgccaccaacguggucaucaaggugugcgaguuccaguucugcaacgaccccuuccucggcguguacuaccacaagaacaacaagagcuggauggaguccgaguuccgggucuacagcuccgccaacaacugcacguucgaguacgugagccagcccuuccugauggaccuggagggcaagcaggggaacuucaagaaccuccgcgaguucguguucaagaacaucgacggcuacuucaagaucuacuccaagcacaccccgaucaaccugguccgggaccugccccagggguucagcgcccucgagccccugguggaccugcccaucggcaucaacaucacccgcuuccagacccuccuggcccugcaccgguccuaccucacgccgggggacagcagcuccggcuggaccgcgggcgccgccgccuacuacgugggguaccugcagccccgcaccuuccugcucaaguacaacgagaacggcaccaucacggacgcggucgacugcgcccuggacccccugagcgagaccaagugcacccucaaguccuucaccguggagaaggggaucuaccagacgagcaacuuccgggugcagcccaccgaguccaucguccgcuucccgaacaucaccaaccugugccccuucggcgagguguucaacgccacccgguucgccagcgucuacgccuggaaccgcaagcggaucuccaacugcguggcggacuacagcgugcuguacaacuccgccagcuucuccacguucaagugcuacggcgucagccccaccaagcucaacgaccugugcuucaccaacguguacgccgacuccuucgugauccgcggggacgagguccggcagaucgcccccggccagaccgggaagaucgccgacuacaacuacaagcugccggacgacuucacgggcugcgugaucgcguggaacagcaacaaccucgacuccaaggucgggggcaacuacaacuaccuguaccgccuguuccgcaagagcaaccucaagcccuucgagcgggacaucuccaccgagaucuaccaggccggcagcacccccugcaacgggguggagggcuucaacugcuacuucccccugcaguccuacggguuccagccgaccaacggcgugggguaccagcccuaccggguggucgugcugagcuucgagcuccugcacgcccccgccacggugugcggccccaagaaguccaccaaccuggucaagaacaagugcgugaacuucaacuucaacggccucaccgggaccggcgugcugaccgagagcaacaagaaguuccugccguuccagcaguucgggcgcgacaucgccgacacgaccgacgcgguccgcgacccccagacccuggagauccucgacaucacccccugcagcuucggcgggguguccgugaucacgccgggcaccaacaccagcaaccaggucgccgugcuguaccagggcgugaacugcaccgagguccccguggccauccacgccgaccagcugacgcccaccuggcggguguacuccaccgggagcaacgucuuccagacccgcgccggcugccucaucggggcggagcacgugaacaacuccuacgagugcgacauccccaucggcgccggcaucugcgccagcuaccagacgcagaccaacuccccgcggcgcgcccggagcguggcgucccagagcgucaucgccuacaccaugucccugggggccgagaacagcguggccuacuccaacaacagcaucgccauccccaccaacuucacgaucuccgugaccaccgagauccugcccgucagcaugaccaagacgagcguggacugcaccauguacaucugcggcgacuccaccgagugcagcaaccuccugcugcaguacggguccuucugcacccagcucaaccgcgcgcugacgggcaucgccguggagcaggacaagaacacccaggaggucuucgcccaggugaagcagaucuacaagacgcccccgaucaaggacuucgggggcuucaacuucagccagauccugcccgaccccuccaagcccagcaagcgguccuucaucgaggaccuccuguucaacaaggugacccuggccgacgccggcuucaucaagcaguacggggacugccucggcgacaucgcggcccgcgaccugaucugcgcccagaaguucaacgggcugaccguccucccgccccugcugaccgacgagaugaucgcccaguacaccagcgcccuccuggcgggcaccaucacguccggguggaccuucggcgccggcgccgcccugcagauccccuucgcgaugcagauggccuaccgguucaacgggaucggcgugacccagaacgugcucuacgagaaccagaagcugaucgccaaccaguucaacagcgccaucgggaagauccaggacucccugagcuccaccgccagcgcgcucggcaagcugcaggacgucgugaaccagaacgcccaggcccugaacacgcucgugaagcagcuguccagcaacuucggggccaucuccagcguccugaacgacauccucucccgccuggacaagguggaggccgaggugcagaucgaccggcugaucaccggccgccuccagagccugcagaccuacgucacccagcagcugauccgggcggccgagauccgcgccagcgccaaccucgccgcgaccaagauguccgagugcgugcugggccagagcaagcggguggacuucugcgggaagggcuaccaccugauguccuucccccagagcgccccgcacggggucguguuccuccacgucacguacgugcccgcccaggagaagaacuucaccaccgcccccgcgaucugccacgacggcaaggcccacuucccccgcgaggggguguucgucuccaacggcacccacugguucgugacgcagcggaacuucuacgagccgcagaucaucaccaccgacaacaccuucgugagcggcaacugcgacgucgugaucgggaucgugaacaacacggucuacgacccccugcagcccgagcuggacuccuucaaggaggagcucgacaaguacuucaagaaccacaccagccccgacguggaccugggcgacaucuccgggaucaacgccagcguggucaacauccagaaggagaucgaccgccugaacgagguggccaagaaccucaacgagucccugaucgaccugcaggagcucggcaaguacgagcaguacaucaaguggccgugguacaucuggcugggcuucaucgccgggcugaucgcgaucgugauggucaccaucaugcucugcugcaugaccagcugcugcuccugccugaagggcugcugcagcugcggguccugcugcaaguucgacgaggacgacagcgagcccgugcugaagggcgugaagcuccacuacacgugaugacucgagcugguacugcaugcacgcaaugcuagcugccccuuucccguccuggguaccccgagucucccccgaccucgggucccagguaugcucccaccuccaccugccccacucaccaccucugcuaguuccagacaccucccaagcacgcagcaaugcagcucaaaacgcuuagccuagccacacccccacgggaaacagcagugauuaaccuuuagcaauaaacgaaaguuuaacuaagcuauacuaaccccaggguuggucaauuucgugccagccacacccuggagcuagcaaaaaaaaaaaaaaaaaaaaaaaaaaaaaagcauaugacuaaaaaaaaaaaaaaaaaaaaaaaaaaaaaaaaaaaaaaaaaaaaaaaaaaaaaaaaaaaaaaaaaaaaaa

SEQ ID NO: 26736 - RNA, 4283 nt, Artificial Sequence
  SARS-CoV-2/Wuhan/WIV05/2019__EPI_ISL_402128 spike protein mRNA gc (1-1273)(D614G_M1229I)
agaauaaacuaguauucuucugguccccacagacucagagagaacccgccaccauguucguguuccugguccuccugccccuggugagcucccagugcgugaaccucaccacccgcacgcagcugccgcccgccuacaccaacagcuucacccggggcgucuacuaccccgacaagguguuccgcuccagcgugcugcacuccacccaggaccucuuccugcccuucuucagcaacgucacgugguuccacgccauccacguguccgggaccaacggcaccaagcgguucgacaacccggugcugcccuucaacgacggggucuacuucgcgagcaccgagaaguccaacaucauccgcggcuggaucuucgggacgacccucgacagcaagacccagucccugcugaucgugaacaacgccaccaacguggucaucaaggugugcgaguuccaguucugcaacgaccccuuccucggcguguacuaccacaagaacaacaagagcuggauggaguccgaguuccgggucuacagcuccgccaacaacugcacguucgaguacgugagccagcccuuccugauggaccuggagggcaagcaggggaacuucaagaaccuccgcgaguucguguucaagaacaucgacggcuacuucaagaucuacuccaagcacaccccgaucaaccugguccgggaccugccccagggguucagcgcccucgagccccugguggaccugcccaucggcaucaacaucacccgcuuccagacccuccuggcccugcaccgguccuaccucacgccgggggacagcagcuccggcuggaccgcgggcgccgccgccuacuacgugggguaccugcagccccgcaccuuccugcucaaguacaacgagaacggcaccaucacggacgcggucgacugcgcccuggacccccugagcgagaccaagugcacccucaaguccuucaccguggagaaggggaucuaccagacgagcaacuuccgggugcagcccaccgaguccaucguccgcuucccgaacaucaccaaccugugccccuucggcgagguguucaacgccacccgguucgccagcgucuacgccuggaaccgcaagcggaucuccaacugcguggcggacuacagcgugcuguacaacuccgccagcuucuccacguucaagugcuacggcgucagccccaccaagcucaacgaccugugcuucaccaacguguacgccgacuccuucgugauccgcggggacgagguccggcagaucgcccccggccagaccgggaagaucgccgacuacaacuacaagcugccggacgacuucacgggcugcgugaucgcguggaacagcaacaaccucgacuccaaggucgggggcaacuacaacuaccuguaccgccuguuccgcaagagcaaccucaagcccuucgagcgggacaucuccaccgagaucuaccaggccggcagcacccccugcaacgggguggagggcuucaacugcuacuucccccugcaguccuacggguuccagccgaccaacggcgugggguaccagcccuaccggguggucgugcugagcuucgagcuccugcacgcccccgccacggugugcggccccaagaaguccaccaaccuggucaagaacaagugcgugaacuucaacuucaacggccucaccgggaccggcgugcugaccgagagcaacaagaaguuccugccguuccagcaguucgggcgcgacaucgccgacacgaccgacgcgguccgcgacccccagacccuggagauccucgacaucacccccugcagcuucggcgggguguccgugaucacgccgggcaccaacaccagcaaccaggucgccgugcuguaccagggcgugaacugcaccgagguccccguggccauccacgccgaccagcugacgcccaccuggcggguguacuccaccgggagcaacgucuuccagacccgcgccggcugccucaucggggcggagcacgugaacaacuccuacgagugcgacauccccaucggcgccggcaucugcgccagcuaccagacgcagaccaacuccccgcggcgcgcccggagcguggcgucccagagcaucaucgccuacaccaugucccugggggccgagaacagcgucgccuacuccaacaacagcaucgccauccccaccaacuucacgaucuccgugaccaccgagauccugcccgugagcaugaccaagacgagcgucgacugcaccauguacaucugcggcgacuccaccgagugcagcaaccuccugcugcaguacggguccuucugcacccagcucaaccgcgcgcugacgggcaucgccguggagcaggacaagaacacccaggagguguucgcccaggucaagcagaucuacaagacgcccccgaucaaggacuucgggggcuucaacuucagccagauccugcccgaccccuccaagcccagcaagcgguccuucaucgaggaccuccuguucaacaaggugacccuggccgacgccggcuucaucaagcaguacggggacugccucggcgacaucgcggcccgcgaccugaucugcgcccagaaguucaacgggcugaccgugcucccgccccugcugaccgacgagaugaucgcccaguacaccagcgcccuccuggcgggcaccaucacguccggguggaccuucggcgccggcgccgcccugcagauccccuucgcgaugcagauggccuaccgguucaacgggaucggcgucacccagaacgugcucuacgagaaccagaagcugaucgccaaccaguucaacagcgccaucgggaagauccaggacucccugagcuccaccgccagcgcgcucggcaagcugcaggacguggucaaccagaacgcccaggcccugaacacgcucgugaagcagcuguccagcaacuucggggccaucuccagcgugcugaacgacauccucucccgccuggacaaggucgaggccgaggugcagaucgaccggcugaucaccggccgccuccagagccugcagaccuacgugacccagcagcugauccgggcggccgagauccgcgccagcgccaaccucgccgcgaccaagauguccgagugcguccugggccagagcaagcggguggacuucugcgggaagggcuaccaccugauguccuucccccagagcgccccgcacgggguggucuuccuccacgugacguacguccccgcccaggagaagaacuucaccaccgcccccgcgaucugccacgacggcaaggcccacuucccccgcgaggggguguucguguccaacggcacccacugguucgucacgcagcggaacuucuacgagccgcagaucaucaccaccgacaacaccuucgugagcggcaacugcgacguggucaucgggaucgugaacaacacgguguacgacccccugcagcccgagcuggacuccuucaaggaggagcucgacaaguacuucaagaaccacaccagccccgacgucgaccugggcgacaucuccgggaucaacgccagcguggugaacauccagaaggagaucgaccgccugaacgaggucgccaagaaccucaacgagucccugaucgaccugcaggagcucggcaaguacgagcaguacaucaaguggccgugguacaucuggcugggcuucaucgccgggcugaucgcgaucgugaucgugaccaucaugcucugcugcaugaccagcugcugcuccugccugaagggcugcugcagcugcggguccugcugcaaguucgacgaggacgacagcgagcccguccugaagggcgugaagcuccacuacacgugaugacucgagcugguacugcaugcacgcaaugcuagcugccccuuucccguccuggguaccccgagucucccccgaccucgggucccagguaugcucccaccuccaccugccccacucaccaccucugcuaguuccagacaccucccaagcacgcagcaaugcagcucaaaacgcuuagccuagccacacccccacgggaaacagcagugauuaaccuuuagcaauaaacgaaaguuuaacuaagcuauacuaaccccaggguuggucaauuucgugccagccacacccuggagcuagcaaaaaaaaaaaaaaaaaaaaaaaaaaaaaagcauaugacuaaaaaaaaaaaaaaaaaaaaaaaaaaaaaaaaaaaaaaaaaaaaaaaaaaaaaaaaaaaaaaaaaaaaaa

SEQ ID NO: 26737 - RNA, 4277 nt, Artificial Sequence
  SARS-CoV-2/Wuhan/WIV05/2019__EPI_ISL_402128 spike protein mRNA gc (1-1273)(H69del_V70del_A222V_Y453F_S477N_D614G_I692V)
agaauaaacuaguauucuucugguccccacagacucagagagaacccgccaccauguucguguuccugguccuccugccccuggugagcucccagugcgugaaccucaccacccgcacgcagcugccgcccgccuacaccaacagcuucacccggggcgucuacuaccccgacaagguguuccgcuccagcgugcugcacuccacccaggaccucuuccugcccuucuucagcaacgucacgugguuccacgccaucuccgggaccaacggcaccaagcgguucgacaacccggugcugcccuucaacgacgggguguacuucgcgagcaccgagaaguccaacaucauccgcggcuggaucuucgggacgacccucgacagcaagacccagucccugcugaucgucaacaacgccaccaacguggugaucaaggucugcgaguuccaguucugcaacgaccccuuccucggcguguacuaccacaagaacaacaagagcuggauggaguccgaguuccggguguacagcuccgccaacaacugcacguucgaguacgucagccagcccuuccugauggaccuggagggcaagcaggggaacuucaagaaccuccgcgaguucguguucaagaacaucgacggcuacuucaagaucuacuccaagcacaccccgaucaaccuggugcgggaccugccccagggguucagcguccucgagccccugguggaccugcccaucggcaucaacaucacccgcuuccagacccuccuggcccugcaccgguccuaccucacgccgggggacagcagcuccggcuggaccgccggcgcggccgccuacuacgugggguaccugcagccccgcaccuuccugcucaaguacaacgagaacggcaccaucacggacgccgucgacugcgcgcuggacccccugagcgagaccaagugcacccucaaguccuucaccguggagaaggggaucuaccagacgagcaacuuccgggugcagcccaccgaguccaucguccgcuucccgaacaucaccaaccugugccccuucggcgagguguucaacgccacccgguucgccagcgucuacgccuggaaccgcaagcggaucuccaacugcguggccgacuacagcgugcuguacaacuccgcgagcuucuccacguucaagugcuacggcgucagccccaccaagcucaacgaccugugcuucaccaacguguacgccgacuccuucgugauccgcggggacgagguccggcagaucgcccccggccagaccgggaagaucgccgacuacaacuacaagcugccggacgacuucacgggcugcgugaucgccuggaacagcaacaaccucgacuccaaggucgggggcaacuacaacuaccuguuccgccuguuccgcaagagcaaccucaagcccuucgagcgggacaucuccaccgagaucuaccaggcgggcaacacccccugcaacgggguggagggcuucaacugcuacuucccccugcagagcuacggguuccagccgaccaacggcgugggguaccagcccuaccggguggucgugcuguccuucgagcuccugcacgcccccgccacggugugcggccccaagaaguccaccaaccuggucaagaacaagugcgugaacuucaacuucaacggccucaccgggaccggcgugcugaccgagagcaacaagaaguuccugccguuccagcaguucgggcgcgacaucgccgacacgaccgacgccguccgcgacccccagacccuggagauccucgacaucacccccugcagcuucggcggggugagcgugaucacgccgggcaccaacaccuccaaccaggucgcggugcuguaccagggcgugaacugcaccgagguccccguggccauccacgccgaccagcugacgcccaccuggcggguguacagcaccggguccaacgucuuccagacccgcgccggcugccucaucggggccgagcacgugaacaacagcuacgagugcgacauccccaucggcgcgggcaucugcgccuccuaccagacgcagaccaacagcccgcggcgcgcccgguccguggccagccaguccgucaucgcguacaccaugagccugggggccgagaacuccguggccuacagcaacaacuccaucgccauccccaccaacuucacgaucagcgugaccaccgagauccugcccgucuccaugaccaagacgagcguggacugcaccauguacaucugcggcgacagcaccgagugcuccaaccuccugcugcaguacgggagcuucugcacccagcucaaccgcgcccugacgggcaucgcgguggagcaggacaagaacacccaggaggucuucgcccaggugaagcagaucuacaagacgcccccgaucaaggacuucgggggcuucaacuucucccagauccugcccgaccccagcaagcccuccaagcggagcuucaucgaggaccuccuguucaacaaggugacccuggccgacgccggcuucaucaagcaguacggggacugccucggcgacaucgccgcgcgcgaccugaucugcgcccagaaguucaacgggcugaccguccucccgccccugcugaccgacgagaugaucgcccaguacaccuccgcccuccuggccggcaccaucacgagcggguggaccuucggcgcgggcgccgcccugcagauccccuucgccaugcagauggcguaccgguucaacgggaucggcgugacccagaacgugcucuacgagaaccagaagcugaucgccaaccaguucaacuccgccaucgggaagauccaggacagccuguccagcaccgccuccgcccucggcaagcugcaggacgucgugaaccagaacgcgcaggcccugaacacgcucgugaagcagcugagcuccaacuucggggccaucagcuccguccugaacgacauccucagccgccuggacaagguggaggccgaggugcagaucgaccggcugaucaccggccgccuccagucccugcagaccuacgucacccagcagcugauccgggccgcggagauccgcgccagcgccaaccucgccgccaccaagaugagcgagugcgugcugggccaguccaagcggguggacuucugcgggaagggcuaccaccugaugagcuucccccaguccgcgccgcacggggucguguuccuccacgucacguacgugcccgcccaggagaagaacuucaccaccgcccccgccaucugccacgacggcaaggcgcacuucccccgcgaggggguguucgucagcaacggcacccacugguucgugacgcagcggaacuucuacgagccgcagaucaucaccaccgacaacaccuucguguccggcaacugcgacgucgugaucgggaucgugaacaacacggucuacgacccccugcagcccgagcuggacagcuucaaggaggagcucgacaaguacuucaagaaccacaccucccccgacguggaccugggcgacaucagcgggaucaacgccuccguggucaacauccagaaggagaucgaccgccugaacgagguggccaagaaccucaacgagagccugaucgaccugcaggagcucggcaaguacgagcaguacaucaaguggccgugguacaucuggcugggcuucaucgccgggcugaucgccaucgugauggucaccaucaugcucugcugcaugaccuccugcugcagcugccugaagggcugcugcuccugcgggagcugcugcaaguucgacgaggacgacuccgagcccgugcugaagggcgugaagcuccacuacacgugaugacucgagcugguacugcaugcacgcaaugcuagcugccccuuucccguccuggguaccccgagucucccccgaccucgggucccagguaugcucccaccuccaccugccccacucaccaccucugcuaguuccagacaccucccaagcacgcagcaaugcagcucaaaacgcuuagccuagccacacccccacgggaaacagcagugauuaaccuuuagcaauaaacgaaaguuuaacuaagcuauacuaaccccaggguuggucaauuucgugccagccacacccuggagcuagcaaaaaaaaaaaaaaaaaaaaaaaaaaaaaagcauaugacuaaaaaaaaaaaaaaaaaaaaaaaaaaaaaaaaaaaaaaaaaaaaaaaaaaaaaaaaaaaaaaaaaaaaaa

SEQ ID NO: 26738 - RNA, 4277 nt, Artificial Sequence
  SARS-CoV-2/Wuhan/WIV05/2019__EPI_ISL_402128 spike protein mRNA gc (1-1273)(H69del_V70del_Y453F_D614G_I692V_M1229I)
agaauaaacuaguauucuucugguccccacagacucagagagaacccgccaccauguucguguuccugguccuccugccccuggugagcucccagugcgugaaccucaccacccgcacgcagcugccgcccgccuacaccaacagcuucacccggggcgucuacuaccccgacaagguguuccgcuccagcgugcugcacuccacccaggaccucuuccugcccuucuucagcaacgucacgugguuccacgccaucuccgggaccaacggcaccaagcgguucgacaacccggugcugcccuucaacgacgggguguacuucgcgagcaccgagaaguccaacaucauccgcggcuggaucuucgggacgacccucgacagcaagacccagucccugcugaucgucaacaacgccaccaacguggugaucaaggucugcgaguuccaguucugcaacgaccccuuccucggcguguacuaccacaagaacaacaagagcuggauggaguccgaguuccggguguacagcuccgccaacaacugcacguucgaguacgucagccagcccuuccugauggaccuggagggcaagcaggggaacuucaagaaccuccgcgaguucguguucaagaacaucgacggcuacuucaagaucuacuccaagcacaccccgaucaaccuggugcgggaccugccccagggguucagcgcccucgagccccuggucgaccugcccaucggcaucaacaucacccgcuuccagacccuccuggcccugcaccgguccuaccucacgccgggggacagcagcuccggcuggaccgcgggcgccgccgccuacuacgugggguaccugcagccccgcaccuuccugcucaaguacaacgagaacggcaccaucacggacgcgguggacugcgcccuggacccccugagcgagaccaagugcacccucaaguccuucaccgucgagaaggggaucuaccagacgagcaacuuccgggugcagcccaccgaguccaucgugcgcuucccgaacaucaccaaccugugccccuucggcgaggucuucaacgccacccgguucgccagcguguacgccuggaaccgcaagcggaucuccaacugcgucgcggacuacagcgugcuguacaacuccgccagcuucuccacguucaagugcuacggcgugagccccaccaagcucaacgaccugugcuucaccaacgucuacgccgacuccuucgugauccgcggggacgaggugcggcagaucgcccccggccagaccgggaagaucgccgacuacaacuacaagcugccggacgacuucacgggcugcgucaucgcguggaacagcaacaaccucgacuccaaggucgggggcaacuacaacuaccuguuccgccuguuccgcaagagcaaccucaagcccuucgagcgggacaucuccaccgagaucuaccaggccggcagcacccccugcaacgggguggagggcuucaacugcuacuucccccugcaguccuacggguuccagccgaccaacggcgugggguaccagcccuaccggguggugguccugagcuucgagcuccugcacgcccccgccacggugugcggccccaagaaguccaccaaccuggugaagaacaagugcgucaacuucaacuucaacggccucaccgggaccggcgugcugaccgagagcaacaagaaguuccugccguuccagcaguucgggcgcgacaucgccgacacgaccgacgcggugcgcgacccccagacccuggagauccucgacaucacccccugcagcuucggcggggucuccgugaucacgccgggcaccaacaccagcaaccagguggccguccuguaccagggcgugaacugcaccgaggugcccgucgccauccacgccgaccagcugacgcccaccuggcggguguacuccaccgggagcaacguguuccagacccgcgccggcugccucaucggggcggagcacgucaacaacuccuacgagugcgacauccccaucggcgccggcaucugcgccagcuaccagacgcagaccaacuccccgcggcgcgcccggagcguggcgucccagagcgugaucgccuacaccaugucccugggggccgagaacagcgucgccuacuccaacaacagcaucgccauccccaccaacuucacgaucuccgugaccaccgagauccugcccgugagcaugaccaagacgagcgucgacugcaccauguacaucugcggcgacuccaccgagugcagcaaccuccugcugcaguacggguccuucugcacccagcucaaccgcgcgcugacgggcaucgccguggagcaggacaagaacacccaggagguguucgcccaggucaagcagaucuacaagacgcccccgaucaaggacuucgggggcuucaacuucagccagauccugcccgaccccuccaagcccagcaagcgguccuucaucgaggaccuccuguucaacaaggugacccuggccgacgccggcuucaucaagcaguacggggacugccucggcgacaucgcggcccgcgaccugaucugcgcccagaaguucaacgggcugaccgugcucccgccccugcugaccgacgagaugaucgcccaguacaccagcgcccuccuggcgggcaccaucacguccggguggaccuucggcgccggcgccgcccugcagauccccuucgcgaugcagauggccuaccgguucaacgggaucggcgucacccagaacgugcucuacgagaaccagaagcugaucgccaaccaguucaacagcgccaucgggaagauccaggacucccugagcuccaccgccagcgcgcucggcaagcugcaggacguggucaaccagaacgcccaggcccugaacacgcucgugaagcagcuguccagcaacuucggggccaucuccagcgugcugaacgacauccucucccgccuggacaaggucgaggccgaggugcagaucgaccggcugaucaccggccgccuccagagccugcagaccuacgugacccagcagcugauccgggcggccgagauccgcgccagcgccaaccucgccgcgaccaagauguccgagugcguccugggccagagcaagcggguggacuucugcgggaagggcuaccaccugauguccuucccccagagcgccccgcacgggguggucuuccuccacgugacguacguccccgcccaggagaagaacuucaccaccgcccccgcgaucugccacgacggcaaggcccacuucccccgcgaggggguguucguguccaacggcacccacugguucgucacgcagcggaacuucuacgagccgcagaucaucaccaccgacaacaccuucgugagcggcaacugcgacguggucaucgggaucgugaacaacacgguguacgacccccugcagcccgagcuggacuccuucaaggaggagcucgacaaguacuucaagaaccacaccagccccgacgucgaccugggcgacaucuccgggaucaacgccagcguggugaacauccagaaggagaucgaccgccugaacgaggucgccaagaaccucaacgagucccugaucgaccugcaggagcucggcaaguacgagcaguacaucaaguggccgugguacaucuggcugggcuucaucgccgggcugaucgcgaucgugaucgugaccaucaugcucugcugcaugaccagcugcugcuccugccugaagggcugcugcagcugcggguccugcugcaaguucgacgaggacgacagcgagcccguccugaagggcgugaagcuccacuacacgugaugacucgagcugguacugcaugcacgcaaugcuagcugccccuuucccguccuggguaccccgagucucccccgaccucgggucccagguaugcucccaccuccaccugccccacucaccaccucugcuaguuccagacaccucccaagcacgcagcaaugcagcucaaaacgcuuagccuagccacacccccacgggaaacagcagugauuaaccuuuagcaauaaacgaaaguuuaacuaagcuauacuaaccccaggguuggucaauuucgugccagccacacccuggagcuagcaaaaaaaaaaaaaaaaaaaaaaaaaaaaaagcauaugacuaaaaaaaaaaaaaaaaaaaaaaaaaaaaaaaaaaaaaaaaaaaaaaaaaaaaaaaaaaaaaaaaaaaaaa

SEQ ID NO: 26739 - RNA, 4274 nt, Artificial Sequence
  SARS-CoV-2/Wuhan/WIV05/2019__EPI_ISL_402128 spike protein mRNA gc (1-1273)(H69del_V70del_Y144del_N501Y_A570D_D614G_P681H_T716I_S982 A_D1118H)
agaauaaacuaguauucuucugguccccacagacucagagagaacccgccaccauguucguguuccugguccuccugccccuggugagcucccagugcgugaaccucaccacccgcacgcagcugccgcccgccuacaccaacagcuucacccggggcgucuacuaccccgacaagguguuccgcuccagcgugcugcacuccacccaggaccucuuccugcccuucuucagcaacgucacgugguuccacgccaucuccgggaccaacggcaccaagcgguucgacaacccggugcugcccuucaacgacgggguguacuucgcgagcaccgagaaguccaacaucauccgcggcuggaucuucgggacgacccucgacagcaagacccagucccugcugaucgucaacaacgccaccaacguggugaucaaggucugcgaguuccaguucugcaacgaccccuuccucggcguguaccacaagaacaacaagagcuggauggaguccgaguuccggguguacagcuccgccaacaacugcacguucgaguacgucagccagcccuuccugauggaccuggagggcaagcaggggaacuucaagaaccuccgcgaguucguguucaagaacaucgacggcuacuucaagaucuacuccaagcacaccccgaucaaccuggugcgggaccugccccagggguucagcgcccucgagccccuggucgaccugcccaucggcaucaacaucacccgcuuccagacccuccuggcccugcaccgguccuaccucacgccgggggacagcagcuccggcuggaccgcgggcgccgccgccuacuacgugggguaccugcagccccgcaccuuccugcucaaguacaacgagaacggcaccaucacggacgcgguggacugcgcccuggacccccugagcgagaccaagugcacccucaaguccuucaccgucgagaaggggaucuaccagacgagcaacuuccgggugcagcccaccgaguccaucgugcgcuucccgaacaucaccaaccugugccccuucggcgaggucuucaacgccacccgguucgccagcguguacgccuggaaccgcaagcggaucuccaacugcgucgcggacuacagcgugcuguacaacuccgccagcuucuccacguucaagugcuacggcgugagccccaccaagcucaacgaccugugcuucaccaacgucuacgccgacuccuucgugauccgcggggacgaggugcggcagaucgcccccggccagaccgggaagaucgccgacuacaacuacaagcugccggacgacuucacgggcugcgucaucgcguggaacagcaacaaccucgacuccaaggucgggggcaacuacaacuaccuguaccgccuguuccgcaagagcaaccucaagcccuucgagcgggacaucuccaccgagaucuaccaggccggcagcacccccugcaacgggguggagggcuucaacugcuacuucccccugcaguccuacggguuccagccgaccuacggcgugggguaccagcccuaccggguggugguccugagcuucgagcuccugcacgcccccgccacggugugcggccccaagaaguccaccaaccuggugaagaacaagugcgucaacuucaacuucaacggccucaccgggaccggcgugcugaccgagagcaacaagaaguuccugccguuccagcaguucgggcgcgacaucgacgacacgaccgacgccgugcgcgacccccagacccuggagauccucgacaucacccccugcagcuucggcggggucuccgugaucacgccgggcaccaacaccagcaaccagguggcgguccuguaccagggcgugaacugcaccgaggugcccgucgccauccacgccgaccagcugacgcccaccuggcggguguacuccaccgggagcaacguguuccagacccgcgccggcugccucaucggggccgagcacgucaacaacuccuacgagugcgacauccccaucggcgcgggcaucugcgccagcuaccagacgcagaccaacucccaccggcgcgcccggagcguggccucccagagcaucaucgcguacaccaugucccugggggccgagaacagcguggccuacuccaacaacagcaucgccaucccgaucaacuucaccaucuccgucacgaccgagauccugcccgugagcaugaccaagaccagcguggacugcacgauguacaucugcggcgacuccaccgagugcagcaaccuccugcugcaguacggguccuucugcacccagcucaaccgcgcccugaccggcaucgcggucgagcaggacaagaacacgcaggagguguucgcccaggugaagcagaucuacaagaccccgcccaucaaggacuucgggggcuucaacuucagccagauccugcccgaccccuccaagcccagcaagcgguccuucaucgaggaccuccuguucaacaaggucacccuggccgacgccggcuucaucaagcaguacggggacugccucggcgacaucgccgcgcgcgaccugaucugcgcccagaaguucaacgggcugaccgugcugcccccgcuccugacggacgagaugaucgcccaguacaccagcgcccuccuggccggcaccaucaccuccggguggacguucggcgcgggcgccgcccugcagauccccuucgccaugcagauggcguaccgguucaacgggaucggcgugacccagaacguccucuacgagaaccagaagcugaucgccaaccaguucaacagcgccaucgggaagauccaggacucccugagcuccaccgccagcgcccucggcaagcugcaggacguggugaaccagaacgcgcaggcccugaacacccucgucaagcagcuguccagcaacuucggggccaucuccagcgugcugaacgacauccucgcccgccuggacaagguggaggccgagguccagaucgaccggcugaucacgggccgccuccagucccugcagaccuacgugacccagcagcugauccgggcggccgagauccgcgccagcgccaaccucgccgcgaccaagaugagcgagugcgugcugggccaguccaagcgggucgacuucugcgggaagggcuaccaccugaugagcuucccccaguccgcgccccacggggugguguuccuccacgucaccuacgugccggcccaggagaagaacuucacgaccgcccccgccaucugccacgacggcaaggcccacuucccccgcgagggggucuucgugagcaacggcacccacugguucgugacccagcggaacuucuacgagccccagaucaucacgacccacaacaccuucgucuccggcaacugcgacguggugaucgggaucgucaacaacaccguguacgacccgcugcagcccgagcuggacagcuucaaggaggagcucgacaaguacuucaagaaccacacgucccccgacguggaccugggcgacaucagcgggaucaacgccuccgucgugaacauccagaaggagaucgaccgccugaacgagguggccaagaaccucaacgagagccugaucgaccugcaggagcucggcaaguacgagcaguacaucaaguggcccugguacaucuggcugggcuucaucgccgggcugaucgcgaucgucauggugaccaucaugcucugcugcaugaccuccugcugcagcugccugaagggcugcugcuccugcgggagcugcugcaaguucgacgaggacgacuccgagccggugcugaagggcgucaagcuccacuacaccugaugacucgagcugguacugcaugcacgcaaugcuagcugccccuuucccguccuggguaccccgagucucccccgaccucgggucccagguaugcucccaccuccaccugccccacucaccaccucugcuaguuccagacaccucccaagcacgcagcaaugcagcucaaaacgcuuagccuagccacacccccacgggaaacagcagugauuaaccuuuagcaauaaacgaaaguuuaacuaagcuauacuaaccccaggguuggucaauuucgugccagccacacccuggagcuagcaaaaaaaaaaaaaaaaaaaaaaaaaaaaaagcauaugacuaaaaaaaaaaaaaaaaaaaaaaaaaaaaaaaaaaaaaaaaaaaaaaaaaaaaaaaaaaaaaaaaaaaaaa

SEQ ID NO: 26740 - RNA, 4283 nt, Artificial Sequence
  SARS-CoV-2/Wuhan/WIV05/2019__EPI_ISL_402128 spike protein mRNA gc (1-1273)(K417N_E484K_N501Y_D614G)
agaauaaacuaguauucuucugguccccacagacucagagagaacccgccaccauguucguguuccugguccuccugccccuggugagcucccagugcgugaaccucaccacccgcacgcagcugccgcccgccuacaccaacagcuucacccggggcgucuacuaccccgacaagguguuccgcuccagcgugcugcacuccacccaggaccucuuccugcccuucuucagcaacgucacgugguuccacgccauccacguguccgggaccaacggcaccaagcgguucgacaacccggugcugcccuucaacgacggggucuacuucgcgagcaccgagaaguccaacaucauccgcggcuggaucuucgggacgacccucgacagcaagacccagucccugcugaucgugaacaacgccaccaacguggucaucaaggugugcgaguuccaguucugcaacgaccccuuccucggcguguacuaccacaagaacaacaagagcuggauggaguccgaguuccgggucuacagcuccgccaacaacugcacguucgaguacgugagccagcccuuccugauggaccuggagggcaagcaggggaacuucaagaaccuccgcgaguucguguucaagaacaucgacggcuacuucaagaucuacuccaagcacaccccgaucaaccugguccgggaccugccccagggguucagcgcccucgagccccugguggaccugcccaucggcaucaacaucacccgcuuccagacccuccuggcccugcaccgguccuaccucacgccgggggacagcagcuccggcuggaccgcgggcgccgccgccuacuacgugggguaccugcagccccgcaccuuccugcucaaguacaacgagaacggcaccaucacggacgcggucgacugcgcccuggacccccugagcgagaccaagugcacccucaaguccuucaccguggagaaggggaucuaccagacgagcaacuuccgggugcagcccaccgaguccaucguccgcuucccgaacaucaccaaccugugccccuucggcgagguguucaacgccacccgguucgccagcgucuacgccuggaaccgcaagcggaucuccaacugcguggcggacuacagcgugcuguacaacuccgccagcuucuccacguucaagugcuacggcgucagccccaccaagcucaacgaccugugcuucaccaacguguacgccgacuccuucgugauccgcggggacgagguccggcagaucgcccccggccagaccgggaacaucgccgacuacaacuacaagcugccggacgacuucacgggcugcgugaucgcguggaacagcaacaaccucgacuccaaggucgggggcaacuacaacuaccuguaccgccuguuccgcaagagcaaccucaagcccuucgagcgggacaucuccaccgagaucuaccaggccggcagcacccccugcaacggggugaagggcuucaacugcuacuucccccugcaguccuacggguuccagccgaccuacggcgugggguaccagcccuaccggguggucgugcugagcuucgagcuccugcacgcccccgccacggugugcggccccaagaaguccaccaaccuggucaagaacaagugcgugaacuucaacuucaacggccucaccgggaccggcgugcugaccgagagcaacaagaaguuccugccguuccagcaguucgggcgcgacaucgccgacacgaccgacgcgguccgcgacccccagacccuggagauccucgacaucacccccugcagcuucggcgggguguccgugaucacgccgggcaccaacaccagcaaccaggucgccgugcuguaccagggcgugaacugcaccgagguccccguggccauccacgccgaccagcugacgcccaccuggcggguguacuccaccgggagcaacgucuuccagacccgcgccggcugccucaucggggcggagcacgugaacaacuccuacgagugcgacauccccaucggcgccggcaucugcgccagcuaccagacgcagaccaacuccccgcggcgcgcccggagcguggcgucccagagcaucaucgccuacaccaugucccugggggccgagaacagcgucgccuacuccaacaacagcaucgccauccccaccaacuucacgaucuccgugaccaccgagauccugcccgugagcaugaccaagacgagcgucgacugcaccauguacaucugcggcgacuccaccgagugcagcaaccuccugcugcaguacggguccuucugcacccagcucaaccgcgcgcugacgggcaucgccguggagcaggacaagaacacccaggagguguucgcccaggucaagcagaucuacaagacgcccccgaucaaggacuucgggggcuucaacuucagccagauccugcccgaccccuccaagcccagcaagcgguccuucaucgaggaccuccuguucaacaaggugacccuggccgacgccggcuucaucaagcaguacggggacugccucggcgacaucgcggcccgcgaccugaucugcgcccagaaguucaacgggcugaccgugcucccgccccugcugaccgacgagaugaucgcccaguacaccagcgcccuccuggcgggcaccaucacguccggguggaccuucggcgccggcgccgcccugcagauccccuucgcgaugcagauggccuaccgguucaacgggaucggcgucacccagaacgugcucuacgagaaccagaagcugaucgccaaccaguucaacagcgccaucgggaagauccaggacucccugagcuccaccgccagcgcgcucggcaagcugcaggacguggucaaccagaacgcccaggcccugaacacgcucgugaagcagcuguccagcaacuucggggccaucuccagcgugcugaacgacauccucucccgccuggacaaggucgaggccgaggugcagaucgaccggcugaucaccggccgccuccagagccugcagaccuacgugacccagcagcugauccgggcggccgagauccgcgccagcgccaaccucgccgcgaccaagauguccgagugcguccugggccagagcaagcggguggacuucugcgggaagggcuaccaccugauguccuucccccagagcgccccgcacgggguggucuuccuccacgugacguacguccccgcccaggagaagaacuucaccaccgcccccgcgaucugccacgacggcaaggcccacuucccccgcgaggggguguucguguccaacggcacccacugguucgucacgcagcggaacuucuacgagccgcagaucaucaccaccgacaacaccuucgugagcggcaacugcgacguggucaucgggaucgugaacaacacgguguacgacccccugcagcccgagcuggacuccuucaaggaggagcucgacaaguacuucaagaaccacaccagccccgacgucgaccugggcgacaucuccgggaucaacgccagcguggugaacauccagaaggagaucgaccgccugaacgaggucgccaagaaccucaacgagucccugaucgaccugcaggagcucggcaaguacgagcaguacaucaaguggccgugguacaucuggcugggcuucaucgccgggcugaucgcgaucgugauggugaccaucaugcucugcugcaugaccagcugcugcuccugccugaagggcugcugcagcugcggguccugcugcaaguucgacgaggacgacagcgagcccguccugaagggcgugaagcuccacuacacgugaugacucgagcugguacugcaugcacgcaaugcuagcugccccuuucccguccuggguaccccgagucucccccgaccucgggucccagguaugcucccaccuccaccugccccacucaccaccucugcuaguuccagacaccucccaagcacgcagcaaugcagcucaaaacgcuuagccuagccacacccccacgggaaacagcagugauuaaccuuuagcaauaaacgaaaguuuaacuaagcuauacuaaccccaggguuggucaauuucgugccagccacacccuggagcuagcaaaaaaaaaaaaaaaaaaaaaaaaaaaaaagcauaugacuaaaaaaaaaaaaaaaaaaaaaaaaaaaaaaaaaaaaaaaaaaaaaaaaaaaaaaaaaaaaaaaaaaaaaa

SEQ ID NO: 26741 - RNA, 4274 nt, Artificial Sequence
  SARS-CoV-2/Wuhan/WIV05/2019__EPI_ISL_402128 spike protein mRNA gc (1-1273)(L18F_D80A_D215G_L242del_A243del_L244del_R246I_K417N_E484 K_N501Y_D614G_A701V)
agaauaaacuaguauucuucugguccccacagacucagagagaacccgccaccauguucguguuccugguccuccugccccuggugagcucccagugcgugaacuucaccacccgcacgcagcucccgcccgccuacaccaacagcuucacccggggcgucuacuaccccgacaagguguuccgcuccagcgugcugcacuccacccaggaccuguuccuccccuucuucagcaacgucacgugguuccacgccauccacguguccgggaccaacggcaccaagcgguucgcgaacccggugcugcccuucaacgacggggucuacuucgccagcaccgagaaguccaacaucauccgcggcuggaucuucgggacgacccuggacagcaagacccagucccuccugaucgugaacaacgccaccaacguggucaucaaggugugcgaguuccaguucugcaacgaccccuuccugggcguguacuaccacaagaacaacaagagcuggauggaguccgaguuccgggucuacagcuccgccaacaacugcacguucgaguacgugagccagcccuuccucauggaccuggagggcaagcaggggaacuucaagaaccugcgcgaguucguguucaagaacaucgacggcuacuucaagaucuacuccaagcacaccccgaucaaccucguccgggggcugccccagggcuucagcgcccuggagccccucguggaccugcccaucgggaucaacaucacccgcuuccagacccugcacaucuccuaccucacgccgggcgacagcagcuccggcuggaccgcgggggccgccgccuacuacgugggcuaccugcagccccggaccuuccugcucaaguacaacgagaacgggaccaucacggacgcggucgacugcgcccuggacccccugagcgagaccaagugcacccucaaguccuucaccguggagaagggcaucuaccagacgagcaacuuccgcgugcagcccaccgaguccaucguccgguucccgaacaucaccaaccugugccccuucggcgagguguucaacgccacccgcuucgccagcgucuacgccuggaaccggaagcgcaucuccaacugcguggcggacuacagcgugcuguacaacuccgccagcuucuccacguucaagugcuacggggucagccccaccaagcucaacgaccugugcuucaccaacguguacgccgacuccuucgugauccggggcgacgagguccgccagaucgcccccgggcagaccggcaacaucgccgacuacaacuacaagcugccggacgacuucacggggugcgugaucgcguggaacagcaacaaccucgacuccaaggugggcggcaacuacaacuaccuguaccggcuguuccgcaagagcaaccucaagcccuucgagcgggacaucuccaccgagaucuaccaggccgggagcacccccugcaacggcgucaagggguucaacugcuacuucccccugcaguccuacggcuuccagccgaccuacggggugggcuaccagcccuaccgcguggucgugcugagcuucgagcuccugcacgcccccgccacggugugcggccccaagaaguccaccaaccuggucaagaacaagugcgugaacuucaacuucaacgggcucaccggcaccggggugcugaccgagagcaacaagaaguuccugccguuccagcaguucggccgggacaucgccgacacgaccgacgcgguccgcgacccccagacccucgagauccuggacaucacccccugcagcuucgggggcguguccgugaucacgccgggcaccaacaccagcaaccaggucgccgugcuguaccagggggugaacugcaccgagguccccguggccauccacgccgaccagcugacgcccaccuggcgcguguacuccaccggcagcaacgucuuccagacccgggccgggugccucaucggcgcggagcacgugaacaacuccuacgagugcgacauccccaucggcgccgggaucugcgccagcuaccagacgcagaccaacuccccgcgccgggcccgcagcguggcgucccagagcaucaucgccuacaccaugucccugggcgucgagaacagcguggccuacuccaacaacagcaucgccauccccaccaacuucacgaucuccgugaccaccgagauccugcccgucagcaugaccaagacgagcguggacugcaccauguacaucugcggggacuccaccgagugcagcaaccuccugcugcaguacggcuccuucugcacccagcucaaccgggcccugacggggaucgcgguggagcaggacaagaacacccaggaggucuucgcccaggugaagcagaucuacaagacgcccccgaucaaggacuucggcggcuucaacuucagccagauccugcccgaccccuccaagcccagcaagcgcuccuucaucgaggaccuccuguucaacaaggugacccuggccgacgccggguucaucaagcaguacggcgacugccucggggacaucgccgcgcgggaccugaucugcgcccagaaguucaacggccugaccguccucccgccccugcugaccgacgagaugaucgcccaguacaccagcgcccuccuggccgggaccaucacguccggcuggaccuucggcgcgggggccgcccugcagauccccuucgccaugcagauggcguaccgcuucaacggcaucggggugacccagaacgugcucuacgagaaccagaagcugaucgccaaccaguucaacagcgccaucggcaagauccaggacucccugagcuccaccgccagcgcccucgggaagcugcaggacgucgugaaccagaacgcgcaggcccugaacacgcucgugaagcagcuguccagcaacuucggcgccaucuccagcguccugaacgacauccucucccggcuggacaagguggaggccgaggugcagaucgaccgccugaucaccggccggcuccagagccugcagaccuacgucacccagcagcugauccgcgccgcggagauccgggccagcgccaaccucgccgccaccaagauguccgagugcgugcuggggcagagcaagcgcguggacuucugcggcaagggguaccaccugauguccuucccccagagcgcgccgcacggcgucguguuccuccacgucacguacgugcccgcccaggagaagaacuucaccaccgcccccgccaucugccacgacgggaaggcgcacuucccccgggagggcguguucgucuccaacggcacccacugguucgugacgcagcgcaacuucuacgagccgcagaucaucaccaccgacaacaccuucgugagcgggaacugcgacgucgugaucggcaucgugaacaacacggucuacgacccccugcagcccgagcuggacuccuucaaggaggagcucgacaaguacuucaagaaccacaccagccccgacguggaccugggggacaucuccggcaucaacgccagcguggucaacauccagaaggagaucgaccggcugaacgagguggccaagaaccucaacgagucccugaucgaccugcaggagcucggcaaguacgagcaguacaucaaguggccgugguacaucuggcugggguucaucgccggccugaucgccaucgugauggucaccaucaugcucugcugcaugaccagcugcugcuccugccugaaggggugcugcagcugcggcuccugcugcaaguucgacgaggacgacagcgagcccgugcugaagggggugaagcuccacuacacgugaugacucgagcugguacugcaugcacgcaaugcuagcugccccuuucccguccuggguaccccgagucucccccgaccucgggucccagguaugcucccaccuccaccugccccacucaccaccucugcuaguuccagacaccucccaagcacgcagcaaugcagcucaaaacgcuuagccuagccacacccccacgggaaacagcagugauuaaccuuuagcaauaaacgaaaguuuaacuaagcuauacuaaccccaggguuggucaauuucgugccagccacacccuggagcuagcaaaaaaaaaaaaaaaaaaaaaaaaaaaaaagcauaugacuaaaaaaaaaaaaaaaaaaaaaaaaaaaaaaaaaaaaaaaaaaaaaaaaaaaaaaaaaaaaaaaaaaaaaa

SEQ ID NO: 26742 - RNA, 4283 nt, Artificial Sequence
  SARS-CoV-2/Wuhan/WIV05/2019__EPI_ISL_402128 spike protein mRNA gc (1-1273)(E484K_D614G)
agaauaaacuaguauucuucugguccccacagacucagagagaacccgccaccauguucguguuccugguccuccugccccuggugagcucccagugcgugaaccucaccacccgcacgcagcugccgcccgccuacaccaacagcuucacccggggcgucuacuaccccgacaagguguuccgcuccagcgugcugcacuccacccaggaccucuuccugcccuucuucagcaacgucacgugguuccacgccauccacguguccgggaccaacggcaccaagcgguucgacaacccggugcugcccuucaacgacggggucuacuucgcgagcaccgagaaguccaacaucauccgcggcuggaucuucgggacgacccucgacagcaagacccagucccugcugaucgugaacaacgccaccaacguggucaucaaggugugcgaguuccaguucugcaacgaccccuuccucggcguguacuaccacaagaacaacaagagcuggauggaguccgaguuccgggucuacagcuccgccaacaacugcacguucgaguacgugagccagcccuuccugauggaccuggagggcaagcaggggaacuucaagaaccuccgcgaguucguguucaagaacaucgacggcuacuucaagaucuacuccaagcacaccccgaucaaccugguccgggaccugccccagggguucagcgcccucgagccccugguggaccugcccaucggcaucaacaucacccgcuuccagacccuccuggcccugcaccgguccuaccucacgccgggggacagcagcuccggcuggaccgcgggcgccgccgccuacuacgugggguaccugcagccccgcaccuuccugcucaaguacaacgagaacggcaccaucacggacgcggucgacugcgcccuggacccccugagcgagaccaagugcacccucaaguccuucaccguggagaaggggaucuaccagacgagcaacuuccgggugcagcccaccgaguccaucguccgcuucccgaacaucaccaaccugugccccuucggcgagguguucaacgccacccgguucgccagcgucuacgccuggaaccgcaagcggaucuccaacugcguggcggacuacagcgugcuguacaacuccgccagcuucuccacguucaagugcuacggcgucagccccaccaagcucaacgaccugugcuucaccaacguguacgccgacuccuucgugauccgcggggacgagguccggcagaucgcccccggccagaccgggaagaucgccgacuacaacuacaagcugccggacgacuucacgggcugcgugaucgcguggaacagcaacaaccucgacuccaaggucgggggcaacuacaacuaccuguaccgccuguuccgcaagagcaaccucaagcccuucgagcgggacaucuccaccgagaucuaccaggccggcagcacccccugcaacggggugaagggcuucaacugcuacuucccccugcaguccuacggguuccagccgaccaacggcgugggguaccagcccuaccggguggucgugcugagcuucgagcuccugcacgcccccgccacggugugcggccccaagaaguccaccaaccuggucaagaacaagugcgugaacuucaacuucaacggccucaccgggaccggcgugcugaccgagagcaacaagaaguuccugccguuccagcaguucgggcgcgacaucgccgacacgaccgacgcgguccgcgacccccagacccuggagauccucgacaucacccccugcagcuucggcgggguguccgugaucacgccgggcaccaacaccagcaaccaggucgccgugcuguaccagggcgugaacugcaccgagguccccguggccauccacgccgaccagcugacgcccaccuggcggguguacuccaccgggagcaacgucuuccagacccgcgccggcugccucaucggggcggagcacgugaacaacuccuacgagugcgacauccccaucggcgccggcaucugcgccagcuaccagacgcagaccaacuccccgcggcgcgcccggagcguggcgucccagagcaucaucgccuacaccaugucccugggggccgagaacagcgucgccuacuccaacaacagcaucgccauccccaccaacuucacgaucuccgugaccaccgagauccugcccgugagcaugaccaagacgagcgucgacugcaccauguacaucugcggcgacuccaccgagugcagcaaccuccugcugcaguacggguccuucugcacccagcucaaccgcgcgcugacgggcaucgccguggagcaggacaagaacacccaggagguguucgcccaggucaagcagaucuacaagacgcccccgaucaaggacuucgggggcuucaacuucagccagauccugcccgaccccuccaagcccagcaagcgguccuucaucgaggaccuccuguucaacaaggugacccuggccgacgccggcuucaucaagcaguacggggacugccucggcgacaucgcggcccgcgaccugaucugcgcccagaaguucaacgggcugaccgugcucccgccccugcugaccgacgagaugaucgcccaguacaccagcgcccuccuggcgggcaccaucacguccggguggaccuucggcgccggcgccgcccugcagauccccuucgcgaugcagauggccuaccgguucaacgggaucggcgucacccagaacgugcucuacgagaaccagaagcugaucgccaaccaguucaacagcgccaucgggaagauccaggacucccugagcuccaccgccagcgcgcucggcaagcugcaggacguggucaaccagaacgcccaggcccugaacacgcucgugaagcagcuguccagcaacuucggggccaucuccagcgugcugaacgacauccucucccgccuggacaaggucgaggccgaggugcagaucgaccggcugaucaccggccgccuccagagccugcagaccuacgugacccagcagcugauccgggcggccgagauccgcgccagcgccaaccucgccgcgaccaagauguccgagugcguccugggccagagcaagcggguggacuucugcgggaagggcuaccaccugauguccuucccccagagcgccccgcacgggguggucuuccuccacgugacguacguccccgcccaggagaagaacuucaccaccgcccccgcgaucugccacgacggcaaggcccacuucccccgcgaggggguguucguguccaacggcacccacugguucgucacgcagcggaacuucuacgagccgcagaucaucaccaccgacaacaccuucgugagcggcaacugcgacguggucaucgggaucgugaacaacacgguguacgacccccugcagcccgagcuggacuccuucaaggaggagcucgacaaguacuucaagaaccacaccagccccgacgucgaccugggcgacaucuccgggaucaacgccagcguggugaacauccagaaggagaucgaccgccugaacgaggucgccaagaaccucaacgagucccugaucgaccugcaggagcucggcaaguacgagcaguacaucaaguggccgugguacaucuggcugggcuucaucgccgggcugaucgcgaucgugauggugaccaucaugcucugcugcaugaccagcugcugcuccugccugaagggcugcugcagcugcggguccugcugcaaguucgacgaggacgacagcgagcccguccugaagggcgugaagcuccacuacacgugaugacucgagcugguacugcaugcacgcaaugcuagcugccccuuucccguccuggguaccccgagucucccccgaccucgggucccagguaugcucccaccuccaccugccccacucaccaccucugcuaguuccagacaccucccaagcacgcagcaaugcagcucaaaacgcuuagccuagccacacccccacgggaaacagcagugauuaaccuuuagcaauaaacgaaaguuuaacuaagcuauacuaaccccaggguuggucaauuucgugccagccacacccuggagcuagcaaaaaaaaaaaaaaaaaaaaaaaaaaaaaagcauaugacuaaaaaaaaaaaaaaaaaaaaaaaaaaaaaaaaaaaaaaaaaaaaaaaaaaaaaaaaaaaaaaaaaaaaaa

SEQ ID NO: 26743 - RNA, 4283 nt, Artificial Sequence
  SARS-CoV-2/Wuhan/WIV05/2019__EPI_ISL_402128 spike protein mRNA gc (1-1273)(L18F_T20N_P26S_D138Y_R190S_K417T_E484K_N501Y_D614G_H655Y _T1027I)
agaauaaacuaguauucuucugguccccacagacucagagagaacccgccaccauguucguguuccugguccuccugccccuggugagcucccagugcgugaacuucaccaaccgcacccagcucccgagcgccuacacgaacuccuucacccggggcgucuacuaccccgacaagguguuccgcagcuccgugcugcacagcacccaggaccuguuccuccccuucuucuccaacgucaccugguuccacgccauccacgugagcgggacgaacggcaccaagcgguucgacaaccccgugcugccguucaacgacggggucuacuucgcguccaccgagaaguccaacaucauccgcggcuggaucuucgggaccacgcuggacuccaagacccagagccuccugaucgugaacaacgccaccaacguggucaucaaggugugcgaguuccaguucugcaacuaccccuuccugggcguguacuaccacaagaacaacaaguccuggauggagagcgaguuccgggucuacuccagcgccaacaacugcaccuucgaguacgugucccagcccuuccucauggaccuggagggcaagcaggggaacuucaagaaccugagcgaguucguguucaagaacaucgacggcuacuucaagaucuacuccaagcacacgcccaucaaccucguccgcgaccugccgcagggguucagcgcccuggagccccucguggaccugcccaucggcaucaacaucacccgguuccagacccugcucgcccugcaccgcagcuaccugacccccggggacuccagcuccggcuggacggcgggcgccgccgccuacuacgugggguaccuccagccgcggaccuuccugcugaaguacaacgagaacggcaccaucaccgacgcggucgacugcgcccucgacccccugagcgagacgaagugcacccugaaguccuucaccguggagaaggggaucuaccagaccagcaacuuccgcgugcagcccacggaguccaucguccgguuccccaacaucaccaaccucugcccguucggcgagguguucaacgccacccgcuucgccagcgucuacgccuggaaccggaagcgcaucuccaacugcguggcggacuacagcgugcuguacaacuccgccagcuucuccaccuucaagugcuacggcgucagccccacgaagcugaacgaccucugcuucaccaacguguacgccgacuccuucgugauccgcggggacgagguccggcagaucgcccccggccagaccgggaccaucgccgacuacaacuacaagcugcccgacgacuucacgggcugcgugaucgcguggaacagcaacaaccuggacuccaaggucgggggcaacuacaacuaccucuaccggcuguuccgcaagagcaaccugaagccguucgagcgggacaucuccaccgagaucuaccaggccggcagcacccccugcaacggggugaagggcuucaacugcuacuucccccuccagagcuacggguuccagcccaccuacggcgugggguaccagccguaccgcguggucgugcuguccuucgagcugcuccacgcccccgccacggugugcggccccaagaaguccaccaaccuggucaagaacaagugcgugaacuucaacuucaacggccugaccgggaccggcgugcucaccgagagcaacaagaaguuccugcccuuccagcaguucgggcgggacaucgccgacacgaccgacgcgguccgcgacccgcagacccuggagauccuggacaucacccccugcagcuucggcgggguguccgugaucacgcccggcaccaacaccagcaaccaggucgccgugcucuaccagggcgugaacugcaccgaggucccgguggccauccacgccgaccagcugacgcccaccuggcgcguguacuccaccgggagcaacgucuuccagacccgggccggcugccugaucggggcggaguacgugaacaacuccuacgagugcgacauccccaucggcgccggcaucugcgccagcuaccagacgcagaccaacagcccccgccgggcccgcagcguggcgucccagagcaucaucgccuacaccaugucccucggggccgagaacagcgucgccuacuccaacaacagcaucgccaucccgaccaacuucacgaucagcgugaccaccgagauccugcccguguccaugaccaagacgagcgucgacugcaccauguacaucugcggcgacuccaccgagugcagcaaccugcuccugcaguacggguccuucugcacccagcugaaccgggcgcucacgggcaucgccguggagcaggacaagaacacccaggagguguucgcccaggucaagcagaucuacaagaccccgcccaucaaggacuucgggggcuucaacuucagccagauccugcccgaccccuccaagcccagcaagcgcuccuucaucgaggaccuccuguucaacaaggugacccuggccgacgccggcuucaucaagcaguacggggacugccugggcgacaucgcggcccgggaccucaucugcgcccagaaguucaacgggcugacggugcugcccccgcuccugaccgacgagaugaucgcccaguacaccagcgcccugcucgcgggcaccaucacguccggguggaccuucggcgccggcgccgcccugcagauccccuucgcgaugcagauggccuaccgcuucaacgggaucggcgucacccagaacgugcuguacgagaaccagaagcucaucgccaaccaguucaacagcgccaucgggaagauccaggacucccugagcuccaccgccagcgcgcugggcaagcuccaggacguggucaaccagaacgcccaggcccugaacacgcuggugaagcagcucuccagcaacuucggggccaucuccagcgugcugaacgacauccugagccggcucgacaaggucgaggccgaggugcagaucgaccgccugaucaccggccggcugcagucccuccagaccuacgugacccagcagcugauccgcgcggccgagauccgggccagcgccaaccuggccgcgaucaagauguccgagugcguccucggccagagcaagcgcguggacuucugcgggaagggcuaccaccugauguccuucccccagagcgcgccccacgggguggucuuccugcacgugaccuacgucccggcccaggagaagaacuucacgaccgcccccgccaucugccacgacggcaaggcccacuucccccgggaggggguguucguguccaacggcacccacugguucgucacccagcgcaacuucuacgagccccagaucaucacgaccgacaacaccuucgugagcggcaacugcgacguggucaucgggaucgugaacaacaccguguacgacccgcuccagcccgagcuggacuccuucaaggaggagcuggacaaguacuucaagaaccacacgagccccgacgucgaccucggcgacaucuccgggaucaacgccagcguggugaacauccagaaggagaucgaccggcugaacgaggucgccaagaaccugaacgagucccucaucgaccugcaggagcugggcaaguacgagcaguacaucaaguggcccugguacaucuggcucggcuucaucgccgggcugaucgcgaucgugauggugaccaucaugcugugcugcaugaccagcugcugcuccugccucaagggcugcugcagcugcggguccugcugcaaguucgacgaggacgacagcgagccgguccugaagggcgugaagcugcacuacaccugaugacucgagcugguacugcaugcacgcaaugcuagcugccccuuucccguccuggguaccccgagucucccccgaccucgggucccagguaugcucccaccuccaccugccccacucaccaccucugcuaguuccagacaccucccaagcacgcagcaaugcagcucaaaacgcuuagccuagccacacccccacgggaaacagcagugauuaaccuuuagcaauaaacgaaaguuuaacuaagcuauacuaaccccaggguuggucaauuucgugccagccacacccuggagcuagcaaaaaaaaaaaaaaaaaaaaaaaaaaaaaagcauaugacuaaaaaaaaaaaaaaaaaaaaaaaaaaaaaaaaaaaaaaaaaaaaaaaaaaaaaaaaaaaaaaaaaaaaaa

SEQ ID NO: 26744 - RNA, 4283 nt, Artificial Sequence
  SARS-CoV-2/Wuhan/WIV05/2019__EPI_ISL_402128 spike protein mRNA gc (1-1273)(S13I_W152C_L452R_D614G)
agaauaaacuaguauucuucugguccccacagacucagagagaacccgccaccauguucguguuccugguccuccugccccuggugagcauccagugcgugaaccucaccacccgcacgcagcugccgcccgccuacaccaacuccuucacccggggcgucuacuaccccgacaagguguuccgcagcuccgugcugcacagcacccaggaccucuuccugcccuucuucuccaacgucacgugguuccacgccauccacgugagcgggaccaacggcaccaagcgguucgacaacccggugcugcccuucaacgacggggucuacuucgcguccaccgagaaguccaacaucauccgcggcuggaucuucgggacgacccucgacagcaagacccagagccugcugaucgugaacaacgccaccaacguggucaucaaggugugcgaguuccaguucugcaacgaccccuuccucggcguguacuaccacaagaacaacaaguccugcauggagagcgaguuccgggucuacuccagcgccaacaacugcacguucgaguacgugucccagcccuuccugauggaccuggagggcaagcaggggaacuucaagaaccuccgcgaguucguguucaagaacaucgacggcuacuucaagaucuacagcaagcacaccccgaucaaccugguccgggaccugccccagggguucuccgcccucgagccccugguggaccugcccaucggcaucaacaucacccgcuuccagacccuccuggcccugcaccggagcuaccucacgccgggggacuccagcagcggcuggaccgcgggcgccgccgccuacuacgugggguaccugcagccccgcaccuuccugcucaaguacaacgagaacggcaccaucacggacgcggucgacugcgcccuggacccccuguccgagaccaagugcacccucaagagcuucaccguggagaaggggaucuaccagacguccaacuuccgggugcagcccaccgagagcaucguccgcuucccgaacaucaccaaccugugccccuucggcgagguguucaacgccacccgguucgccuccgucuacgccuggaaccgcaagcggaucagcaacugcguggcggacuacuccgugcuguacaacagcgccuccuucagcacguucaagugcuacggcgucucccccaccaagcucaacgaccugugcuucaccaacguguacgccgacagcuucgugauccgcggggacgagguccggcagaucgcccccggccagaccgggaagaucgccgacuacaacuacaagcugccggacgacuucacgggcugcgugaucgcguggaacuccaacaaccucgacagcaaggucgggggcaacuacaacuaccgcuaccggcuguuccgcaaguccaaccugaagcccuucgagcgggacaucagcaccgagaucuaccaggccggcuccacccccugcaacgggguggagggcuucaacugcuacuucccccuccagagcuacggguuccagccgaccaacggcgugggguaccagcccuaccgcguggucgugcuguccuucgagcugcuccacgcccccgccacggugugcggccccaagaaguccaccaaccuggucaagaacaagugcgugaacuucaacuucaacggccugaccgggaccggcgugcucaccgagagcaacaagaaguuccugccguuccagcaguucgggcgcgacaucgccgacacgaccgacgcgguccgggacccccagacccuggagauccuggacaucacccccugcagcuucggcggggugagcgugaucacgccgggcaccaacaccuccaaccaggucgccgugcucuaccagggcgugaacugcaccgagguccccguggccauccacgccgaccagcugacgcccaccuggcgcguguacagcaccggguccaacgucuuccagacccgggccggcugccugaucggggcggagcacgugaacaacagcuacgagugcgacauccccaucggcgccggcaucugcgccuccuaccagacgcagaccaacagcccgcgccgggcccgcuccguggcgagccaguccaucaucgccuacaccaugagccucggggccgagaacuccgucgccuacagcaacaacuccaucgccauccccaccaacuucacgaucagcgugaccaccgagauccugcccguguccaugaccaagacgagcgucgacugcaccauguacaucugcggcgacagcaccgagugcuccaaccugcuccugcaguacgggagcuucugcacccagcugaaccgggcgcucacgggcaucgccguggagcaggacaagaacacccaggagguguucgcccaggucaagcagaucuacaagacgcccccgaucaaggacuucgggggcuucaacuucucccagauccugcccgaccccagcaagcccuccaagcgcagcuucaucgaggaccuccuguucaacaaggugacccuggccgacgccggcuucaucaagcaguacggggacugccugggcgacaucgcggcccgggaccucaucugcgcccagaaguucaacgggcugaccgugcugccgccccuccugaccgacgagaugaucgcccaguacaccuccgcccugcucgcgggcaccaucacgagcggguggaccuucggcgccggcgccgcccugcagauccccuucgcgaugcagauggccuaccgcuucaacgggaucggcgucacccagaacgugcuguacgagaaccagaagcucaucgccaaccaguucaacuccgccaucgggaagauccaggacagccuguccagcaccgccuccgcgcugggcaagcuccaggacguggucaaccagaacgcccaggcccugaacacgcuggugaagcagcucagcuccaacuucggggccaucagcuccgugcugaacgacauccugagccggcucgacaaggucgaggccgaggugcagaucgaccgccugaucaccggccggcugcagucccuccagaccuacgugacccagcagcugauccgcgcggccgagauccgggccagcgccaaccuggccgcgaccaagaugagcgagugcguccucggccaguccaagcgcguggacuucugcgggaagggcuaccaccugaugagcuucccccaguccgccccgcacgggguggucuuccugcacgugacguacguccccgcccaggagaagaacuucaccaccgcccccgcgaucugccacgacggcaaggcccacuucccccgggaggggguguucgugagcaacggcacccacugguucgucacgcagcgcaacuucuacgagccgcagaucaucaccaccgacaacaccuucguguccggcaacugcgacguggucaucgggaucgugaacaacacgguguacgacccccuccagcccgagcuggacagcuucaaggaggagcuggacaaguacuucaagaaccacaccucccccgacgucgaccucggcgacaucagcgggaucaacgccuccguggugaacauccagaaggagaucgaccggcugaacgaggucgccaagaaccugaacgagagccucaucgaccugcaggagcugggcaaguacgagcaguacaucaaguggccgugguacaucuggcucggcuucaucgccgggcugaucgcgaucgugauggugaccaucaugcugugcugcaugaccuccugcugcagcugccucaagggcugcugcuccugcgggagcugcugcaaguucgacgaggacgacuccgagcccguccugaagggcgugaagcugcacuacacgugaugacucgagcugguacugcaugcacgcaaugcuagcugccccuuucccguccuggguaccccgagucucccccgaccucgggucccagguaugcucccaccuccaccugccccacucaccaccucugcuaguuccagacaccucccaagcacgcagcaaugcagcucaaaacgcuuagccuagccacacccccacgggaaacagcagugauuaaccuuuagcaauaaacgaaaguuuaacuaagcuauacuaaccccaggguuggucaauuucgugccagccacacccuggagcuagcaaaaaaaaaaaaaaaaaaaaaaaaaaaaaagcauaugacuaaaaaaaaaaaaaaaaaaaaaaaaaaaaaaaaaaaaaaaaaaaaaaaaaaaaaaaaaaaaaaaaaaaaaa

SEQ ID NO: 26745 - RNA, 4283 nt, Artificial Sequence
  SARS-CoV-2/Wuhan/WIV05/2019__EPI_ISL_402128 spike protein mRNA gc (1-1273)
agaauaaacuaguauucuucugguccccacagacucagagagaacccgccaccauguucguguuccuggugcugcugccccuggugagcagccagugcgugaaccugaccacccggacccagcugccaccagccuacaccaacagcuucacccggggcgucuacuaccccgacaagguguuccggagcagcguccugcacagcacccaggaccuguuccugcccuucuucagcaacgugaccugguuccacgccauccacgugagcggcaccaacggcaccaagcgguucgacaaccccgugcugcccuucaacgacggcguguacuucgccagcaccgagaagagcaacaucauccggggcuggaucuucggcaccacccuggacagcaagacccagagccugcugaucgugaauaacgccaccaacguggugaucaaggugugcgaguuccaguucugcaacgaccccuuccugggcguguacuaccacaagaacaacaagagcuggauggagagcgaguuccggguguacagcagcgccaacaacugcaccuucgaguacgugagccagcccuuccugauggaccuggagggcaagcagggcaacuucaagaaccugcgggaguucguguucaagaacaucgacggcuacuucaagaucuacagcaagcacaccccaaucaaccuggugcgggaucugccccagggcuucucagcccuggagccccugguggaccugcccaucggcaucaacaucacccgguuccagacccugcuggcccugcaccggagcuaccugaccccaggcgacagcagcagcggguggacagcaggcgcggcugcuuacuacgugggcuaccugcagccccggaccuuccugcugaaguacaacgagaacggcaccaucaccgacgccguggacugcgcccuggacccucugagcgagaccaagugcacccugaagagcuucaccguggagaagggcaucuaccagaccagcaacuuccgggugcagcccaccgagagcaucgugcgguuccccaacaucaccaaccugugccccuucggcgagguguucaacgccacccgguucgccagcguguacgccuggaaccggaagcggaucagcaacugcguggccgacuacagcgugcuguacaacagcgccagcuucagcaccuucaagugcuacggcgugagccccaccaagcugaacgaccugugcuucaccaacguguacgccgacagcuucgugauccguggcgacgaggugcggcagaucgcacccggccagacaggcaagaucgccgacuacaacuacaagcugcccgacgacuucaccggcugcgugaucgccuggaacagcaacaaccucgacagcaaggugggcggcaacuacaacuaccuguaccggcuguuccggaagagcaaccugaagcccuucgagcgggacaucagcaccgagaucuaccaagccggcuccaccccuugcaacggcguggagggcuucaacugcuacuucccucugcagagcuacggcuuccagcccaccaacggcgugggcuaccagcccuaccgggugguggugcugagcuucgagcugcugcacgccccagccaccguguguggccccaagaagagcaccaaccuggugaagaacaagugcgugaacuucaacuucaacggccuuaccggcaccggcgugcugaccgagagcaacaagaaauuccugcccuuucagcaguucggccgggacaucgccgacaccaccgacgcugugcgggauccccagacccuggagauccuggacaucaccccuugcagcuucggcggcgugagcgugaucaccccaggcaccaacaccagcaaccagguggccgugcuguaccaggacgugaacugcaccgaggugcccguggccauccacgccgaccagcugacacccaccuggcgggucuacagcaccggcagcaacguguuccagacccgggccgguugccugaucggcgccgagcacgugaacaacagcuacgagugcgacauccccaucggcgccggcaucugugccagcuaccagacccagaccaauucaccccggagggcaaggagcguggccagccagagcaucaucgccuacaccaugagccugggcgccgagaacagcguggccuacagcaacaacagcaucgccauccccaccaacuucaccaucagcgugaccaccgagauucugcccgugagcaugaccaagaccagcguggacugcaccauguacaucugcggcgacagcaccgagugcagcaaccugcugcugcaguacggcagcuucugcacccagcugaaccgggcccugaccggcaucgccguggagcaggacaagaacacccaggagguguucgcccaggugaagcagaucuacaagaccccucccaucaaggacuucggcggcuucaacuucagccagauccugcccgaccccagcaagcccagcaagcggagcuucaucgaggaccugcuguucaacaaggugacccuagccgacgccggcuucaucaagcaguacggcgacugccucggcgacauagccgcccgggaccugaucugcgcccagaaguucaacggccugaccgugcugccuccccugcugaccgacgagaugaucgcccaguacaccagcgcccuguuagccggaaccaucaccagcggcuggacuuucggcgcuggagccgcucugcagauccccuucgccaugcagauggccuaccgguucaacggcaucggcgugacccagaacgugcuguacgagaaccagaagcugaucgccaaccaguucaacagcgccaucggcaagauccaggacagccugagcagcaccgcuagcgcccugggcaagcugcaggacguggugaaccagaacgcccaggcccugaacacccuggugaagcagcugagcagcaacuucggcgccaucagcagcgugcugaacgacauccugagccggcuggacaaggucgaggccgaggugcagaucgaccggcugaucacuggccggcugcagagccugcagaccuacgugacccagcagcugauccgggccgccgagauucgggccagcgccaaccuggccgccaccaagaugagcgagugcgugcugggccagagcaagcggguggacuucugcggcaagggcuaccaccugaugagcuuuccccagagcgcaccccacggagugguguuccugcacgugaccuacgugcccgcccaggagaagaacuucaccaccgccccagccaucugccacgacggcaaggcccacuuuccccgggagggcguguucgugagcaacggcacccacugguucgugacccagcggaacuucuacgagccccagaucaucaccaccgacaacaccuucgugagcggcaacugcgacguggugaucggcaucgugaacaacaccguguacgauccccugcagcccgagcuggacagcuucaaggaggagcuggacaaguacuucaagaaucacaccagccccgacguggaccugggcgacaucagcggcaucaacgccagcguggugaacauccagaaggagaucgaucggcugaacgagguggccaagaaccugaacgagagccugaucgaccugcaggagcugggcaaguacgagcaguacaucaaguggcccugguacaucuggcugggcuucaucgccggccugaucgccaucgugauggugaccaucaugcugugcugcaugaccagcugcugcagcugccugaagggcuguugcagcugcggcagcugcugcaaguucgacgaggacgacagcgagcccgugcugaagggcgugaagcugcacuacaccugaugacucgagcugguacugcaugcacgcaaugcuagcugccccuuucccguccuggguaccccgagucucccccgaccucgggucccagguaugcucccaccuccaccugccccacucaccaccucugcuaguuccagacaccucccaagcacgcagcaaugcagcucaaaacgcuuagccuagccacacccccacgggaaacagcagugauuaaccuuuagcaauaaacgaaaguuuaacuaagcuauacuaaccccaggguuggucaauuucgugccagccacacccuggagcuagcaaaaaaaaaaaaaaaaaaaaaaaaaaaaaagcauaugacuaaaaaaaaaaaaaaaaaaaaaaaaaaaaaaaaaaaaaaaaaaaaaaaaaaaaaaaaaaaaaaaaaaaaaa

SEQ ID NO: 26746 - RNA, 4283 nt, Artificial Sequence
  SARS-CoV-2/Wuhan/WIV05/2019__EPI_ISL_402128 spike protein mRNA gc (1-1273)(D614G)
agaauaaacuaguauucuucugguccccacagacucagagagaacccgccaccauguucguguuccuggugcugcugccccuggugagcagccagugcgugaaccugaccacccggacccagcugccaccagccuacaccaacagcuucacccggggcgucuacuaccccgacaagguguuccggagcagcguccugcacagcacccaggaccuguuccugcccuucuucagcaacgugaccugguuccacgccauccacgugagcggcaccaacggcaccaagcgguucgacaaccccgugcugcccuucaacgacggcguguacuucgccagcaccgagaagagcaacaucauccggggcuggaucuucggcaccacccuggacagcaagacccagagccugcugaucgugaauaacgccaccaacguggugaucaaggugugcgaguuccaguucugcaacgaccccuuccugggcguguacuaccacaagaacaacaagagcuggauggagagcgaguuccggguguacagcagcgccaacaacugcaccuucgaguacgugagccagcccuuccugauggaccuggagggcaagcagggcaacuucaagaaccugcgggaguucguguucaagaacaucgacggcuacuucaagaucuacagcaagcacaccccaaucaaccuggugcgggaucugccccagggcuucucagcccuggagccccugguggaccugcccaucggcaucaacaucacccgguuccagacccugcuggcccugcaccggagcuaccugaccccaggcgacagcagcagcggguggacagcaggcgcggcugcuuacuacgugggcuaccugcagccccggaccuuccugcugaaguacaacgagaacggcaccaucaccgacgccguggacugcgcccuggacccucugagcgagaccaagugcacccugaagagcuucaccguggagaagggcaucuaccagaccagcaacuuccgggugcagcccaccgagagcaucgugcgguuccccaacaucaccaaccugugccccuucggcgagguguucaacgccacccgguucgccagcguguacgccuggaaccggaagcggaucagcaacugcguggccgacuacagcgugcuguacaacagcgccagcuucagcaccuucaagugcuacggcgugagccccaccaagcugaacgaccugugcuucaccaacguguacgccgacagcuucgugauccguggcgacgaggugcggcagaucgcacccggccagacaggcaagaucgccgacuacaacuacaagcugcccgacgacuucaccggcugcgugaucgccuggaacagcaacaaccucgacagcaaggugggcggcaacuacaacuaccuguaccggcuguuccggaagagcaaccugaagcccuucgagcgggacaucagcaccgagaucuaccaagccggcuccaccccuugcaacggcguggagggcuucaacugcuacuucccucugcagagcuacggcuuccagcccaccaacggcgugggcuaccagcccuaccgggugguggugcugagcuucgagcugcugcacgccccagccaccguguguggccccaagaagagcaccaaccuggugaagaacaagugcgugaacuucaacuucaacggccuuaccggcaccggcgugcugaccgagagcaacaagaaauuccugcccuuucagcaguucggccgggacaucgccgacaccaccgacgcugugcgggauccccagacccuggagauccuggacaucaccccuugcagcuucggcggcgugagcgugaucaccccaggcaccaacaccagcaaccagguggccgugcuguaccagggcgugaacugcaccgaggugcccguggccauccacgccgaccagcugacacccaccuggcgggucuacagcaccggcagcaacguguuccagacccgggccgguugccugaucggcgccgagcacgugaacaacagcuacgagugcgacauccccaucggcgccggcaucugugccagcuaccagacccagaccaauucaccccggagggcaaggagcguggccagccagagcaucaucgccuacaccaugagccugggcgccgagaacagcguggccuacagcaacaacagcaucgccauccccaccaacuucaccaucagcgugaccaccgagauucugcccgugagcaugaccaagaccagcguggacugcaccauguacaucugcggcgacagcaccgagugcagcaaccugcugcugcaguacggcagcuucugcacccagcugaaccgggcccugaccggcaucgccguggagcaggacaagaacacccaggagguguucgcccaggugaagcagaucuacaagaccccucccaucaaggacuucggcggcuucaacuucagccagauccugcccgaccccagcaagcccagcaagcggagcuucaucgaggaccugcuguucaacaaggugacccuagccgacgccggcuucaucaagcaguacggcgacugccucggcgacauagccgcccgggaccugaucugcgcccagaaguucaacggccugaccgugcugccuccccugcugaccgacgagaugaucgcccaguacaccagcgcccuguuagccggaaccaucaccagcggcuggacuuucggcgcuggagccgcucugcagauccccuucgccaugcagauggccuaccgguucaacggcaucggcgugacccagaacgugcuguacgagaaccagaagcugaucgccaaccaguucaacagcgccaucggcaagauccaggacagccugagcagcaccgcuagcgcccugggcaagcugcaggacguggugaaccagaacgcccaggcccugaacacccuggugaagcagcugagcagcaacuucggcgccaucagcagcgugcugaacgacauccugagccggcuggacaaggucgaggccgaggugcagaucgaccggcugaucacuggccggcugcagagccugcagaccuacgugacccagcagcugauccgggccgccgagauucgggccagcgccaaccuggccgccaccaagaugagcgagugcgugcugggccagagcaagcggguggacuucugcggcaagggcuaccaccugaugagcuuuccccagagcgcaccccacggagugguguuccugcacgugaccuacgugcccgcccaggagaagaacuucaccaccgccccagccaucugccacgacggcaaggcccacuuuccccgggagggcguguucgugagcaacggcacccacugguucgugacccagcggaacuucuacgagccccagaucaucaccaccgacaacaccuucgugagcggcaacugcgacguggugaucggcaucgugaacaacaccguguacgauccccugcagcccgagcuggacagcuucaaggaggagcuggacaaguacuucaagaaucacaccagccccgacguggaccugggcgacaucagcggcaucaacgccagcguggugaacauccagaaggagaucgaucggcugaacgagguggccaagaaccugaacgagagccugaucgaccugcaggagcugggcaaguacgagcaguacaucaaguggcccugguacaucuggcugggcuucaucgccggccugaucgccaucgugauggugaccaucaugcugugcugcaugaccagcugcugcagcugccugaagggcuguugcagcugcggcagcugcugcaaguucgacgaggacgacagcgagcccgugcugaagggcgugaagcugcacuacaccugaugacucgagcugguacugcaugcacgcaaugcuagcugccccuuucccguccuggguaccccgagucucccccgaccucgggucccagguaugcucccaccuccaccugccccacucaccaccucugcuaguuccagacaccucccaagcacgcagcaaugcagcucaaaacgcuuagccuagccacacccccacgggaaacagcagugauuaaccuuuagcaauaaacgaaaguuuaacuaagcuauacuaaccccaggguuggucaauuucgugccagccacacccuggagcuagcaaaaaaaaaaaaaaaaaaaaaaaaaaaaaagcauaugacuaaaaaaaaaaaaaaaaaaaaaaaaaaaaaaaaaaaaaaaaaaaaaaaaaaaaaaaaaaaaaaaaaaaaaa

SEQ ID NO: 26747 - RNA, 4283 nt, Artificial Sequence
  SARS-CoV-2/Wuhan/WIV05/2019__EPI_ISL_402128 spike protein mRNA gc (1-1273)(A222V_D614G)
agaauaaacuaguauucuucugguccccacagacucagagagaacccgccaccauguucguguuccuggugcugcugccccuggugagcagccagugcgugaaccugaccacccggacccagcugccaccagccuacaccaacagcuucacccggggcgucuacuaccccgacaagguguuccggagcagcguccugcacagcacccaggaccuguuccugcccuucuucagcaacgugaccugguuccacgccauccacgugagcggcaccaacggcaccaagcgguucgacaaccccgugcugcccuucaacgacggcguguacuucgccagcaccgagaagagcaacaucauccggggcuggaucuucggcaccacccuggacagcaagacccagagccugcugaucgugaauaacgccaccaacguggugaucaaggugugcgaguuccaguucugcaacgaccccuuccugggcguguacuaccacaagaacaacaagagcuggauggagagcgaguuccggguguacagcagcgccaacaacugcaccuucgaguacgugagccagcccuuccugauggaccuggagggcaagcagggcaacuucaagaaccugcgggaguucguguucaagaacaucgacggcuacuucaagaucuacagcaagcacaccccaaucaaccuggugcgggaucugccccagggcuucucagugcuggagccccugguggaccugcccaucggcaucaacaucacccgguuccagacccugcuggcccugcaccggagcuaccugaccccaggcgacagcagcagcggguggacagcaggcgcggcugcuuacuacgugggcuaccugcagccccggaccuuccugcugaaguacaacgagaacggcaccaucaccgacgccguggacugcgcccuggacccucugagcgagaccaagugcacccugaagagcuucaccguggagaagggcaucuaccagaccagcaacuuccgggugcagcccaccgagagcaucgugcgguuccccaacaucaccaaccugugccccuucggcgagguguucaacgccacccgguucgccagcguguacgccuggaaccggaagcggaucagcaacugcguggccgacuacagcgugcuguacaacagcgccagcuucagcaccuucaagugcuacggcgugagccccaccaagcugaacgaccugugcuucaccaacguguacgccgacagcuucgugauccguggcgacgaggugcggcagaucgcacccggccagacaggcaagaucgccgacuacaacuacaagcugcccgacgacuucaccggcugcgugaucgccuggaacagcaacaaccucgacagcaaggugggcggcaacuacaacuaccuguaccggcuguuccggaagagcaaccugaagcccuucgagcgggacaucagcaccgagaucuaccaagccggcuccaccccuugcaacggcguggagggcuucaacugcuacuucccucugcagagcuacggcuuccagcccaccaacggcgugggcuaccagcccuaccgggugguggugcugagcuucgagcugcugcacgccccagccaccguguguggccccaagaagagcaccaaccuggugaagaacaagugcgugaacuucaacuucaacggccuuaccggcaccggcgugcugaccgagagcaacaagaaauuccugcccuuucagcaguucggccgggacaucgccgacaccaccgacgcugugcgggauccccagacccuggagauccuggacaucaccccuugcagcuucggcggcgugagcgugaucaccccaggcaccaacaccagcaaccagguggccgugcuguaccagggcgugaacugcaccgaggugcccguggccauccacgccgaccagcugacacccaccuggcgggucuacagcaccggcagcaacguguuccagacccgggccgguugccugaucggcgccgagcacgugaacaacagcuacgagugcgacauccccaucggcgccggcaucugugccagcuaccagacccagaccaauucaccccggagggcaaggagcguggccagccagagcaucaucgccuacaccaugagccugggcgccgagaacagcguggccuacagcaacaacagcaucgccauccccaccaacuucaccaucagcgugaccaccgagauucugcccgugagcaugaccaagaccagcguggacugcaccauguacaucugcggcgacagcaccgagugcagcaaccugcugcugcaguacggcagcuucugcacccagcugaaccgggcccugaccggcaucgccguggagcaggacaagaacacccaggagguguucgcccaggugaagcagaucuacaagaccccucccaucaaggacuucggcggcuucaacuucagccagauccugcccgaccccagcaagcccagcaagcggagcuucaucgaggaccugcuguucaacaaggugacccuagccgacgccggcuucaucaagcaguacggcgacugccucggcgacauagccgcccgggaccugaucugcgcccagaaguucaacggccugaccgugcugccuccccugcugaccgacgagaugaucgcccaguacaccagcgcccuguuagccggaaccaucaccagcggcuggacuuucggcgcuggagccgcucugcagauccccuucgccaugcagauggccuaccgguucaacggcaucggcgugacccagaacgugcuguacgagaaccagaagcugaucgccaaccaguucaacagcgccaucggcaagauccaggacagccugagcagcaccgcuagcgcccugggcaagcugcaggacguggugaaccagaacgcccaggcccugaacacccuggugaagcagcugagcagcaacuucggcgccaucagcagcgugcugaacgacauccugagccggcuggacaaggucgaggccgaggugcagaucgaccggcugaucacuggccggcugcagagccugcagaccuacgugacccagcagcugauccgggccgccgagauucgggccagcgccaaccuggccgccaccaagaugagcgagugcgugcugggccagagcaagcggguggacuucugcggcaagggcuaccaccugaugagcuuuccccagagcgcaccccacggagugguguuccugcacgugaccuacgugcccgcccaggagaagaacuucaccaccgccccagccaucugccacgacggcaaggcccacuuuccccgggagggcguguucgugagcaacggcacccacugguucgugacccagcggaacuucuacgagccccagaucaucaccaccgacaacaccuucgugagcggcaacugcgacguggugaucggcaucgugaacaacaccguguacgauccccugcagcccgagcuggacagcuucaaggaggagcuggacaaguacuucaagaaucacaccagccccgacguggaccugggcgacaucagcggcaucaacgccagcguggugaacauccagaaggagaucgaucggcugaacgagguggccaagaaccugaacgagagccugaucgaccugcaggagcugggcaaguacgagcaguacaucaaguggcccugguacaucuggcugggcuucaucgccggccugaucgccaucgugauggugaccaucaugcugugcugcaugaccagcugcugcagcugccugaagggcuguugcagcugcggcagcugcugcaaguucgacgaggacgacagcgagcccgugcugaagggcgugaagcugcacuacaccugaugacucgagcugguacugcaugcacgcaaugcuagcugccccuuucccguccuggguaccccgagucucccccgaccucgggucccagguaugcucccaccuccaccugccccacucaccaccucugcuaguuccagacaccucccaagcacgcagcaaugcagcucaaaacgcuuagccuagccacacccccacgggaaacagcagugauuaaccuuuagcaauaaacgaaaguuuaacuaagcuauacuaaccccaggguuggucaauuucgugccagccacacccuggagcuagcaaaaaaaaaaaaaaaaaaaaaaaaaaaaaagcauaugacuaaaaaaaaaaaaaaaaaaaaaaaaaaaaaaaaaaaaaaaaaaaaaaaaaaaaaaaaaaaaaaaaaaaaaa

SEQ ID NO: 26748 - RNA, 4283 nt, Artificial Sequence
  SARS-CoV-2/Wuhan/WIV05/2019__EPI_ISL_402128 spike protein mRNA gc (1-1273)(N439K_D614G)
agaauaaacuaguauucuucugguccccacagacucagagagaacccgccaccauguucguguuccuggugcugcugccccuggugagcagccagugcgugaaccugaccacccggacccagcugccaccagccuacaccaacagcuucacccggggcgucuacuaccccgacaagguguuccggagcagcguccugcacagcacccaggaccuguuccugcccuucuucagcaacgugaccugguuccacgccauccacgugagcggcaccaacggcaccaagcgguucgacaaccccgugcugcccuucaacgacggcguguacuucgccagcaccgagaagagcaacaucauccggggcuggaucuucggcaccacccuggacagcaagacccagagccugcugaucgugaauaacgccaccaacguggugaucaaggugugcgaguuccaguucugcaacgaccccuuccugggcguguacuaccacaagaacaacaagagcuggauggagagcgaguuccggguguacagcagcgccaacaacugcaccuucgaguacgugagccagcccuuccugauggaccuggagggcaagcagggcaacuucaagaaccugcgggaguucguguucaagaacaucgacggcuacuucaagaucuacagcaagcacaccccaaucaaccuggugcgggaucugccccagggcuucucagcccuggagccccugguggaccugcccaucggcaucaacaucacccgguuccagacccugcuggcccugcaccggagcuaccugaccccaggcgacagcagcagcggguggacagcaggcgcggcugcuuacuacgugggcuaccugcagccccggaccuuccugcugaaguacaacgagaacggcaccaucaccgacgccguggacugcgcccuggacccucugagcgagaccaagugcacccugaagagcuucaccguggagaagggcaucuaccagaccagcaacuuccgggugcagcccaccgagagcaucgugcgguuccccaacaucaccaaccugugccccuucggcgagguguucaacgccacccgguucgccagcguguacgccuggaaccggaagcggaucagcaacugcguggccgacuacagcgugcuguacaacagcgccagcuucagcaccuucaagugcuacggcgugagccccaccaagcugaacgaccugugcuucaccaacguguacgccgacagcuucgugauccguggcgacgaggugcggcagaucgcacccggccagacaggcaagaucgccgacuacaacuacaagcugcccgacgacuucaccggcugcgugaucgccuggaacagcaagaaccucgacagcaaggugggcggcaacuacaacuaccuguaccggcuguuccggaagagcaaccugaagcccuucgagcgggacaucagcaccgagaucuaccaagccggcuccaccccuugcaacggcguggagggcuucaacugcuacuucccucugcagagcuacggcuuccagcccaccaacggcgugggcuaccagcccuaccgggugguggugcugagcuucgagcugcugcacgccccagccaccguguguggccccaagaagagcaccaaccuggugaagaacaagugcgugaacuucaacuucaacggccuuaccggcaccggcgugcugaccgagagcaacaagaaauuccugcccuuucagcaguucggccgggacaucgccgacaccaccgacgcugugcgggauccccagacccuggagauccuggacaucaccccuugcagcuucggcggcgugagcgugaucaccccaggcaccaacaccagcaaccagguggccgugcuguaccagggcgugaacugcaccgaggugcccguggccauccacgccgaccagcugacacccaccuggcgggucuacagcaccggcagcaacguguuccagacccgggccgguugccugaucggcgccgagcacgugaacaacagcuacgagugcgacauccccaucggcgccggcaucugugccagcuaccagacccagaccaauucaccccggagggcaaggagcguggccagccagagcaucaucgccuacaccaugagccugggcgccgagaacagcguggccuacagcaacaacagcaucgccauccccaccaacuucaccaucagcgugaccaccgagauucugcccgugagcaugaccaagaccagcguggacugcaccauguacaucugcggcgacagcaccgagugcagcaaccugcugcugcaguacggcagcuucugcacccagcugaaccgggcccugaccggcaucgccguggagcaggacaagaacacccaggagguguucgcccaggugaagcagaucuacaagaccccucccaucaaggacuucggcggcuucaacuucagccagauccugcccgaccccagcaagcccagcaagcggagcuucaucgaggaccugcuguucaacaaggugacccuagccgacgccggcuucaucaagcaguacggcgacugccucggcgacauagccgcccgggaccugaucugcgcccagaaguucaacggccugaccgugcugccuccccugcugaccgacgagaugaucgcccaguacaccagcgcccuguuagccggaaccaucaccagcggcuggacuuucggcgcuggagccgcucugcagauccccuucgccaugcagauggccuaccgguucaacggcaucggcgugacccagaacgugcuguacgagaaccagaagcugaucgccaaccaguucaacagcgccaucggcaagauccaggacagccugagcagcaccgcuagcgcccugggcaagcugcaggacguggugaaccagaacgcccaggcccugaacacccuggugaagcagcugagcagcaacuucggcgccaucagcagcgugcugaacgacauccugagccggcuggacaaggucgaggccgaggugcagaucgaccggcugaucacuggccggcugcagagccugcagaccuacgugacccagcagcugauccgggccgccgagauucgggccagcgccaaccuggccgccaccaagaugagcgagugcgugcugggccagagcaagcggguggacuucugcggcaagggcuaccaccugaugagcuuuccccagagcgcaccccacggagugguguuccugcacgugaccuacgugcccgcccaggagaagaacuucaccaccgccccagccaucugccacgacggcaaggcccacuuuccccgggagggcguguucgugagcaacggcacccacugguucgugacccagcggaacuucuacgagccccagaucaucaccaccgacaacaccuucgugagcggcaacugcgacguggugaucggcaucgugaacaacaccguguacgauccccugcagcccgagcuggacagcuucaaggaggagcuggacaaguacuucaagaaucacaccagccccgacguggaccugggcgacaucagcggcaucaacgccagcguggugaacauccagaaggagaucgaucggcugaacgagguggccaagaaccugaacgagagccugaucgaccugcaggagcugggcaaguacgagcaguacaucaaguggcccugguacaucuggcugggcuucaucgccggccugaucgccaucgugauggugaccaucaugcugugcugcaugaccagcugcugcagcugccugaagggcuguugcagcugcggcagcugcugcaaguucgacgaggacgacagcgagcccgugcugaagggcgugaagcugcacuacaccugaugacucgagcugguacugcaugcacgcaaugcuagcugccccuuucccguccuggguaccccgagucucccccgaccucgggucccagguaugcucccaccuccaccugccccacucaccaccucugcuaguuccagacaccucccaagcacgcagcaaugcagcucaaaacgcuuagccuagccacacccccacgggaaacagcagugauuaaccuuuagcaauaaacgaaaguuuaacuaagcuauacuaaccccaggguuggucaauuucgugccagccacacccuggagcuagcaaaaaaaaaaaaaaaaaaaaaaaaaaaaaagcauaugacuaaaaaaaaaaaaaaaaaaaaaaaaaaaaaaaaaaaaaaaaaaaaaaaaaaaaaaaaaaaaaaaaaaaaaa

SEQ ID NO: 26749 - RNA, 4283 nt, Artificial Sequence
  SARS-CoV-2/Wuhan/WIV05/2019__EPI_ISL_402128 spike protein mRNA gc (1-1273)(S477N_D614G)
agaauaaacuaguauucuucugguccccacagacucagagagaacccgccaccauguucguguuccuggugcugcugccccuggugagcagccagugcgugaaccugaccacccggacccagcugccaccagccuacaccaacagcuucacccggggcgucuacuaccccgacaagguguuccggagcagcguccugcacagcacccaggaccuguuccugcccuucuucagcaacgugaccugguuccacgccauccacgugagcggcaccaacggcaccaagcgguucgacaaccccgugcugcccuucaacgacggcguguacuucgccagcaccgagaagagcaacaucauccggggcuggaucuucggcaccacccuggacagcaagacccagagccugcugaucgugaauaacgccaccaacguggugaucaaggugugcgaguuccaguucugcaacgaccccuuccugggcguguacuaccacaagaacaacaagagcuggauggagagcgaguuccggguguacagcagcgccaacaacugcaccuucgaguacgugagccagcccuuccugauggaccuggagggcaagcagggcaacuucaagaaccugcgggaguucguguucaagaacaucgacggcuacuucaagaucuacagcaagcacaccccaaucaaccuggugcgggaucugccccagggcuucucagcccuggagccccugguggaccugcccaucggcaucaacaucacccgguuccagacccugcuggcccugcaccggagcuaccugaccccaggcgacagcagcagcggguggacagcaggcgcggcugcuuacuacgugggcuaccugcagccccggaccuuccugcugaaguacaacgagaacggcaccaucaccgacgccguggacugcgcccuggacccucugagcgagaccaagugcacccugaagagcuucaccguggagaagggcaucuaccagaccagcaacuuccgggugcagcccaccgagagcaucgugcgguuccccaacaucaccaaccugugccccuucggcgagguguucaacgccacccgguucgccagcguguacgccuggaaccggaagcggaucagcaacugcguggccgacuacagcgugcuguacaacagcgccagcuucagcaccuucaagugcuacggcgugagccccaccaagcugaacgaccugugcuucaccaacguguacgccgacagcuucgugauccguggcgacgaggugcggcagaucgcacccggccagacaggcaagaucgccgacuacaacuacaagcugcccgacgacuucaccggcugcgugaucgccuggaacagcaacaaccucgacagcaaggugggcggcaacuacaacuaccuguaccggcuguuccggaagagcaaccugaagcccuucgagcgggacaucagcaccgagaucuaccaagccggcaacaccccuugcaacggcguggagggcuucaacugcuacuucccucugcagagcuacggcuuccagcccaccaacggcgugggcuaccagcccuaccgggugguggugcugagcuucgagcugcugcacgccccagccaccguguguggccccaagaagagcaccaaccuggugaagaacaagugcgugaacuucaacuucaacggccuuaccggcaccggcgugcugaccgagagcaacaagaaauuccugcccuuucagcaguucggccgggacaucgccgacaccaccgacgcugugcgggauccccagacccuggagauccuggacaucaccccuugcagcuucggcggcgugagcgugaucaccccaggcaccaacaccagcaaccagguggccgugcuguaccagggcgugaacugcaccgaggugcccguggccauccacgccgaccagcugacacccaccuggcgggucuacagcaccggcagcaacguguuccagacccgggccgguugccugaucggcgccgagcacgugaacaacagcuacgagugcgacauccccaucggcgccggcaucugugccagcuaccagacccagaccaauucaccccggagggcaaggagcguggccagccagagcaucaucgccuacaccaugagccugggcgccgagaacagcguggccuacagcaacaacagcaucgccauccccaccaacuucaccaucagcgugaccaccgagauucugcccgugagcaugaccaagaccagcguggacugcaccauguacaucugcggcgacagcaccgagugcagcaaccugcugcugcaguacggcagcuucugcacccagcugaaccgggcccugaccggcaucgccguggagcaggacaagaacacccaggagguguucgcccaggugaagcagaucuacaagaccccucccaucaaggacuucggcggcuucaacuucagccagauccugcccgaccccagcaagcccagcaagcggagcuucaucgaggaccugcuguucaacaaggugacccuagccgacgccggcuucaucaagcaguacggcgacugccucggcgacauagccgcccgggaccugaucugcgcccagaaguucaacggccugaccgugcugccuccccugcugaccgacgagaugaucgcccaguacaccagcgcccuguuagccggaaccaucaccagcggcuggacuuucggcgcuggagccgcucugcagauccccuucgccaugcagauggccuaccgguucaacggcaucggcgugacccagaacgugcuguacgagaaccagaagcugaucgccaaccaguucaacagcgccaucggcaagauccaggacagccugagcagcaccgcuagcgcccugggcaagcugcaggacguggugaaccagaacgcccaggcccugaacacccuggugaagcagcugagcagcaacuucggcgccaucagcagcgugcugaacgacauccugagccggcuggacaaggucgaggccgaggugcagaucgaccggcugaucacuggccggcugcagagccugcagaccuacgugacccagcagcugauccgggccgccgagauucgggccagcgccaaccuggccgccaccaagaugagcgagugcgugcugggccagagcaagcggguggacuucugcggcaagggcuaccaccugaugagcuuuccccagagcgcaccccacggagugguguuccugcacgugaccuacgugcccgcccaggagaagaacuucaccaccgccccagccaucugccacgacggcaaggcccacuuuccccgggagggcguguucgugagcaacggcacccacugguucgugacccagcggaacuucuacgagccccagaucaucaccaccgacaacaccuucgugagcggcaacugcgacguggugaucggcaucgugaacaacaccguguacgauccccugcagcccgagcuggacagcuucaaggaggagcuggacaaguacuucaagaaucacaccagccccgacguggaccugggcgacaucagcggcaucaacgccagcguggugaacauccagaaggagaucgaucggcugaacgagguggccaagaaccugaacgagagccugaucgaccugcaggagcugggcaaguacgagcaguacaucaaguggcccugguacaucuggcugggcuucaucgccggccugaucgccaucgugauggugaccaucaugcugugcugcaugaccagcugcugcagcugccugaagggcuguugcagcugcggcagcugcugcaaguucgacgaggacgacagcgagcccgugcugaagggcgugaagcugcacuacaccugaugacucgagcugguacugcaugcacgcaaugcuagcugccccuuucccguccuggguaccccgagucucccccgaccucgggucccagguaugcucccaccuccaccugccccacucaccaccucugcuaguuccagacaccucccaagcacgcagcaaugcagcucaaaacgcuuagccuagccacacccccacgggaaacagcagugauuaaccuuuagcaauaaacgaaaguuuaacuaagcuauacuaaccccaggguuggucaauuucgugccagccacacccuggagcuagcaaaaaaaaaaaaaaaaaaaaaaaaaaaaaagcauaugacuaaaaaaaaaaaaaaaaaaaaaaaaaaaaaaaaaaaaaaaaaaaaaaaaaaaaaaaaaaaaaaaaaaaaaa

SEQ ID NO: 26750 - RNA, 4283 nt, Artificial Sequence
  SARS-CoV-2/Wuhan/WIV05/2019__EPI_ISL_402128 spike protein mRNA gc (1-1273)(N501Y_D614G)
agaauaaacuaguauucuucugguccccacagacucagagagaacccgccaccauguucguguuccuggugcugcugccccuggugagcagccagugcgugaaccugaccacccggacccagcugccaccagccuacaccaacagcuucacccggggcgucuacuaccccgacaagguguuccggagcagcguccugcacagcacccaggaccuguuccugcccuucuucagcaacgugaccugguuccacgccauccacgugagcggcaccaacggcaccaagcgguucgacaaccccgugcugcccuucaacgacggcguguacuucgccagcaccgagaagagcaacaucauccggggcuggaucuucggcaccacccuggacagcaagacccagagccugcugaucgugaauaacgccaccaacguggugaucaaggugugcgaguuccaguucugcaacgaccccuuccugggcguguacuaccacaagaacaacaagagcuggauggagagcgaguuccggguguacagcagcgccaacaacugcaccuucgaguacgugagccagcccuuccugauggaccuggagggcaagcagggcaacuucaagaaccugcgggaguucguguucaagaacaucgacggcuacuucaagaucuacagcaagcacaccccaaucaaccuggugcgggaucugccccagggcuucucagcccuggagccccugguggaccugcccaucggcaucaacaucacccgguuccagacccugcuggcccugcaccggagcuaccugaccccaggcgacagcagcagcggguggacagcaggcgcggcugcuuacuacgugggcuaccugcagccccggaccuuccugcugaaguacaacgagaacggcaccaucaccgacgccguggacugcgcccuggacccucugagcgagaccaagugcacccugaagagcuucaccguggagaagggcaucuaccagaccagcaacuuccgggugcagcccaccgagagcaucgugcgguuccccaacaucaccaaccugugccccuucggcgagguguucaacgccacccgguucgccagcguguacgccuggaaccggaagcggaucagcaacugcguggccgacuacagcgugcuguacaacagcgccagcuucagcaccuucaagugcuacggcgugagccccaccaagcugaacgaccugugcuucaccaacguguacgccgacagcuucgugauccguggcgacgaggugcggcagaucgcacccggccagacaggcaagaucgccgacuacaacuacaagcugcccgacgacuucaccggcugcgugaucgccuggaacagcaacaaccucgacagcaaggugggcggcaacuacaacuaccuguaccggcuguuccggaagagcaaccugaagcccuucgagcgggacaucagcaccgagaucuaccaagccggcuccaccccuugcaacggcguggagggcuucaacugcuacuucccucugcagagcuacggcuuccagcccaccuacggcgugggcuaccagcccuaccgggugguggugcugagcuucgagcugcugcacgccccagccaccguguguggccccaagaagagcaccaaccuggugaagaacaagugcgugaacuucaacuucaacggccuuaccggcaccggcgugcugaccgagagcaacaagaaauuccugcccuuucagcaguucggccgggacaucgccgacaccaccgacgcugugcgggauccccagacccuggagauccuggacaucaccccuugcagcuucggcggcgugagcgugaucaccccaggcaccaacaccagcaaccagguggccgugcuguaccagggcgugaacugcaccgaggugcccguggccauccacgccgaccagcugacacccaccuggcgggucuacagcaccggcagcaacguguuccagacccgggccgguugccugaucggcgccgagcacgugaacaacagcuacgagugcgacauccccaucggcgccggcaucugugccagcuaccagacccagaccaauucaccccggagggcaaggagcguggccagccagagcaucaucgccuacaccaugagccugggcgccgagaacagcguggccuacagcaacaacagcaucgccauccccaccaacuucaccaucagcgugaccaccgagauucugcccgugagcaugaccaagaccagcguggacugcaccauguacaucugcggcgacagcaccgagugcagcaaccugcugcugcaguacggcagcuucugcacccagcugaaccgggcccugaccggcaucgccguggagcaggacaagaacacccaggagguguucgcccaggugaagcagaucuacaagaccccucccaucaaggacuucggcggcuucaacuucagccagauccugcccgaccccagcaagcccagcaagcggagcuucaucgaggaccugcuguucaacaaggugacccuagccgacgccggcuucaucaagcaguacggcgacugccucggcgacauagccgcccgggaccugaucugcgcccagaaguucaacggccugaccgugcugccuccccugcugaccgacgagaugaucgcccaguacaccagcgcccuguuagccggaaccaucaccagcggcuggacuuucggcgcuggagccgcucugcagauccccuucgccaugcagauggccuaccgguucaacggcaucggcgugacccagaacgugcuguacgagaaccagaagcugaucgccaaccaguucaacagcgccaucggcaagauccaggacagccugagcagcaccgcuagcgcccugggcaagcugcaggacguggugaaccagaacgcccaggcccugaacacccuggugaagcagcugagcagcaacuucggcgccaucagcagcgugcugaacgacauccugagccggcuggacaaggucgaggccgaggugcagaucgaccggcugaucacuggccggcugcagagccugcagaccuacgugacccagcagcugauccgggccgccgagauucgggccagcgccaaccuggccgccaccaagaugagcgagugcgugcugggccagagcaagcggguggacuucugcggcaagggcuaccaccugaugagcuuuccccagagcgcaccccacggagugguguuccugcacgugaccuacgugcccgcccaggagaagaacuucaccaccgccccagccaucugccacgacggcaaggcccacuuuccccgggagggcguguucgugagcaacggcacccacugguucgugacccagcggaacuucuacgagccccagaucaucaccaccgacaacaccuucgugagcggcaacugcgacguggugaucggcaucgugaacaacaccguguacgauccccugcagcccgagcuggacagcuucaaggaggagcuggacaaguacuucaagaaucacaccagccccgacguggaccugggcgacaucagcggcaucaacgccagcguggugaacauccagaaggagaucgaucggcugaacgagguggccaagaaccugaacgagagccugaucgaccugcaggagcugggcaaguacgagcaguacaucaaguggcccugguacaucuggcugggcuucaucgccggccugaucgccaucgugauggugaccaucaugcugugcugcaugaccagcugcugcagcugccugaagggcuguugcagcugcggcagcugcugcaaguucgacgaggacgacagcgagcccgugcugaagggcgugaagcugcacuacaccugaugacucgagcugguacugcaugcacgcaaugcuagcugccccuuucccguccuggguaccccgagucucccccgaccucgggucccagguaugcucccaccuccaccugccccacucaccaccucugcuaguuccagacaccucccaagcacgcagcaaugcagcucaaaacgcuuagccuagccacacccccacgggaaacagcagugauuaaccuuuagcaauaaacgaaaguuuaacuaagcuauacuaaccccaggguuggucaauuucgugccagccacacccuggagcuagcaaaaaaaaaaaaaaaaaaaaaaaaaaaaaagcauaugacuaaaaaaaaaaaaaaaaaaaaaaaaaaaaaaaaaaaaaaaaaaaaaaaaaaaaaaaaaaaaaaaaaaaaaa

SEQ ID NO: 26751 - RNA, 4277 nt, Artificial Sequence
  SARS-CoV-2/Wuhan/WIV05/2019__EPI_ISL_402128 spike protein mRNA gc (1-1273)(H69del_V70del_D614G)
agaauaaacuaguauucuucugguccccacagacucagagagaacccgccaccauguucguguuccuggugcugcugccccuggugagcagccagugcgugaaccugaccacccggacccagcugccaccagccuacaccaacagcuucacccggggcgucuacuaccccgacaagguguuccggagcagcguccugcacagcacccaggaccuguuccugcccuucuucagcaacgugaccugguuccacgccaucagcggcaccaacggcaccaagcgguucgacaaccccgugcugcccuucaacgacggcguguacuucgccagcaccgagaagagcaacaucauccggggcuggaucuucggcaccacccuggacagcaagacccagagccugcugaucgugaauaacgccaccaacguggugaucaaggugugcgaguuccaguucugcaacgaccccuuccugggcguguacuaccacaagaacaacaagagcuggauggagagcgaguuccggguguacagcagcgccaacaacugcaccuucgaguacgugagccagcccuuccugauggaccuggagggcaagcagggcaacuucaagaaccugcgggaguucguguucaagaacaucgacggcuacuucaagaucuacagcaagcacaccccaaucaaccuggugcgggaucugccccagggcuucucagcccuggagccccugguggaccugcccaucggcaucaacaucacccgguuccagacccugcuggcccugcaccggagcuaccugaccccaggcgacagcagcagcggguggacagcaggcgcggcugcuuacuacgugggcuaccugcagccccggaccuuccugcugaaguacaacgagaacggcaccaucaccgacgccguggacugcgcccuggacccucugagcgagaccaagugcacccugaagagcuucaccguggagaagggcaucuaccagaccagcaacuuccgggugcagcccaccgagagcaucgugcgguuccccaacaucaccaaccugugccccuucggcgagguguucaacgccacccgguucgccagcguguacgccuggaaccggaagcggaucagcaacugcguggccgacuacagcgugcuguacaacagcgccagcuucagcaccuucaagugcuacggcgugagccccaccaagcugaacgaccugugcuucaccaacguguacgccgacagcuucgugauccguggcgacgaggugcggcagaucgcacccggccagacaggcaagaucgccgacuacaacuacaagcugcccgacgacuucaccggcugcgugaucgccuggaacagcaacaaccucgacagcaaggugggcggcaacuacaacuaccuguaccggcuguuccggaagagcaaccugaagcccuucgagcgggacaucagcaccgagaucuaccaagccggcuccaccccuugcaacggcguggagggcuucaacugcuacuucccucugcagagcuacggcuuccagcccaccaacggcgugggcuaccagcccuaccgggugguggugcugagcuucgagcugcugcacgccccagccaccguguguggccccaagaagagcaccaaccuggugaagaacaagugcgugaacuucaacuucaacggccuuaccggcaccggcgugcugaccgagagcaacaagaaauuccugcccuuucagcaguucggccgggacaucgccgacaccaccgacgcugugcgggauccccagacccuggagauccuggacaucaccccuugcagcuucggcggcgugagcgugaucaccccaggcaccaacaccagcaaccagguggccgugcuguaccagggcgugaacugcaccgaggugcccguggccauccacgccgaccagcugacacccaccuggcgggucuacagcaccggcagcaacguguuccagacccgggccgguugccugaucggcgccgagcacgugaacaacagcuacgagugcgacauccccaucggcgccggcaucugugccagcuaccagacccagaccaauucaccccggagggcaaggagcguggccagccagagcaucaucgccuacaccaugagccugggcgccgagaacagcguggccuacagcaacaacagcaucgccauccccaccaacuucaccaucagcgugaccaccgagauucugcccgugagcaugaccaagaccagcguggacugcaccauguacaucugcggcgacagcaccgagugcagcaaccugcugcugcaguacggcagcuucugcacccagcugaaccgggcccugaccggcaucgccguggagcaggacaagaacacccaggagguguucgcccaggugaagcagaucuacaagaccccucccaucaaggacuucggcggcuucaacuucagccagauccugcccgaccccagcaagcccagcaagcggagcuucaucgaggaccugcuguucaacaaggugacccuagccgacgccggcuucaucaagcaguacggcgacugccucggcgacauagccgcccgggaccugaucugcgcccagaaguucaacggccugaccgugcugccuccccugcugaccgacgagaugaucgcccaguacaccagcgcccuguuagccggaaccaucaccagcggcuggacuuucggcgcuggagccgcucugcagauccccuucgccaugcagauggccuaccgguucaacggcaucggcgugacccagaacgugcuguacgagaaccagaagcugaucgccaaccaguucaacagcgccaucggcaagauccaggacagccugagcagcaccgcuagcgcccugggcaagcugcaggacguggugaaccagaacgcccaggcccugaacacccuggugaagcagcugagcagcaacuucggcgccaucagcagcgugcugaacgacauccugagccggcuggacaaggucgaggccgaggugcagaucgaccggcugaucacuggccggcugcagagccugcagaccuacgugacccagcagcugauccgggccgccgagauucgggccagcgccaaccuggccgccaccaagaugagcgagugcgugcugggccagagcaagcggguggacuucugcggcaagggcuaccaccugaugagcuuuccccagagcgcaccccacggagugguguuccugcacgugaccuacgugcccgcccaggagaagaacuucaccaccgccccagccaucugccacgacggcaaggcccacuuuccccgggagggcguguucgugagcaacggcacccacugguucgugacccagcggaacuucuacgagccccagaucaucaccaccgacaacaccuucgugagcggcaacugcgacguggugaucggcaucgugaacaacaccguguacgauccccugcagcccgagcuggacagcuucaaggaggagcuggacaaguacuucaagaaucacaccagccccgacguggaccugggcgacaucagcggcaucaacgccagcguggugaacauccagaaggagaucgaucggcugaacgagguggccaagaaccugaacgagagccugaucgaccugcaggagcugggcaaguacgagcaguacaucaaguggcccugguacaucuggcugggcuucaucgccggccugaucgccaucgugauggugaccaucaugcugugcugcaugaccagcugcugcagcugccugaagggcuguugcagcugcggcagcugcugcaaguucgacgaggacgacagcgagcccgugcugaagggcgugaagcugcacuacaccugaugacucgagcugguacugcaugcacgcaaugcuagcugccccuuucccguccuggguaccccgagucucccccgaccucgggucccagguaugcucccaccuccaccugccccacucaccaccucugcuaguuccagacaccucccaagcacgcagcaaugcagcucaaaacgcuuagccuagccacacccccacgggaaacagcagugauuaaccuuuagcaauaaacgaaaguuuaacuaagcuauacuaaccccaggguuggucaauuucgugccagccacacccuggagcuagcaaaaaaaaaaaaaaaaaaaaaaaaaaaaaagcauaugacuaaaaaaaaaaaaaaaaaaaaaaaaaaaaaaaaaaaaaaaaaaaaaaaaaaaaaaaaaaaaaaaaaaaaaa

SEQ ID NO: 26752 - RNA, 4283 nt, Artificial Sequence
  SARS-CoV-2/Wuhan/WIV05/2019__EPI_ISL_402128 spike protein mRNA gc (1-1273)(Y453F_D614G)
agaauaaacuaguauucuucugguccccacagacucagagagaacccgccaccauguucguguuccuggugcugcugccccuggugagcagccagugcgugaaccugaccacccggacccagcugccaccagccuacaccaacagcuucacccggggcgucuacuaccccgacaagguguuccggagcagcguccugcacagcacccaggaccuguuccugcccuucuucagcaacgugaccugguuccacgccauccacgugagcggcaccaacggcaccaagcgguucgacaaccccgugcugcccuucaacgacggcguguacuucgccagcaccgagaagagcaacaucauccggggcuggaucuucggcaccacccuggacagcaagacccagagccugcugaucgugaauaacgccaccaacguggugaucaaggugugcgaguuccaguucugcaacgaccccuuccugggcguguacuaccacaagaacaacaagagcuggauggagagcgaguuccggguguacagcagcgccaacaacugcaccuucgaguacgugagccagcccuuccugauggaccuggagggcaagcagggcaacuucaagaaccugcgggaguucguguucaagaacaucgacggcuacuucaagaucuacagcaagcacaccccaaucaaccuggugcgggaucugccccagggcuucucagcccuggagccccugguggaccugcccaucggcaucaacaucacccgguuccagacccugcuggcccugcaccggagcuaccugaccccaggcgacagcagcagcggguggacagcaggcgcggcugcuuacuacgugggcuaccugcagccccggaccuuccugcugaaguacaacgagaacggcaccaucaccgacgccguggacugcgcccuggacccucugagcgagaccaagugcacccugaagagcuucaccguggagaagggcaucuaccagaccagcaacuuccgggugcagcccaccgagagcaucgugcgguuccccaacaucaccaaccugugccccuucggcgagguguucaacgccacccgguucgccagcguguacgccuggaaccggaagcggaucagcaacugcguggccgacuacagcgugcuguacaacagcgccagcuucagcaccuucaagugcuacggcgugagccccaccaagcugaacgaccugugcuucaccaacguguacgccgacagcuucgugauccguggcgacgaggugcggcagaucgcacccggccagacaggcaagaucgccgacuacaacuacaagcugcccgacgacuucaccggcugcgugaucgccuggaacagcaacaaccucgacagcaaggugggcggcaacuacaacuaccuguuccggcuguuccggaagagcaaccugaagcccuucgagcgggacaucagcaccgagaucuaccaagccggcuccaccccuugcaacggcguggagggcuucaacugcuacuucccucugcagagcuacggcuuccagcccaccaacggcgugggcuaccagcccuaccgggugguggugcugagcuucgagcugcugcacgccccagccaccguguguggccccaagaagagcaccaaccuggugaagaacaagugcgugaacuucaacuucaacggccuuaccggcaccggcgugcugaccgagagcaacaagaaauuccugcccuuucagcaguucggccgggacaucgccgacaccaccgacgcugugcgggauccccagacccuggagauccuggacaucaccccuugcagcuucggcggcgugagcgugaucaccccaggcaccaacaccagcaaccagguggccgugcuguaccagggcgugaacugcaccgaggugcccguggccauccacgccgaccagcugacacccaccuggcgggucuacagcaccggcagcaacguguuccagacccgggccgguugccugaucggcgccgagcacgugaacaacagcuacgagugcgacauccccaucggcgccggcaucugugccagcuaccagacccagaccaauucaccccggagggcaaggagcguggccagccagagcaucaucgccuacaccaugagccugggcgccgagaacagcguggccuacagcaacaacagcaucgccauccccaccaacuucaccaucagcgugaccaccgagauucugcccgugagcaugaccaagaccagcguggacugcaccauguacaucugcggcgacagcaccgagugcagcaaccugcugcugcaguacggcagcuucugcacccagcugaaccgggcccugaccggcaucgccguggagcaggacaagaacacccaggagguguucgcccaggugaagcagaucuacaagaccccucccaucaaggacuucggcggcuucaacuucagccagauccugcccgaccccagcaagcccagcaagcggagcuucaucgaggaccugcuguucaacaaggugacccuagccgacgccggcuucaucaagcaguacggcgacugccucggcgacauagccgcccgggaccugaucugcgcccagaaguucaacggccugaccgugcugccuccccugcugaccgacgagaugaucgcccaguacaccagcgcccuguuagccggaaccaucaccagcggcuggacuuucggcgcuggagccgcucugcagauccccuucgccaugcagauggccuaccgguucaacggcaucggcgugacccagaacgugcuguacgagaaccagaagcugaucgccaaccaguucaacagcgccaucggcaagauccaggacagccugagcagcaccgcuagcgcccugggcaagcugcaggacguggugaaccagaacgcccaggcccugaacacccuggugaagcagcugagcagcaacuucggcgccaucagcagcgugcugaacgacauccugagccggcuggacaaggucgaggccgaggugcagaucgaccggcugaucacuggccggcugcagagccugcagaccuacgugacccagcagcugauccgggccgccgagauucgggccagcgccaaccuggccgccaccaagaugagcgagugcgugcugggccagagcaagcggguggacuucugcggcaagggcuaccaccugaugagcuuuccccagagcgcaccccacggagugguguuccugcacgugaccuacgugcccgcccaggagaagaacuucaccaccgccccagccaucugccacgacggcaaggcccacuuuccccgggagggcguguucgugagcaacggcacccacugguucgugacccagcggaacuucuacgagccccagaucaucaccaccgacaacaccuucgugagcggcaacugcgacguggugaucggcaucgugaacaacaccguguacgauccccugcagcccgagcuggacagcuucaaggaggagcuggacaaguacuucaagaaucacaccagccccgacguggaccugggcgacaucagcggcaucaacgccagcguggugaacauccagaaggagaucgaucggcugaacgagguggccaagaaccugaacgagagccugaucgaccugcaggagcugggcaaguacgagcaguacaucaaguggcccugguacaucuggcugggcuucaucgccggccugaucgccaucgugauggugaccaucaugcugugcugcaugaccagcugcugcagcugccugaagggcuguugcagcugcggcagcugcugcaaguucgacgaggacgacagcgagcccgugcugaagggcgugaagcugcacuacaccugaugacucgagcugguacugcaugcacgcaaugcuagcugccccuuucccguccuggguaccccgagucucccccgaccucgggucccagguaugcucccaccuccaccugccccacucaccaccucugcuaguuccagacaccucccaagcacgcagcaaugcagcucaaaacgcuuagccuagccacacccccacgggaaacagcagugauuaaccuuuagcaauaaacgaaaguuuaacuaagcuauacuaaccccaggguuggucaauuucgugccagccacacccuggagcuagcaaaaaaaaaaaaaaaaaaaaaaaaaaaaaagcauaugacuaaaaaaaaaaaaaaaaaaaaaaaaaaaaaaaaaaaaaaaaaaaaaaaaaaaaaaaaaaaaaaaaaaaaaa

SEQ ID NO: 26753 - RNA, 4283 nt, Artificial Sequence
  SARS-CoV-2/Wuhan/WIV05/2019__EPI_ISL_402128 spike protein mRNA gc (1-1273)(D614G_I692V)
agaauaaacuaguauucuucugguccccacagacucagagagaacccgccaccauguucguguuccuggugcugcugccccuggugagcagccagugcgugaaccugaccacccggacccagcugccaccagccuacaccaacagcuucacccggggcgucuacuaccccgacaagguguuccggagcagcguccugcacagcacccaggaccuguuccugcccuucuucagcaacgugaccugguuccacgccauccacgugagcggcaccaacggcaccaagcgguucgacaaccccgugcugcccuucaacgacggcguguacuucgccagcaccgagaagagcaacaucauccggggcuggaucuucggcaccacccuggacagcaagacccagagccugcugaucgugaauaacgccaccaacguggugaucaaggugugcgaguuccaguucugcaacgaccccuuccugggcguguacuaccacaagaacaacaagagcuggauggagagcgaguuccggguguacagcagcgccaacaacugcaccuucgaguacgugagccagcccuuccugauggaccuggagggcaagcagggcaacuucaagaaccugcgggaguucguguucaagaacaucgacggcuacuucaagaucuacagcaagcacaccccaaucaaccuggugcgggaucugccccagggcuucucagcccuggagccccugguggaccugcccaucggcaucaacaucacccgguuccagacccugcuggcccugcaccggagcuaccugaccccaggcgacagcagcagcggguggacagcaggcgcggcugcuuacuacgugggcuaccugcagccccggaccuuccugcugaaguacaacgagaacggcaccaucaccgacgccguggacugcgcccuggacccucugagcgagaccaagugcacccugaagagcuucaccguggagaagggcaucuaccagaccagcaacuuccgggugcagcccaccgagagcaucgugcgguuccccaacaucaccaaccugugccccuucggcgagguguucaacgccacccgguucgccagcguguacgccuggaaccggaagcggaucagcaacugcguggccgacuacagcgugcuguacaacagcgccagcuucagcaccuucaagugcuacggcgugagccccaccaagcugaacgaccugugcuucaccaacguguacgccgacagcuucgugauccguggcgacgaggugcggcagaucgcacccggccagacaggcaagaucgccgacuacaacuacaagcugcccgacgacuucaccggcugcgugaucgccuggaacagcaacaaccucgacagcaaggugggcggcaacuacaacuaccuguaccggcuguuccggaagagcaaccugaagcccuucgagcgggacaucagcaccgagaucuaccaagccggcuccaccccuugcaacggcguggagggcuucaacugcuacuucccucugcagagcuacggcuuccagcccaccaacggcgugggcuaccagcccuaccgggugguggugcugagcuucgagcugcugcacgccccagccaccguguguggccccaagaagagcaccaaccuggugaagaacaagugcgugaacuucaacuucaacggccuuaccggcaccggcgugcugaccgagagcaacaagaaauuccugcccuuucagcaguucggccgggacaucgccgacaccaccgacgcugugcgggauccccagacccuggagauccuggacaucaccccuugcagcuucggcggcgugagcgugaucaccccaggcaccaacaccagcaaccagguggccgugcuguaccagggcgugaacugcaccgaggugcccguggccauccacgccgaccagcugacacccaccuggcgggucuacagcaccggcagcaacguguuccagacccgggccgguugccugaucggcgccgagcacgugaacaacagcuacgagugcgacauccccaucggcgccggcaucugugccagcuaccagacccagaccaauucaccccggagggcaaggagcguggccagccagagcgugaucgccuacaccaugagccugggcgccgagaacagcguggccuacagcaacaacagcaucgccauccccaccaacuucaccaucagcgugaccaccgagauucugcccgugagcaugaccaagaccagcguggacugcaccauguacaucugcggcgacagcaccgagugcagcaaccugcugcugcaguacggcagcuucugcacccagcugaaccgggcccugaccggcaucgccguggagcaggacaagaacacccaggagguguucgcccaggugaagcagaucuacaagaccccucccaucaaggacuucggcggcuucaacuucagccagauccugcccgaccccagcaagcccagcaagcggagcuucaucgaggaccugcuguucaacaaggugacccuagccgacgccggcuucaucaagcaguacggcgacugccucggcgacauagccgcccgggaccugaucugcgcccagaaguucaacggccugaccgugcugccuccccugcugaccgacgagaugaucgcccaguacaccagcgcccuguuagccggaaccaucaccagcggcuggacuuucggcgcuggagccgcucugcagauccccuucgccaugcagauggccuaccgguucaacggcaucggcgugacccagaacgugcuguacgagaaccagaagcugaucgccaaccaguucaacagcgccaucggcaagauccaggacagccugagcagcaccgcuagcgcccugggcaagcugcaggacguggugaaccagaacgcccaggcccugaacacccuggugaagcagcugagcagcaacuucggcgccaucagcagcgugcugaacgacauccugagccggcuggacaaggucgaggccgaggugcagaucgaccggcugaucacuggccggcugcagagccugcagaccuacgugacccagcagcugauccgggccgccgagauucgggccagcgccaaccuggccgccaccaagaugagcgagugcgugcugggccagagcaagcggguggacuucugcggcaagggcuaccaccugaugagcuuuccccagagcgcaccccacggagugguguuccugcacgugaccuacgugcccgcccaggagaagaacuucaccaccgccccagccaucugccacgacggcaaggcccacuuuccccgggagggcguguucgugagcaacggcacccacugguucgugacccagcggaacuucuacgagccccagaucaucaccaccgacaacaccuucgugagcggcaacugcgacguggugaucggcaucgugaacaacaccguguacgauccccugcagcccgagcuggacagcuucaaggaggagcuggacaaguacuucaagaaucacaccagccccgacguggaccugggcgacaucagcggcaucaacgccagcguggugaacauccagaaggagaucgaucggcugaacgagguggccaagaaccugaacgagagccugaucgaccugcaggagcugggcaaguacgagcaguacaucaaguggcccugguacaucuggcugggcuucaucgccggccugaucgccaucgugauggugaccaucaugcugugcugcaugaccagcugcugcagcugccugaagggcuguugcagcugcggcagcugcugcaaguucgacgaggacgacagcgagcccgugcugaagggcgugaagcugcacuacaccugaugacucgagcugguacugcaugcacgcaaugcuagcugccccuuucccguccuggguaccccgagucucccccgaccucgggucccagguaugcucccaccuccaccugccccacucaccaccucugcuaguuccagacaccucccaagcacgcagcaaugcagcucaaaacgcuuagccuagccacacccccacgggaaacagcagugauuaaccuuuagcaauaaacgaaaguuuaacuaagcuauacuaaccccaggguuggucaauuucgugccagccacacccuggagcuagcaaaaaaaaaaaaaaaaaaaaaaaaaaaaaagcauaugacuaaaaaaaaaaaaaaaaaaaaaaaaaaaaaaaaaaaaaaaaaaaaaaaaaaaaaaaaaaaaaaaaaaaaaa

SEQ ID NO: 26754 - RNA, 4283 nt, Artificial Sequence
  SARS-CoV-2/Wuhan/WIV05/2019__EPI_ISL_402128 spike protein mRNA gc (1-1273)(D614G_M1229I)
agaauaaacuaguauucuucugguccccacagacucagagagaacccgccaccauguucguguuccuggugcugcugccccuggugagcagccagugcgugaaccugaccacccggacccagcugccaccagccuacaccaacagcuucacccggggcgucuacuaccccgacaagguguuccggagcagcguccugcacagcacccaggaccuguuccugcccuucuucagcaacgugaccugguuccacgccauccacgugagcggcaccaacggcaccaagcgguucgacaaccccgugcugcccuucaacgacggcguguacuucgccagcaccgagaagagcaacaucauccggggcuggaucuucggcaccacccuggacagcaagacccagagccugcugaucgugaauaacgccaccaacguggugaucaaggugugcgaguuccaguucugcaacgaccccuuccugggcguguacuaccacaagaacaacaagagcuggauggagagcgaguuccggguguacagcagcgccaacaacugcaccuucgaguacgugagccagcccuuccugauggaccuggagggcaagcagggcaacuucaagaaccugcgggaguucguguucaagaacaucgacggcuacuucaagaucuacagcaagcacaccccaaucaaccuggugcgggaucugccccagggcuucucagcccuggagccccugguggaccugcccaucggcaucaacaucacccgguuccagacccugcuggcccugcaccggagcuaccugaccccaggcgacagcagcagcggguggacagcaggcgcggcugcuuacuacgugggcuaccugcagccccggaccuuccugcugaaguacaacgagaacggcaccaucaccgacgccguggacugcgcccuggacccucugagcgagaccaagugcacccugaagagcuucaccguggagaagggcaucuaccagaccagcaacuuccgggugcagcccaccgagagcaucgugcgguuccccaacaucaccaaccugugccccuucggcgagguguucaacgccacccgguucgccagcguguacgccuggaaccggaagcggaucagcaacugcguggccgacuacagcgugcuguacaacagcgccagcuucagcaccuucaagugcuacggcgugagccccaccaagcugaacgaccugugcuucaccaacguguacgccgacagcuucgugauccguggcgacgaggugcggcagaucgcacccggccagacaggcaagaucgccgacuacaacuacaagcugcccgacgacuucaccggcugcgugaucgccuggaacagcaacaaccucgacagcaaggugggcggcaacuacaacuaccuguaccggcuguuccggaagagcaaccugaagcccuucgagcgggacaucagcaccgagaucuaccaagccggcuccaccccuugcaacggcguggagggcuucaacugcuacuucccucugcagagcuacggcuuccagcccaccaacggcgugggcuaccagcccuaccgggugguggugcugagcuucgagcugcugcacgccccagccaccguguguggccccaagaagagcaccaaccuggugaagaacaagugcgugaacuucaacuucaacggccuuaccggcaccggcgugcugaccgagagcaacaagaaauuccugcccuuucagcaguucggccgggacaucgccgacaccaccgacgcugugcgggauccccagacccuggagauccuggacaucaccccuugcagcuucggcggcgugagcgugaucaccccaggcaccaacaccagcaaccagguggccgugcuguaccagggcgugaacugcaccgaggugcccguggccauccacgccgaccagcugacacccaccuggcgggucuacagcaccggcagcaacguguuccagacccgggccgguugccugaucggcgccgagcacgugaacaacagcuacgagugcgacauccccaucggcgccggcaucugugccagcuaccagacccagaccaauucaccccggagggcaaggagcguggccagccagagcaucaucgccuacaccaugagccugggcgccgagaacagcguggccuacagcaacaacagcaucgccauccccaccaacuucaccaucagcgugaccaccgagauucugcccgugagcaugaccaagaccagcguggacugcaccauguacaucugcggcgacagcaccgagugcagcaaccugcugcugcaguacggcagcuucugcacccagcugaaccgggcccugaccggcaucgccguggagcaggacaagaacacccaggagguguucgcccaggugaagcagaucuacaagaccccucccaucaaggacuucggcggcuucaacuucagccagauccugcccgaccccagcaagcccagcaagcggagcuucaucgaggaccugcuguucaacaaggugacccuagccgacgccggcuucaucaagcaguacggcgacugccucggcgacauagccgcccgggaccugaucugcgcccagaaguucaacggccugaccgugcugccuccccugcugaccgacgagaugaucgcccaguacaccagcgcccuguuagccggaaccaucaccagcggcuggacuuucggcgcuggagccgcucugcagauccccuucgccaugcagauggccuaccgguucaacggcaucggcgugacccagaacgugcuguacgagaaccagaagcugaucgccaaccaguucaacagcgccaucggcaagauccaggacagccugagcagcaccgcuagcgcccugggcaagcugcaggacguggugaaccagaacgcccaggcccugaacacccuggugaagcagcugagcagcaacuucggcgccaucagcagcgugcugaacgacauccugagccggcuggacaaggucgaggccgaggugcagaucgaccggcugaucacuggccggcugcagagccugcagaccuacgugacccagcagcugauccgggccgccgagauucgggccagcgccaaccuggccgccaccaagaugagcgagugcgugcugggccagagcaagcggguggacuucugcggcaagggcuaccaccugaugagcuuuccccagagcgcaccccacggagugguguuccugcacgugaccuacgugcccgcccaggagaagaacuucaccaccgccccagccaucugccacgacggcaaggcccacuuuccccgggagggcguguucgugagcaacggcacccacugguucgugacccagcggaacuucuacgagccccagaucaucaccaccgacaacaccuucgugagcggcaacugcgacguggugaucggcaucgugaacaacaccguguacgauccccugcagcccgagcuggacagcuucaaggaggagcuggacaaguacuucaagaaucacaccagccccgacguggaccugggcgacaucagcggcaucaacgccagcguggugaacauccagaaggagaucgaucggcugaacgagguggccaagaaccugaacgagagccugaucgaccugcaggagcugggcaaguacgagcaguacaucaaguggcccugguacaucuggcugggcuucaucgccggccugaucgccaucgugaucgugaccaucaugcugugcugcaugaccagcugcugcagcugccugaagggcuguugcagcugcggcagcugcugcaaguucgacgaggacgacagcgagcccgugcugaagggcgugaagcugcacuacaccugaugacucgagcugguacugcaugcacgcaaugcuagcugccccuuucccguccuggguaccccgagucucccccgaccucgggucccagguaugcucccaccuccaccugccccacucaccaccucugcuaguuccagacaccucccaagcacgcagcaaugcagcucaaaacgcuuagccuagccacacccccacgggaaacagcagugauuaaccuuuagcaauaaacgaaaguuuaacuaagcuauacuaaccccaggguuggucaauuucgugccagccacacccuggagcuagcaaaaaaaaaaaaaaaaaaaaaaaaaaaaaagcauaugacuaaaaaaaaaaaaaaaaaaaaaaaaaaaaaaaaaaaaaaaaaaaaaaaaaaaaaaaaaaaaaaaaaaaaaa

SEQ ID NO: 26755 - RNA, 4277 nt, Artificial Sequence
  SARS-CoV-2/Wuhan/WIV05/2019__EPI_ISL_402128 spike protein mRNA gc (1-1273)(H69del_V70del_A222V_Y453F_S477N_D614G_I692V)
agaauaaacuaguauucuucugguccccacagacucagagagaacccgccaccauguucguguuccuggugcugcugccccuggugagcagccagugcgugaaccugaccacccggacccagcugccaccagccuacaccaacagcuucacccggggcgucuacuaccccgacaagguguuccggagcagcguccugcacagcacccaggaccuguuccugcccuucuucagcaacgugaccugguuccacgccaucagcggcaccaacggcaccaagcgguucgacaaccccgugcugcccuucaacgacggcguguacuucgccagcaccgagaagagcaacaucauccggggcuggaucuucggcaccacccuggacagcaagacccagagccugcugaucgugaauaacgccaccaacguggugaucaaggugugcgaguuccaguucugcaacgaccccuuccugggcguguacuaccacaagaacaacaagagcuggauggagagcgaguuccggguguacagcagcgccaacaacugcaccuucgaguacgugagccagcccuuccugauggaccuggagggcaagcagggcaacuucaagaaccugcgggaguucguguucaagaacaucgacggcuacuucaagaucuacagcaagcacaccccaaucaaccuggugcgggaucugccccagggcuucucagugcuggagccccugguggaccugcccaucggcaucaacaucacccgguuccagacccugcuggcccugcaccggagcuaccugaccccaggcgacagcagcagcggguggacagcaggcgcggcugcuuacuacgugggcuaccugcagccccggaccuuccugcugaaguacaacgagaacggcaccaucaccgacgccguggacugcgcccuggacccucugagcgagaccaagugcacccugaagagcuucaccguggagaagggcaucuaccagaccagcaacuuccgggugcagcccaccgagagcaucgugcgguuccccaacaucaccaaccugugccccuucggcgagguguucaacgccacccgguucgccagcguguacgccuggaaccggaagcggaucagcaacugcguggccgacuacagcgugcuguacaacagcgccagcuucagcaccuucaagugcuacggcgugagccccaccaagcugaacgaccugugcuucaccaacguguacgccgacagcuucgugauccguggcgacgaggugcggcagaucgcacccggccagacaggcaagaucgccgacuacaacuacaagcugcccgacgacuucaccggcugcgugaucgccuggaacagcaacaaccucgacagcaaggugggcggcaacuacaacuaccuguuccggcuguuccggaagagcaaccugaagcccuucgagcgggacaucagcaccgagaucuaccaagccggcaacaccccuugcaacggcguggagggcuucaacugcuacuucccucugcagagcuacggcuuccagcccaccaacggcgugggcuaccagcccuaccgggugguggugcugagcuucgagcugcugcacgccccagccaccguguguggccccaagaagagcaccaaccuggugaagaacaagugcgugaacuucaacuucaacggccuuaccggcaccggcgugcugaccgagagcaacaagaaauuccugcccuuucagcaguucggccgggacaucgccgacaccaccgacgcugugcgggauccccagacccuggagauccuggacaucaccccuugcagcuucggcggcgugagcgugaucaccccaggcaccaacaccagcaaccagguggccgugcuguaccagggcgugaacugcaccgaggugcccguggccauccacgccgaccagcugacacccaccuggcgggucuacagcaccggcagcaacguguuccagacccgggccgguugccugaucggcgccgagcacgugaacaacagcuacgagugcgacauccccaucggcgccggcaucugugccagcuaccagacccagaccaauucaccccggagggcaaggagcguggccagccagagcgugaucgccuacaccaugagccugggcgccgagaacagcguggccuacagcaacaacagcaucgccauccccaccaacuucaccaucagcgugaccaccgagauucugcccgugagcaugaccaagaccagcguggacugcaccauguacaucugcggcgacagcaccgagugcagcaaccugcugcugcaguacggcagcuucugcacccagcugaaccgggcccugaccggcaucgccguggagcaggacaagaacacccaggagguguucgcccaggugaagcagaucuacaagaccccucccaucaaggacuucggcggcuucaacuucagccagauccugcccgaccccagcaagcccagcaagcggagcuucaucgaggaccugcuguucaacaaggugacccuagccgacgccggcuucaucaagcaguacggcgacugccucggcgacauagccgcccgggaccugaucugcgcccagaaguucaacggccugaccgugcugccuccccugcugaccgacgagaugaucgcccaguacaccagcgcccuguuagccggaaccaucaccagcggcuggacuuucggcgcuggagccgcucugcagauccccuucgccaugcagauggccuaccgguucaacggcaucggcgugacccagaacgugcuguacgagaaccagaagcugaucgccaaccaguucaacagcgccaucggcaagauccaggacagccugagcagcaccgcuagcgcccugggcaagcugcaggacguggugaaccagaacgcccaggcccugaacacccuggugaagcagcugagcagcaacuucggcgccaucagcagcgugcugaacgacauccugagccggcuggacaaggucgaggccgaggugcagaucgaccggcugaucacuggccggcugcagagccugcagaccuacgugacccagcagcugauccgggccgccgagauucgggccagcgccaaccuggccgccaccaagaugagcgagugcgugcugggccagagcaagcggguggacuucugcggcaagggcuaccaccugaugagcuuuccccagagcgcaccccacggagugguguuccugcacgugaccuacgugcccgcccaggagaagaacuucaccaccgccccagccaucugccacgacggcaaggcccacuuuccccgggagggcguguucgugagcaacggcacccacugguucgugacccagcggaacuucuacgagccccagaucaucaccaccgacaacaccuucgugagcggcaacugcgacguggugaucggcaucgugaacaacaccguguacgauccccugcagcccgagcuggacagcuucaaggaggagcuggacaaguacuucaagaaucacaccagccccgacguggaccugggcgacaucagcggcaucaacgccagcguggugaacauccagaaggagaucgaucggcugaacgagguggccaagaaccugaacgagagccugaucgaccugcaggagcugggcaaguacgagcaguacaucaaguggcccugguacaucuggcugggcuucaucgccggccugaucgccaucgugauggugaccaucaugcugugcugcaugaccagcugcugcagcugccugaagggcuguugcagcugcggcagcugcugcaaguucgacgaggacgacagcgagcccgugcugaagggcgugaagcugcacuacaccugaugacucgagcugguacugcaugcacgcaaugcuagcugccccuuucccguccuggguaccccgagucucccccgaccucgggucccagguaugcucccaccuccaccugccccacucaccaccucugcuaguuccagacaccucccaagcacgcagcaaugcagcucaaaacgcuuagccuagccacacccccacgggaaacagcagugauuaaccuuuagcaauaaacgaaaguuuaacuaagcuauacuaaccccaggguuggucaauuucgugccagccacacccuggagcuagcaaaaaaaaaaaaaaaaaaaaaaaaaaaaaagcauaugacuaaaaaaaaaaaaaaaaaaaaaaaaaaaaaaaaaaaaaaaaaaaaaaaaaaaaaaaaaaaaaaaaaaaaaa

SEQ ID NO: 26756 - RNA, 4277 nt, Artificial Sequence
  SARS-CoV-2/Wuhan/WIV05/2019__EPI_ISL_402128 spike protein mRNA gc (1-1273)(H69del_V70del_Y453F_D614G_I692V_M1229I)
agaauaaacuaguauucuucugguccccacagacucagagagaacccgccaccauguucguguuccuggugcugcugccccuggugagcagccagugcgugaaccugaccacccggacccagcugccaccagccuacaccaacagcuucacccggggcgucuacuaccccgacaagguguuccggagcagcguccugcacagcacccaggaccuguuccugcccuucuucagcaacgugaccugguuccacgccaucagcggcaccaacggcaccaagcgguucgacaaccccgugcugcccuucaacgacggcguguacuucgccagcaccgagaagagcaacaucauccggggcuggaucuucggcaccacccuggacagcaagacccagagccugcugaucgugaauaacgccaccaacguggugaucaaggugugcgaguuccaguucugcaacgaccccuuccugggcguguacuaccacaagaacaacaagagcuggauggagagcgaguuccggguguacagcagcgccaacaacugcaccuucgaguacgugagccagcccuuccugauggaccuggagggcaagcagggcaacuucaagaaccugcgggaguucguguucaagaacaucgacggcuacuucaagaucuacagcaagcacaccccaaucaaccuggugcgggaucugccccagggcuucucagcccuggagccccugguggaccugcccaucggcaucaacaucacccgguuccagacccugcuggcccugcaccggagcuaccugaccccaggcgacagcagcagcggguggacagcaggcgcggcugcuuacuacgugggcuaccugcagccccggaccuuccugcugaaguacaacgagaacggcaccaucaccgacgccguggacugcgcccuggacccucugagcgagaccaagugcacccugaagagcuucaccguggagaagggcaucuaccagaccagcaacuuccgggugcagcccaccgagagcaucgugcgguuccccaacaucaccaaccugugccccuucggcgagguguucaacgccacccgguucgccagcguguacgccuggaaccggaagcggaucagcaacugcguggccgacuacagcgugcuguacaacagcgccagcuucagcaccuucaagugcuacggcgugagccccaccaagcugaacgaccugugcuucaccaacguguacgccgacagcuucgugauccguggcgacgaggugcggcagaucgcacccggccagacaggcaagaucgccgacuacaacuacaagcugcccgacgacuucaccggcugcgugaucgccuggaacagcaacaaccucgacagcaaggugggcggcaacuacaacuaccuguuccggcuguuccggaagagcaaccugaagcccuucgagcgggacaucagcaccgagaucuaccaagccggcuccaccccuugcaacggcguggagggcuucaacugcuacuucccucugcagagcuacggcuuccagcccaccaacggcgugggcuaccagcccuaccgggugguggugcugagcuucgagcugcugcacgccccagccaccguguguggccccaagaagagcaccaaccuggugaagaacaagugcgugaacuucaacuucaacggccuuaccggcaccggcgugcugaccgagagcaacaagaaauuccugcccuuucagcaguucggccgggacaucgccgacaccaccgacgcugugcgggauccccagacccuggagauccuggacaucaccccuugcagcuucggcggcgugagcgugaucaccccaggcaccaacaccagcaaccagguggccgugcuguaccagggcgugaacugcaccgaggugcccguggccauccacgccgaccagcugacacccaccuggcgggucuacagcaccggcagcaacguguuccagacccgggccgguugccugaucggcgccgagcacgugaacaacagcuacgagugcgacauccccaucggcgccggcaucugugccagcuaccagacccagaccaauucaccccggagggcaaggagcguggccagccagagcgugaucgccuacaccaugagccugggcgccgagaacagcguggccuacagcaacaacagcaucgccauccccaccaacuucaccaucagcgugaccaccgagauucugcccgugagcaugaccaagaccagcguggacugcaccauguacaucugcggcgacagcaccgagugcagcaaccugcugcugcaguacggcagcuucugcacccagcugaaccgggcccugaccggcaucgccguggagcaggacaagaacacccaggagguguucgcccaggugaagcagaucuacaagaccccucccaucaaggacuucggcggcuucaacuucagccagauccugcccgaccccagcaagcccagcaagcggagcuucaucgaggaccugcuguucaacaaggugacccuagccgacgccggcuucaucaagcaguacggcgacugccucggcgacauagccgcccgggaccugaucugcgcccagaaguucaacggccugaccgugcugccuccccugcugaccgacgagaugaucgcccaguacaccagcgcccuguuagccggaaccaucaccagcggcuggacuuucggcgcuggagccgcucugcagauccccuucgccaugcagauggccuaccgguucaacggcaucggcgugacccagaacgugcuguacgagaaccagaagcugaucgccaaccaguucaacagcgccaucggcaagauccaggacagccugagcagcaccgcuagcgcccugggcaagcugcaggacguggugaaccagaacgcccaggcccugaacacccuggugaagcagcugagcagcaacuucggcgccaucagcagcgugcugaacgacauccugagccggcuggacaaggucgaggccgaggugcagaucgaccggcugaucacuggccggcugcagagccugcagaccuacgugacccagcagcugauccgggccgccgagauucgggccagcgccaaccuggccgccaccaagaugagcgagugcgugcugggccagagcaagcggguggacuucugcggcaagggcuaccaccugaugagcuuuccccagagcgcaccccacggagugguguuccugcacgugaccuacgugcccgcccaggagaagaacuucaccaccgccccagccaucugccacgacggcaaggcccacuuuccccgggagggcguguucgugagcaacggcacccacugguucgugacccagcggaacuucuacgagccccagaucaucaccaccgacaacaccuucgugagcggcaacugcgacguggugaucggcaucgugaacaacaccguguacgauccccugcagcccgagcuggacagcuucaaggaggagcuggacaaguacuucaagaaucacaccagccccgacguggaccugggcgacaucagcggcaucaacgccagcguggugaacauccagaaggagaucgaucggcugaacgagguggccaagaaccugaacgagagccugaucgaccugcaggagcugggcaaguacgagcaguacaucaaguggcccugguacaucuggcugggcuucaucgccggccugaucgccaucgugaucgugaccaucaugcugugcugcaugaccagcugcugcagcugccugaagggcuguugcagcugcggcagcugcugcaaguucgacgaggacgacagcgagcccgugcugaagggcgugaagcugcacuacaccugaugacucgagcugguacugcaugcacgcaaugcuagcugccccuuucccguccuggguaccccgagucucccccgaccucgggucccagguaugcucccaccuccaccugccccacucaccaccucugcuaguuccagacaccucccaagcacgcagcaaugcagcucaaaacgcuuagccuagccacacccccacgggaaacagcagugauuaaccuuuagcaauaaacgaaaguuuaacuaagcuauacuaaccccaggguuggucaauuucgugccagccacacccuggagcuagcaaaaaaaaaaaaaaaaaaaaaaaaaaaaaagcauaugacuaaaaaaaaaaaaaaaaaaaaaaaaaaaaaaaaaaaaaaaaaaaaaaaaaaaaaaaaaaaaaaaaaaaaaa

SEQ ID NO: 26757 - RNA, 4274 nt, Artificial Sequence
  SARS-CoV-2/Wuhan/WIV05/2019__EPI_ISL_402128 spike protein mRNA gc (1-1273)(H69del_V70del_Y144del_N501Y_A570D_D614G_P681H_T716I_S982 A_D1118H)
agaauaaacuaguauucuucugguccccacagacucagagagaacccgccaccauguucguguuccuggugcugcugccccuggugagcagccagugcgugaaccugaccacccggacccagcugccaccagccuacaccaacagcuucacccggggcgucuacuaccccgacaagguguuccggagcagcguccugcacagcacccaggaccuguuccugcccuucuucagcaacgugaccugguuccacgccaucagcggcaccaacggcaccaagcgguucgacaaccccgugcugcccuucaacgacggcguguacuucgccagcaccgagaagagcaacaucauccggggcuggaucuucggcaccacccuggacagcaagacccagagccugcugaucgugaauaacgccaccaacguggugaucaaggugugcgaguuccaguucugcaacgaccccuuccugggcguguaccacaagaacaacaagagcuggauggagagcgaguuccggguguacagcagcgccaacaacugcaccuucgaguacgugagccagcccuuccugauggaccuggagggcaagcagggcaacuucaagaaccugcgggaguucguguucaagaacaucgacggcuacuucaagaucuacagcaagcacaccccaaucaaccuggugcgggaucugccccagggcuucucagcccuggagccccugguggaccugcccaucggcaucaacaucacccgguuccagacccugcuggcccugcaccggagcuaccugaccccaggcgacagcagcagcggguggacagcaggcgcggcugcuuacuacgugggcuaccugcagccccggaccuuccugcugaaguacaacgagaacggcaccaucaccgacgccguggacugcgcccuggacccucugagcgagaccaagugcacccugaagagcuucaccguggagaagggcaucuaccagaccagcaacuuccgggugcagcccaccgagagcaucgugcgguuccccaacaucaccaaccugugccccuucggcgagguguucaacgccacccgguucgccagcguguacgccuggaaccggaagcggaucagcaacugcguggccgacuacagcgugcuguacaacagcgccagcuucagcaccuucaagugcuacggcgugagccccaccaagcugaacgaccugugcuucaccaacguguacgccgacagcuucgugauccguggcgacgaggugcggcagaucgcacccggccagacaggcaagaucgccgacuacaacuacaagcugcccgacgacuucaccggcugcgugaucgccuggaacagcaacaaccucgacagcaaggugggcggcaacuacaacuaccuguaccggcuguuccggaagagcaaccugaagcccuucgagcgggacaucagcaccgagaucuaccaagccggcuccaccccuugcaacggcguggagggcuucaacugcuacuucccucugcagagcuacggcuuccagcccaccuacggcgugggcuaccagcccuaccgggugguggugcugagcuucgagcugcugcacgccccagccaccguguguggccccaagaagagcaccaaccuggugaagaacaagugcgugaacuucaacuucaacggccuuaccggcaccggcgugcugaccgagagcaacaagaaauuccugcccuuucagcaguucggccgggacaucgacgacaccaccgacgcugugcgggauccccagacccuggagauccuggacaucaccccuugcagcuucggcggcgugagcgugaucaccccaggcaccaacaccagcaaccagguggccgugcuguaccagggcgugaacugcaccgaggugcccguggccauccacgccgaccagcugacacccaccuggcgggucuacagcaccggcagcaacguguuccagacccgggccgguugccugaucggcgccgagcacgugaacaacagcuacgagugcgacauccccaucggcgccggcaucugugccagcuaccagacccagaccaauucacaccggagggcaaggagcguggccagccagagcaucaucgccuacaccaugagccugggcgccgagaacagcguggccuacagcaacaacagcaucgccauccccaucaacuucaccaucagcgugaccaccgagauucugcccgugagcaugaccaagaccagcguggacugcaccauguacaucugcggcgacagcaccgagugcagcaaccugcugcugcaguacggcagcuucugcacccagcugaaccgggcccugaccggcaucgccguggagcaggacaagaacacccaggagguguucgcccaggugaagcagaucuacaagaccccucccaucaaggacuucggcggcuucaacuucagccagauccugcccgaccccagcaagcccagcaagcggagcuucaucgaggaccugcuguucaacaaggugacccuagccgacgccggcuucaucaagcaguacggcgacugccucggcgacauagccgcccgggaccugaucugcgcccagaaguucaacggccugaccgugcugccuccccugcugaccgacgagaugaucgcccaguacaccagcgcccuguuagccggaaccaucaccagcggcuggacuuucggcgcuggagccgcucugcagauccccuucgccaugcagauggccuaccgguucaacggcaucggcgugacccagaacgugcuguacgagaaccagaagcugaucgccaaccaguucaacagcgccaucggcaagauccaggacagccugagcagcaccgcuagcgcccugggcaagcugcaggacguggugaaccagaacgcccaggcccugaacacccuggugaagcagcugagcagcaacuucggcgccaucagcagcgugcugaacgacauccuggcccggcuggacaaggucgaggccgaggugcagaucgaccggcugaucacuggccggcugcagagccugcagaccuacgugacccagcagcugauccgggccgccgagauucgggccagcgccaaccuggccgccaccaagaugagcgagugcgugcugggccagagcaagcggguggacuucugcggcaagggcuaccaccugaugagcuuuccccagagcgcaccccacggagugguguuccugcacgugaccuacgugcccgcccaggagaagaacuucaccaccgccccagccaucugccacgacggcaaggcccacuuuccccgggagggcguguucgugagcaacggcacccacugguucgugacccagcggaacuucuacgagccccagaucaucaccacccacaacaccuucgugagcggcaacugcgacguggugaucggcaucgugaacaacaccguguacgauccccugcagcccgagcuggacagcuucaaggaggagcuggacaaguacuucaagaaucacaccagccccgacguggaccugggcgacaucagcggcaucaacgccagcguggugaacauccagaaggagaucgaucggcugaacgagguggccaagaaccugaacgagagccugaucgaccugcaggagcugggcaaguacgagcaguacaucaaguggcccugguacaucuggcugggcuucaucgccggccugaucgccaucgugauggugaccaucaugcugugcugcaugaccagcugcugcagcugccugaagggcuguugcagcugcggcagcugcugcaaguucgacgaggacgacagcgagcccgugcugaagggcgugaagcugcacuacaccugaugacucgagcugguacugcaugcacgcaaugcuagcugccccuuucccguccuggguaccccgagucucccccgaccucgggucccagguaugcucccaccuccaccugccccacucaccaccucugcuaguuccagacaccucccaagcacgcagcaaugcagcucaaaacgcuuagccuagccacacccccacgggaaacagcagugauuaaccuuuagcaauaaacgaaaguuuaacuaagcuauacuaaccccaggguuggucaauuucgugccagccacacccuggagcuagcaaaaaaaaaaaaaaaaaaaaaaaaaaaaaagcauaugacuaaaaaaaaaaaaaaaaaaaaaaaaaaaaaaaaaaaaaaaaaaaaaaaaaaaaaaaaaaaaaaaaaaaaaa

SEQ ID NO: 26758 - RNA, 4283 nt, Artificial Sequence
  SARS-CoV-2/Wuhan/WIV05/2019__EPI_ISL_402128 spike protein mRNA gc (1-1273)(K417N_E484K_N501Y_D614G)
agaauaaacuaguauucuucugguccccacagacucagagagaacccgccaccauguucguguuccuggugcugcugccccuggugagcagccagugcgugaaccugaccacccggacccagcugccaccagccuacaccaacagcuucacccggggcgucuacuaccccgacaagguguuccggagcagcguccugcacagcacccaggaccuguuccugcccuucuucagcaacgugaccugguuccacgccauccacgugagcggcaccaacggcaccaagcgguucgacaaccccgugcugcccuucaacgacggcguguacuucgccagcaccgagaagagcaacaucauccggggcuggaucuucggcaccacccuggacagcaagacccagagccugcugaucgugaauaacgccaccaacguggugaucaaggugugcgaguuccaguucugcaacgaccccuuccugggcguguacuaccacaagaacaacaagagcuggauggagagcgaguuccggguguacagcagcgccaacaacugcaccuucgaguacgugagccagcccuuccugauggaccuggagggcaagcagggcaacuucaagaaccugcgggaguucguguucaagaacaucgacggcuacuucaagaucuacagcaagcacaccccaaucaaccuggugcgggaucugccccagggcuucucagcccuggagccccugguggaccugcccaucggcaucaacaucacccgguuccagacccugcuggcccugcaccggagcuaccugaccccaggcgacagcagcagcggguggacagcaggcgcggcugcuuacuacgugggcuaccugcagccccggaccuuccugcugaaguacaacgagaacggcaccaucaccgacgccguggacugcgcccuggacccucugagcgagaccaagugcacccugaagagcuucaccguggagaagggcaucuaccagaccagcaacuuccgggugcagcccaccgagagcaucgugcgguuccccaacaucaccaaccugugccccuucggcgagguguucaacgccacccgguucgccagcguguacgccuggaaccggaagcggaucagcaacugcguggccgacuacagcgugcuguacaacagcgccagcuucagcaccuucaagugcuacggcgugagccccaccaagcugaacgaccugugcuucaccaacguguacgccgacagcuucgugauccguggcgacgaggugcggcagaucgcacccggccagacaggcaacaucgccgacuacaacuacaagcugcccgacgacuucaccggcugcgugaucgccuggaacagcaacaaccucgacagcaaggugggcggcaacuacaacuaccuguaccggcuguuccggaagagcaaccugaagcccuucgagcgggacaucagcaccgagaucuaccaagccggcuccaccccuugcaacggcgugaagggcuucaacugcuacuucccucugcagagcuacggcuuccagcccaccuacggcgugggcuaccagcccuaccgggugguggugcugagcuucgagcugcugcacgccccagccaccguguguggccccaagaagagcaccaaccuggugaagaacaagugcgugaacuucaacuucaacggccuuaccggcaccggcgugcugaccgagagcaacaagaaauuccugcccuuucagcaguucggccgggacaucgccgacaccaccgacgcugugcgggauccccagacccuggagauccuggacaucaccccuugcagcuucggcggcgugagcgugaucaccccaggcaccaacaccagcaaccagguggccgugcuguaccagggcgugaacugcaccgaggugcccguggccauccacgccgaccagcugacacccaccuggcgggucuacagcaccggcagcaacguguuccagacccgggccgguugccugaucggcgccgagcacgugaacaacagcuacgagugcgacauccccaucggcgccggcaucugugccagcuaccagacccagaccaauucaccccggagggcaaggagcguggccagccagagcaucaucgccuacaccaugagccugggcgccgagaacagcguggccuacagcaacaacagcaucgccauccccaccaacuucaccaucagcgugaccaccgagauucugcccgugagcaugaccaagaccagcguggacugcaccauguacaucugcggcgacagcaccgagugcagcaaccugcugcugcaguacggcagcuucugcacccagcugaaccgggcccugaccggcaucgccguggagcaggacaagaacacccaggagguguucgcccaggugaagcagaucuacaagaccccucccaucaaggacuucggcggcuucaacuucagccagauccugcccgaccccagcaagcccagcaagcggagcuucaucgaggaccugcuguucaacaaggugacccuagccgacgccggcuucaucaagcaguacggcgacugccucggcgacauagccgcccgggaccugaucugcgcccagaaguucaacggccugaccgugcugccuccccugcugaccgacgagaugaucgcccaguacaccagcgcccuguuagccggaaccaucaccagcggcuggacuuucggcgcuggagccgcucugcagauccccuucgccaugcagauggccuaccgguucaacggcaucggcgugacccagaacgugcuguacgagaaccagaagcugaucgccaaccaguucaacagcgccaucggcaagauccaggacagccugagcagcaccgcuagcgcccugggcaagcugcaggacguggugaaccagaacgcccaggcccugaacacccuggugaagcagcugagcagcaacuucggcgccaucagcagcgugcugaacgacauccugagccggcuggacaaggucgaggccgaggugcagaucgaccggcugaucacuggccggcugcagagccugcagaccuacgugacccagcagcugauccgggccgccgagauucgggccagcgccaaccuggccgccaccaagaugagcgagugcgugcugggccagagcaagcggguggacuucugcggcaagggcuaccaccugaugagcuuuccccagagcgcaccccacggagugguguuccugcacgugaccuacgugcccgcccaggagaagaacuucaccaccgccccagccaucugccacgacggcaaggcccacuuuccccgggagggcguguucgugagcaacggcacccacugguucgugacccagcggaacuucuacgagccccagaucaucaccaccgacaacaccuucgugagcggcaacugcgacguggugaucggcaucgugaacaacaccguguacgauccccugcagcccgagcuggacagcuucaaggaggagcuggacaaguacuucaagaaucacaccagccccgacguggaccugggcgacaucagcggcaucaacgccagcguggugaacauccagaaggagaucgaucggcugaacgagguggccaagaaccugaacgagagccugaucgaccugcaggagcugggcaaguacgagcaguacaucaaguggcccugguacaucuggcugggcuucaucgccggccugaucgccaucgugauggugaccaucaugcugugcugcaugaccagcugcugcagcugccugaagggcuguugcagcugcggcagcugcugcaaguucgacgaggacgacagcgagcccgugcugaagggcgugaagcugcacuacaccugaugacucgagcugguacugcaugcacgcaaugcuagcugccccuuucccguccuggguaccccgagucucccccgaccucgggucccagguaugcucccaccuccaccugccccacucaccaccucugcuaguuccagacaccucccaagcacgcagcaaugcagcucaaaacgcuuagccuagccacacccccacgggaaacagcagugauuaaccuuuagcaauaaacgaaaguuuaacuaagcuauacuaaccccaggguuggucaauuucgugccagccacacccuggagcuagcaaaaaaaaaaaaaaaaaaaaaaaaaaaaaagcauaugacuaaaaaaaaaaaaaaaaaaaaaaaaaaaaaaaaaaaaaaaaaaaaaaaaaaaaaaaaaaaaaaaaaaaaaa

SEQ ID NO: 26759 - RNA, 4274 nt, Artificial Sequence
  SARS-CoV-2/Wuhan/WIV05/2019__EPI_ISL_402128 spike protein mRNA gc (1-1273)(L18F_D80A_D215G_L242del_A243del_L244del_R246I_K417N_E484 K_N501Y_D614G_A701V)
agaauaaacuaguauucuucugguccccacagacucagagagaacccgccaccauguucguguuccuggugcugcugccccuggugagcagccagugcgugaacuucaccacccggacccagcugccaccagccuacaccaacagcuucacccggggcgucuacuaccccgacaagguguuccggagcagcguccugcacagcacccaggaccuguuccugcccuucuucagcaacgugaccugguuccacgccauccacgugagcggcaccaacggcaccaagcgguucgccaaccccgugcugcccuucaacgacggcguguacuucgccagcaccgagaagagcaacaucauccggggcuggaucuucggcaccacccuggacagcaagacccagagccugcugaucgugaauaacgccaccaacguggugaucaaggugugcgaguuccaguucugcaacgaccccuuccugggcguguacuaccacaagaacaacaagagcuggauggagagcgaguuccggguguacagcagcgccaacaacugcaccuucgaguacgugagccagcccuuccugauggaccuggagggcaagcagggcaacuucaagaaccugcgggaguucguguucaagaacaucgacggcuacuucaagaucuacagcaagcacaccccaaucaaccuggugcggggccugccccagggcuucucagcccuggagccccugguggaccugcccaucggcaucaacaucacccgguuccagacccugcacaucagcuaccugaccccaggcgacagcagcagcggguggacagcaggcgcggcugcuuacuacgugggcuaccugcagccccggaccuuccugcugaaguacaacgagaacggcaccaucaccgacgccguggacugcgcccuggacccucugagcgagaccaagugcacccugaagagcuucaccguggagaagggcaucuaccagaccagcaacuuccgggugcagcccaccgagagcaucgugcgguuccccaacaucaccaaccugugccccuucggcgagguguucaacgccacccgguucgccagcguguacgccuggaaccggaagcggaucagcaacugcguggccgacuacagcgugcuguacaacagcgccagcuucagcaccuucaagugcuacggcgugagccccaccaagcugaacgaccugugcuucaccaacguguacgccgacagcuucgugauccguggcgacgaggugcggcagaucgcacccggccagacaggcaacaucgccgacuacaacuacaagcugcccgacgacuucaccggcugcgugaucgccuggaacagcaacaaccucgacagcaaggugggcggcaacuacaacuaccuguaccggcuguuccggaagagcaaccugaagcccuucgagcgggacaucagcaccgagaucuaccaagccggcuccaccccuugcaacggcgugaagggcuucaacugcuacuucccucugcagagcuacggcuuccagcccaccuacggcgugggcuaccagcccuaccgggugguggugcugagcuucgagcugcugcacgccccagccaccguguguggccccaagaagagcaccaaccuggugaagaacaagugcgugaacuucaacuucaacggccuuaccggcaccggcgugcugaccgagagcaacaagaaauuccugcccuuucagcaguucggccgggacaucgccgacaccaccgacgcugugcgggauccccagacccuggagauccuggacaucaccccuugcagcuucggcggcgugagcgugaucaccccaggcaccaacaccagcaaccagguggccgugcuguaccagggcgugaacugcaccgaggugcccguggccauccacgccgaccagcugacacccaccuggcgggucuacagcaccggcagcaacguguuccagacccgggccgguugccugaucggcgccgagcacgugaacaacagcuacgagugcgacauccccaucggcgccggcaucugugccagcuaccagacccagaccaauucaccccggagggcaaggagcguggccagccagagcaucaucgccuacaccaugagccugggcguggagaacagcguggccuacagcaacaacagcaucgccauccccaccaacuucaccaucagcgugaccaccgagauucugcccgugagcaugaccaagaccagcguggacugcaccauguacaucugcggcgacagcaccgagugcagcaaccugcugcugcaguacggcagcuucugcacccagcugaaccgggcccugaccggcaucgccguggagcaggacaagaacacccaggagguguucgcccaggugaagcagaucuacaagaccccucccaucaaggacuucggcggcuucaacuucagccagauccugcccgaccccagcaagcccagcaagcggagcuucaucgaggaccugcuguucaacaaggugacccuagccgacgccggcuucaucaagcaguacggcgacugccucggcgacauagccgcccgggaccugaucugcgcccagaaguucaacggccugaccgugcugccuccccugcugaccgacgagaugaucgcccaguacaccagcgcccuguuagccggaaccaucaccagcggcuggacuuucggcgcuggagccgcucugcagauccccuucgccaugcagauggccuaccgguucaacggcaucggcgugacccagaacgugcuguacgagaaccagaagcugaucgccaaccaguucaacagcgccaucggcaagauccaggacagccugagcagcaccgcuagcgcccugggcaagcugcaggacguggugaaccagaacgcccaggcccugaacacccuggugaagcagcugagcagcaacuucggcgccaucagcagcgugcugaacgacauccugagccggcuggacaaggucgaggccgaggugcagaucgaccggcugaucacuggccggcugcagagccugcagaccuacgugacccagcagcugauccgggccgccgagauucgggccagcgccaaccuggccgccaccaagaugagcgagugcgugcugggccagagcaagcggguggacuucugcggcaagggcuaccaccugaugagcuuuccccagagcgcaccccacggagugguguuccugcacgugaccuacgugcccgcccaggagaagaacuucaccaccgccccagccaucugccacgacggcaaggcccacuuuccccgggagggcguguucgugagcaacggcacccacugguucgugacccagcggaacuucuacgagccccagaucaucaccaccgacaacaccuucgugagcggcaacugcgacguggugaucggcaucgugaacaacaccguguacgauccccugcagcccgagcuggacagcuucaaggaggagcuggacaaguacuucaagaaucacaccagccccgacguggaccugggcgacaucagcggcaucaacgccagcguggugaacauccagaaggagaucgaucggcugaacgagguggccaagaaccugaacgagagccugaucgaccugcaggagcugggcaaguacgagcaguacaucaaguggcccugguacaucuggcugggcuucaucgccggccugaucgccaucgugauggugaccaucaugcugugcugcaugaccagcugcugcagcugccugaagggcuguugcagcugcggcagcugcugcaaguucgacgaggacgacagcgagcccgugcugaagggcgugaagcugcacuacaccugaugacucgagcugguacugcaugcacgcaaugcuagcugccccuuucccguccuggguaccccgagucucccccgaccucgggucccagguaugcucccaccuccaccugccccacucaccaccucugcuaguuccagacaccucccaagcacgcagcaaugcagcucaaaacgcuuagccuagccacacccccacgggaaacagcagugauuaaccuuuagcaauaaacgaaaguuuaacuaagcuauacuaaccccaggguuggucaauuucgugccagccacacccuggagcuagcaaaaaaaaaaaaaaaaaaaaaaaaaaaaaagcauaugacuaaaaaaaaaaaaaaaaaaaaaaaaaaaaaaaaaaaaaaaaaaaaaaaaaaaaaaaaaaaaaaaaaaaaaa

SEQ ID NO: 26760 - RNA, 4283 nt, Artificial Sequence
  SARS-CoV-2/Wuhan/WIV05/2019__EPI_ISL_402128 spike protein mRNA gc (1-1273)(E484K_D614G)
agaauaaacuaguauucuucugguccccacagacucagagagaacccgccaccauguucguguuccuggugcugcugccccuggugagcagccagugcgugaaccugaccacccggacccagcugccaccagccuacaccaacagcuucacccggggcgucuacuaccccgacaagguguuccggagcagcguccugcacagcacccaggaccuguuccugcccuucuucagcaacgugaccugguuccacgccauccacgugagcggcaccaacggcaccaagcgguucgacaaccccgugcugcccuucaacgacggcguguacuucgccagcaccgagaagagcaacaucauccggggcuggaucuucggcaccacccuggacagcaagacccagagccugcugaucgugaauaacgccaccaacguggugaucaaggugugcgaguuccaguucugcaacgaccccuuccugggcguguacuaccacaagaacaacaagagcuggauggagagcgaguuccggguguacagcagcgccaacaacugcaccuucgaguacgugagccagcccuuccugauggaccuggagggcaagcagggcaacuucaagaaccugcgggaguucguguucaagaacaucgacggcuacuucaagaucuacagcaagcacaccccaaucaaccuggugcgggaucugccccagggcuucucagcccuggagccccugguggaccugcccaucggcaucaacaucacccgguuccagacccugcuggcccugcaccggagcuaccugaccccaggcgacagcagcagcggguggacagcaggcgcggcugcuuacuacgugggcuaccugcagccccggaccuuccugcugaaguacaacgagaacggcaccaucaccgacgccguggacugcgcccuggacccucugagcgagaccaagugcacccugaagagcuucaccguggagaagggcaucuaccagaccagcaacuuccgggugcagcccaccgagagcaucgugcgguuccccaacaucaccaaccugugccccuucggcgagguguucaacgccacccgguucgccagcguguacgccuggaaccggaagcggaucagcaacugcguggccgacuacagcgugcuguacaacagcgccagcuucagcaccuucaagugcuacggcgugagccccaccaagcugaacgaccugugcuucaccaacguguacgccgacagcuucgugauccguggcgacgaggugcggcagaucgcacccggccagacaggcaagaucgccgacuacaacuacaagcugcccgacgacuucaccggcugcgugaucgccuggaacagcaacaaccucgacagcaaggugggcggcaacuacaacuaccuguaccggcuguuccggaagagcaaccugaagcccuucgagcgggacaucagcaccgagaucuaccaagccggcuccaccccuugcaacggcgugaagggcuucaacugcuacuucccucugcagagcuacggcuuccagcccaccaacggcgugggcuaccagcccuaccgggugguggugcugagcuucgagcugcugcacgccccagccaccguguguggccccaagaagagcaccaaccuggugaagaacaagugcgugaacuucaacuucaacggccuuaccggcaccggcgugcugaccgagagcaacaagaaauuccugcccuuucagcaguucggccgggacaucgccgacaccaccgacgcugugcgggauccccagacccuggagauccuggacaucaccccuugcagcuucggcggcgugagcgugaucaccccaggcaccaacaccagcaaccagguggccgugcuguaccagggcgugaacugcaccgaggugcccguggccauccacgccgaccagcugacacccaccuggcgggucuacagcaccggcagcaacguguuccagacccgggccgguugccugaucggcgccgagcacgugaacaacagcuacgagugcgacauccccaucggcgccggcaucugugccagcuaccagacccagaccaauucaccccggagggcaaggagcguggccagccagagcaucaucgccuacaccaugagccugggcgccgagaacagcguggccuacagcaacaacagcaucgccauccccaccaacuucaccaucagcgugaccaccgagauucugcccgugagcaugaccaagaccagcguggacugcaccauguacaucugcggcgacagcaccgagugcagcaaccugcugcugcaguacggcagcuucugcacccagcugaaccgggcccugaccggcaucgccguggagcaggacaagaacacccaggagguguucgcccaggugaagcagaucuacaagaccccucccaucaaggacuucggcggcuucaacuucagccagauccugcccgaccccagcaagcccagcaagcggagcuucaucgaggaccugcuguucaacaaggugacccuagccgacgccggcuucaucaagcaguacggcgacugccucggcgacauagccgcccgggaccugaucugcgcccagaaguucaacggccugaccgugcugccuccccugcugaccgacgagaugaucgcccaguacaccagcgcccuguuagccggaaccaucaccagcggcuggacuuucggcgcuggagccgcucugcagauccccuucgccaugcagauggccuaccgguucaacggcaucggcgugacccagaacgugcuguacgagaaccagaagcugaucgccaaccaguucaacagcgccaucggcaagauccaggacagccugagcagcaccgcuagcgcccugggcaagcugcaggacguggugaaccagaacgcccaggcccugaacacccuggugaagcagcugagcagcaacuucggcgccaucagcagcgugcugaacgacauccugagccggcuggacaaggucgaggccgaggugcagaucgaccggcugaucacuggccggcugcagagccugcagaccuacgugacccagcagcugauccgggccgccgagauucgggccagcgccaaccuggccgccaccaagaugagcgagugcgugcugggccagagcaagcggguggacuucugcggcaagggcuaccaccugaugagcuuuccccagagcgcaccccacggagugguguuccugcacgugaccuacgugcccgcccaggagaagaacuucaccaccgccccagccaucugccacgacggcaaggcccacuuuccccgggagggcguguucgugagcaacggcacccacugguucgugacccagcggaacuucuacgagccccagaucaucaccaccgacaacaccuucgugagcggcaacugcgacguggugaucggcaucgugaacaacaccguguacgauccccugcagcccgagcuggacagcuucaaggaggagcuggacaaguacuucaagaaucacaccagccccgacguggaccugggcgacaucagcggcaucaacgccagcguggugaacauccagaaggagaucgaucggcugaacgagguggccaagaaccugaacgagagccugaucgaccugcaggagcugggcaaguacgagcaguacaucaaguggcccugguacaucuggcugggcuucaucgccggccugaucgccaucgugauggugaccaucaugcugugcugcaugaccagcugcugcagcugccugaagggcuguugcagcugcggcagcugcugcaaguucgacgaggacgacagcgagcccgugcugaagggcgugaagcugcacuacaccugaugacucgagcugguacugcaugcacgcaaugcuagcugccccuuucccguccuggguaccccgagucucccccgaccucgggucccagguaugcucccaccuccaccugccccacucaccaccucugcuaguuccagacaccucccaagcacgcagcaaugcagcucaaaacgcuuagccuagccacacccccacgggaaacagcagugauuaaccuuuagcaauaaacgaaaguuuaacuaagcuauacuaaccccaggguuggucaauuucgugccagccacacccuggagcuagcaaaaaaaaaaaaaaaaaaaaaaaaaaaaaagcauaugacuaaaaaaaaaaaaaaaaaaaaaaaaaaaaaaaaaaaaaaaaaaaaaaaaaaaaaaaaaaaaaaaaaaaaaa

SEQ ID NO: 26761 - RNA, 4283 nt, Artificial Sequence
  SARS-CoV-2/Wuhan/WIV05/2019__EPI_ISL_402128 spike protein mRNA gc (1-1273)(L18F_T20N_P26S_D138Y_R190S_K417T_E484K_N501Y_D614G_H655Y _T1027I)
agaauaaacuaguauucuucugguccccacagacucagagagaacccgccaccauguucguguuccuggugcugcugccccuggugagcagccagugcgugaacuucaccaaccggacccagcugccaagcgccuacaccaacagcuucacccggggcgucuacuaccccgacaagguguuccggagcagcguccugcacagcacccaggaccuguuccugcccuucuucagcaacgugaccugguuccacgccauccacgugagcggcaccaacggcaccaagcgguucgacaaccccgugcugcccuucaacgacggcguguacuucgccagcaccgagaagagcaacaucauccggggcuggaucuucggcaccacccuggacagcaagacccagagccugcugaucgugaauaacgccaccaacguggugaucaaggugugcgaguuccaguucugcaacuaccccuuccugggcguguacuaccacaagaacaacaagagcuggauggagagcgaguuccggguguacagcagcgccaacaacugcaccuucgaguacgugagccagcccuuccugauggaccuggagggcaagcagggcaacuucaagaaccugagcgaguucguguucaagaacaucgacggcuacuucaagaucuacagcaagcacaccccaaucaaccuggugcgggaucugccccagggcuucucagcccuggagccccugguggaccugcccaucggcaucaacaucacccgguuccagacccugcuggcccugcaccggagcuaccugaccccaggcgacagcagcagcggguggacagcaggcgcggcugcuuacuacgugggcuaccugcagccccggaccuuccugcugaaguacaacgagaacggcaccaucaccgacgccguggacugcgcccuggacccucugagcgagaccaagugcacccugaagagcuucaccguggagaagggcaucuaccagaccagcaacuuccgggugcagcccaccgagagcaucgugcgguuccccaacaucaccaaccugugccccuucggcgagguguucaacgccacccgguucgccagcguguacgccuggaaccggaagcggaucagcaacugcguggccgacuacagcgugcuguacaacagcgccagcuucagcaccuucaagugcuacggcgugagccccaccaagcugaacgaccugugcuucaccaacguguacgccgacagcuucgugauccguggcgacgaggugcggcagaucgcacccggccagacaggcaccaucgccgacuacaacuacaagcugcccgacgacuucaccggcugcgugaucgccuggaacagcaacaaccucgacagcaaggugggcggcaacuacaacuaccuguaccggcuguuccggaagagcaaccugaagcccuucgagcgggacaucagcaccgagaucuaccaagccggcuccaccccuugcaacggcgugaagggcuucaacugcuacuucccucugcagagcuacggcuuccagcccaccuacggcgugggcuaccagcccuaccgggugguggugcugagcuucgagcugcugcacgccccagccaccguguguggccccaagaagagcaccaaccuggugaagaacaagugcgugaacuucaacuucaacggccuuaccggcaccggcgugcugaccgagagcaacaagaaauuccugcccuuucagcaguucggccgggacaucgccgacaccaccgacgcugugcgggauccccagacccuggagauccuggacaucaccccuugcagcuucggcggcgugagcgugaucaccccaggcaccaacaccagcaaccagguggccgugcuguaccagggcgugaacugcaccgaggugcccguggccauccacgccgaccagcugacacccaccuggcgggucuacagcaccggcagcaacguguuccagacccgggccgguugccugaucggcgccgaguacgugaacaacagcuacgagugcgacauccccaucggcgccggcaucugugccagcuaccagacccagaccaauucaccccggagggcaaggagcguggccagccagagcaucaucgccuacaccaugagccugggcgccgagaacagcguggccuacagcaacaacagcaucgccauccccaccaacuucaccaucagcgugaccaccgagauucugcccgugagcaugaccaagaccagcguggacugcaccauguacaucugcggcgacagcaccgagugcagcaaccugcugcugcaguacggcagcuucugcacccagcugaaccgggcccugaccggcaucgccguggagcaggacaagaacacccaggagguguucgcccaggugaagcagaucuacaagaccccucccaucaaggacuucggcggcuucaacuucagccagauccugcccgaccccagcaagcccagcaagcggagcuucaucgaggaccugcuguucaacaaggugacccuagccgacgccggcuucaucaagcaguacggcgacugccucggcgacauagccgcccgggaccugaucugcgcccagaaguucaacggccugaccgugcugccuccccugcugaccgacgagaugaucgcccaguacaccagcgcccuguuagccggaaccaucaccagcggcuggacuuucggcgcuggagccgcucugcagauccccuucgccaugcagauggccuaccgguucaacggcaucggcgugacccagaacgugcuguacgagaaccagaagcugaucgccaaccaguucaacagcgccaucggcaagauccaggacagccugagcagcaccgcuagcgcccugggcaagcugcaggacguggugaaccagaacgcccaggcccugaacacccuggugaagcagcugagcagcaacuucggcgccaucagcagcgugcugaacgacauccugagccggcuggacaaggucgaggccgaggugcagaucgaccggcugaucacuggccggcugcagagccugcagaccuacgugacccagcagcugauccgggccgccgagauucgggccagcgccaaccuggccgccaucaagaugagcgagugcgugcugggccagagcaagcggguggacuucugcggcaagggcuaccaccugaugagcuuuccccagagcgcaccccacggagugguguuccugcacgugaccuacgugcccgcccaggagaagaacuucaccaccgccccagccaucugccacgacggcaaggcccacuuuccccgggagggcguguucgugagcaacggcacccacugguucgugacccagcggaacuucuacgagccccagaucaucaccaccgacaacaccuucgugagcggcaacugcgacguggugaucggcaucgugaacaacaccguguacgauccccugcagcccgagcuggacagcuucaaggaggagcuggacaaguacuucaagaaucacaccagccccgacguggaccugggcgacaucagcggcaucaacgccagcguggugaacauccagaaggagaucgaucggcugaacgagguggccaagaaccugaacgagagccugaucgaccugcaggagcugggcaaguacgagcaguacaucaaguggcccugguacaucuggcugggcuucaucgccggccugaucgccaucgugauggugaccaucaugcugugcugcaugaccagcugcugcagcugccugaagggcuguugcagcugcggcagcugcugcaaguucgacgaggacgacagcgagcccgugcugaagggcgugaagcugcacuacaccugaugacucgagcugguacugcaugcacgcaaugcuagcugccccuuucccguccuggguaccccgagucucccccgaccucgggucccagguaugcucccaccuccaccugccccacucaccaccucugcuaguuccagacaccucccaagcacgcagcaaugcagcucaaaacgcuuagccuagccacacccccacgggaaacagcagugauuaaccuuuagcaauaaacgaaaguuuaacuaagcuauacuaaccccaggguuggucaauuucgugccagccacacccuggagcuagcaaaaaaaaaaaaaaaaaaaaaaaaaaaaaagcauaugacuaaaaaaaaaaaaaaaaaaaaaaaaaaaaaaaaaaaaaaaaaaaaaaaaaaaaaaaaaaaaaaaaaaaaaa

SEQ ID NO: 26762 - RNA, 4283 nt, Artificial Sequence
  SARS-CoV-2/Wuhan/WIV05/2019__EPI_ISL_402128 spike protein mRNA gc (1-1273)(S13I_W152C_L452R_D614G)
agaauaaacuaguauucuucugguccccacagacucagagagaacccgccaccauguucguguuccuggugcugcugccccuggugagcauccagugcgugaaccugaccacccggacccagcugccaccagccuacaccaacagcuucacccggggcgucuacuaccccgacaagguguuccggagcagcguccugcacagcacccaggaccuguuccugcccuucuucagcaacgugaccugguuccacgccauccacgugagcggcaccaacggcaccaagcgguucgacaaccccgugcugcccuucaacgacggcguguacuucgccagcaccgagaagagcaacaucauccggggcuggaucuucggcaccacccuggacagcaagacccagagccugcugaucgugaauaacgccaccaacguggugaucaaggugugcgaguuccaguucugcaacgaccccuuccugggcguguacuaccacaagaacaacaagagcugcauggagagcgaguuccggguguacagcagcgccaacaacugcaccuucgaguacgugagccagcccuuccugauggaccuggagggcaagcagggcaacuucaagaaccugcgggaguucguguucaagaacaucgacggcuacuucaagaucuacagcaagcacaccccaaucaaccuggugcgggaucugccccagggcuucucagcccuggagccccugguggaccugcccaucggcaucaacaucacccgguuccagacccugcuggcccugcaccggagcuaccugaccccaggcgacagcagcagcggguggacagcaggcgcggcugcuuacuacgugggcuaccugcagccccggaccuuccugcugaaguacaacgagaacggcaccaucaccgacgccguggacugcgcccuggacccucugagcgagaccaagugcacccugaagagcuucaccguggagaagggcaucuaccagaccagcaacuuccgggugcagcccaccgagagcaucgugcgguuccccaacaucaccaaccugugccccuucggcgagguguucaacgccacccgguucgccagcguguacgccuggaaccggaagcggaucagcaacugcguggccgacuacagcgugcuguacaacagcgccagcuucagcaccuucaagugcuacggcgugagccccaccaagcugaacgaccugugcuucaccaacguguacgccgacagcuucgugauccguggcgacgaggugcggcagaucgcacccggccagacaggcaagaucgccgacuacaacuacaagcugcccgacgacuucaccggcugcgugaucgccuggaacagcaacaaccucgacagcaaggugggcggcaacuacaacuaccgcuaccggcuguuccggaagagcaaccugaagcccuucgagcgggacaucagcaccgagaucuaccaagccggcuccaccccuugcaacggcguggagggcuucaacugcuacuucccucugcagagcuacggcuuccagcccaccaacggcgugggcuaccagcccuaccgggugguggugcugagcuucgagcugcugcacgccccagccaccguguguggccccaagaagagcaccaaccuggugaagaacaagugcgugaacuucaacuucaacggccuuaccggcaccggcgugcugaccgagagcaacaagaaauuccugcccuuucagcaguucggccgggacaucgccgacaccaccgacgcugugcgggauccccagacccuggagauccuggacaucaccccuugcagcuucggcggcgugagcgugaucaccccaggcaccaacaccagcaaccagguggccgugcuguaccagggcgugaacugcaccgaggugcccguggccauccacgccgaccagcugacacccaccuggcgggucuacagcaccggcagcaacguguuccagacccgggccgguugccugaucggcgccgagcacgugaacaacagcuacgagugcgacauccccaucggcgccggcaucugugccagcuaccagacccagaccaauucaccccggagggcaaggagcguggccagccagagcaucaucgccuacaccaugagccugggcgccgagaacagcguggccuacagcaacaacagcaucgccauccccaccaacuucaccaucagcgugaccaccgagauucugcccgugagcaugaccaagaccagcguggacugcaccauguacaucugcggcgacagcaccgagugcagcaaccugcugcugcaguacggcagcuucugcacccagcugaaccgggcccugaccggcaucgccguggagcaggacaagaacacccaggagguguucgcccaggugaagcagaucuacaagaccccucccaucaaggacuucggcggcuucaacuucagccagauccugcccgaccccagcaagcccagcaagcggagcuucaucgaggaccugcuguucaacaaggugacccuagccgacgccggcuucaucaagcaguacggcgacugccucggcgacauagccgcccgggaccugaucugcgcccagaaguucaacggccugaccgugcugccuccccugcugaccgacgagaugaucgcccaguacaccagcgcccuguuagccggaaccaucaccagcggcuggacuuucggcgcuggagccgcucugcagauccccuucgccaugcagauggccuaccgguucaacggcaucggcgugacccagaacgugcuguacgagaaccagaagcugaucgccaaccaguucaacagcgccaucggcaagauccaggacagccugagcagcaccgcuagcgcccugggcaagcugcaggacguggugaaccagaacgcccaggcccugaacacccuggugaagcagcugagcagcaacuucggcgccaucagcagcgugcugaacgacauccugagccggcuggacaaggucgaggccgaggugcagaucgaccggcugaucacuggccggcugcagagccugcagaccuacgugacccagcagcugauccgggccgccgagauucgggccagcgccaaccuggccgccaccaagaugagcgagugcgugcugggccagagcaagcggguggacuucugcggcaagggcuaccaccugaugagcuuuccccagagcgcaccccacggagugguguuccugcacgugaccuacgugcccgcccaggagaagaacuucaccaccgccccagccaucugccacgacggcaaggcccacuuuccccgggagggcguguucgugagcaacggcacccacugguucgugacccagcggaacuucuacgagccccagaucaucaccaccgacaacaccuucgugagcggcaacugcgacguggugaucggcaucgugaacaacaccguguacgauccccugcagcccgagcuggacagcuucaaggaggagcuggacaaguacuucaagaaucacaccagccccgacguggaccugggcgacaucagcggcaucaacgccagcguggugaacauccagaaggagaucgaucggcugaacgagguggccaagaaccugaacgagagccugaucgaccugcaggagcugggcaaguacgagcaguacaucaaguggcccugguacaucuggcugggcuucaucgccggccugaucgccaucgugauggugaccaucaugcugugcugcaugaccagcugcugcagcugccugaagggcuguugcagcugcggcagcugcugcaaguucgacgaggacgacagcgagcccgugcugaagggcgugaagcugcacuacaccugaugacucgagcugguacugcaugcacgcaaugcuagcugccccuuucccguccuggguaccccgagucucccccgaccucgggucccagguaugcucccaccuccaccugccccacucaccaccucugcuaguuccagacaccucccaagcacgcagcaaugcagcucaaaacgcuuagccuagccacacccccacgggaaacagcagugauuaaccuuuagcaauaaacgaaaguuuaacuaagcuauacuaaccccaggguuggucaauuucgugccagccacacccuggagcuagcaaaaaaaaaaaaaaaaaaaaaaaaaaaaaagcauaugacuaaaaaaaaaaaaaaaaaaaaaaaaaaaaaaaaaaaaaaaaaaaaaaaaaaaaaaaaaaaaaaaaaaaaaa

SEQ ID NO: 26763 - RNA, 4283 nt, Artificial Sequence
  SARS-CoV-2/Wuhan/WIV05/2019__EPI_ISL_402128 spike protein mRNA gc (1-1273)
agaauaaacuaguauucuucugguccccacagacucagagagaacccgccaccauguucguguuccuggugcugcugccccuggugagcagccagugcgugaaccugaccacccggacccagcugcccccugccuacaccaacagcuucacccggggcguguacuaccccgacaagguguuccggagcagcgugcugcacagcacccaggaccuguuccugcccuucuucagcaacgugaccugguuccacgccauccacgugagcggcaccaacggcaccaagcgguucgacaacccagugcugcccuucaacgacggcguguacuucgccagcaccgagaagucaaacaucauccggggcuggaucuucggcaccacccuggacagcaagacacagagccugcugaucgugaacaacgccaccaacguggugaucaaggugugcgaguuucaguucugcaacgaccccuuccugggcguguacuaccacaagaacaacaagagcuggauggagagcgaguuccgggucuacagcagcgcuaacaauugcaccuucgaguacgugagccagcccuuccugauggaccucgagggcaagcagggcaacuucaagaaccugcgggaguucguguucaagaacaucgauggcuacuucaagaucuacagcaagcacacccccaucaaccuggugcgggaccugccccagggauucagcgcccuggagccucugguggaccugcccaucggcaucaacaucaccagguuccagacccugcuggcccugcaccggagcuaccugacccccggcgacagcagcagcggcuggaccgccggcgccgccgcauacuacgugggcuaccugcagccacggaccuuccugcugaaguacaacgagaacggcaccaucaccgacgccguggacugcgcccuggacccccugagcgagaccaagugcacccuaaagagcuucaccguggagaagggcaucuaccagaccagcaacuuccgggugcagcccacugagagcaucgugcgguuccccaacauuaccaaccugugucccuucggcgagguguucaacgccacccgguucgccagcguguacgccuggaaccggaagcggaucagcaacugcguggccgacuacagcgugcuguacaacagcgccagcuucagcaccuucaagugcuacggcgugagcccuaccaagcugaacgaccugugcuucaccaacguguacgcugacagcuucgugauccggggcgacgaggugcggcagaucgcccccggccagaccggcaagaucgccgacuacaacuacaagcugcccgacgacuucaccggcugcgugaucgccuggaacagcaacaaccuggacagcaaggugggcggcaacuacaacuaccuguaccggcuguuccguaagagcaaccugaagccauucgagcgggacaucagcaccgagaucuaccaggccggcagcacccccugcaacgguguggagggcuuuaacugcuacuucccccugcagagcuacggcuuccagcccaccaacggcgugggcuaccagcccuaccgggugguggugcugagcuucgagcugcugcacgcccccgccaccgugugcggcccuaaaaagagcaccaaccuggugaagaacaagugcgugaacuucaauuucaacggccugaccggcaccggcgugcugaccgagagcaacaagaaguuccugcccuuccagcaguucggccgggauaucgccgacaccaccgacgcagugcgggacccccagacccuggagauccuggacaucaccccaugcagcuucggcggcgugagcgucaucacccccggcacaaacaccagcaaccagguggccgugcuguaccaggacgugaacugcaccgaggugcccguggccauccacgccgaccagcugacccccaccuggcggguguacagcaccggaagcaacguguuccagacccgggccggcugccugaucggcgccgagcacgugaacaacuccuacgagugcgacauccccaucggcgcuggcaucugcgccagcuaccagacccagaccaacagcccccggcgggcccggagcguggccagccagagcaucaucgccuacaccaugagcuuaggcgccgagaacagcguggccuacagcaacaacagcaucgcgaucccuaccaacuucaccaucagcgugaccaccgagauacugcccgugagcaugaccaagaccagcguggacuguaccauguacaucugcggcgacagcaccgagugcagcaaccugcugcugcaguacggcagcuucugcacccagcugaaccgggcccugaccggcaucgccguggagcaggacaagaacacccaagagguguucgcccaggugaagcagaucuacaagacucccccaaucaaggacuucggcggcuucaacuucagccagauccugcccgaccccagcaagcccagcaagcggagcuucaucgaggaccugcuguucaacaaggugacccuggccgacgccggcuucaucaagcaguacggcgauugccugggcgacaucgccgcucgggaccugaucugcgcccagaaguucaacgggcugaccgugcugcccccucugcugaccgacgagaugaucgcccaguacaccagcgcccugcuugccggcaccaucaccagcggcuggaccuucggcgccggcgcagcccugcagauccccuucgccaugcagauggccuaccgguucaacggcaucggcgugacccagaacgugcuguacgagaaccagaagcugaucgccaaccaguucaacagcgccaucggcaagauccaggacagccugagcagcaccgccagcgcccugggcaagcugcaggacguggugaaccagaacgcucaggcccugaacacccuggugaagcagcugagcagcaacuucggcgccaucagcucagugcugaaugacauccugagcaggcuggacaagguggaggccgaggugcagaucgaccggcugaucaccggccggcugcagagccugcagaccuacgugacccagcagcugauccgggccgccgagauccgggccagcgccaaccuggcagccaccaagaugagcgagugcgugcugggccagagcaagcggguggacuuuugcggcaagggcuaccaccugaugagcuucccccagagcgccccacacggcgugguguuccuccacgucacauacgugcccgcccaggagaagaacuucaccaccgcccccgccauuugccacgacggcaaggcucacuucccccgggagggcguguucgugagcaacggaacccacugguucgugacccagcggaacuucuacgagccccagaucaucaccaccgacaacaccuucgugagcggcaacugcgacguggugaucggcaucgugaacaacaccguguacgacccccugcagccugagcuggacagcuucaaggaggagcuggacaaguacuucaagaaccacaccagccccgauguggaccugggcgacaucagcggcaucaacgccagcguggugaacauccagaaggagaucgaccggcugaacgagguggccaagaaccugaacgagagccugaucgaccugcaggagcugggcaaguacgagcaguacaucaaguggcccugguacaucuggcugggcuucaucgccggccugaucgccaucgugauggugaccaucaugcugugcugcaugaccagcugcuguagcugccugaagggcugcugcagcugcggcagcugcugcaaguucgacgaggacgacagcgagccagugcugaagggcgugaagcugcacuacaccugaugacucgagcugguacugcaugcacgcaaugcuagcugccccuuucccguccuggguaccccgagucucccccgaccucgggucccagguaugcucccaccuccaccugccccacucaccaccucugcuaguuccagacaccucccaagcacgcagcaaugcagcucaaaacgcuuagccuagccacacccccacgggaaacagcagugauuaaccuuuagcaauaaacgaaaguuuaacuaagcuauacuaaccccaggguuggucaauuucgugccagccacacccuggagcuagcaaaaaaaaaaaaaaaaaaaaaaaaaaaaaagcauaugacuaaaaaaaaaaaaaaaaaaaaaaaaaaaaaaaaaaaaaaaaaaaaaaaaaaaaaaaaaaaaaaaaaaaaaa

SEQ ID NO: 26764 - RNA, 4283 nt, Artificial Sequence
  SARS-CoV-2/Wuhan/WIV05/2019__EPI_ISL_402128 spike protein mRNA gc (1-1273)(D614G)
agaauaaacuaguauucuucugguccccacagacucagagagaacccgccaccauguucguguuccuggugcugcugccccuggugagcagccagugcgugaaccugaccacccggacccagcugcccccugccuacaccaacagcuucacccggggcguguacuaccccgacaagguguuccggagcagcgugcugcacagcacccaggaccuguuccugcccuucuucagcaacgugaccugguuccacgccauccacgugagcggcaccaacggcaccaagcgguucgacaacccagugcugcccuucaacgacggcguguacuucgccagcaccgagaagucaaacaucauccggggcuggaucuucggcaccacccuggacagcaagacacagagccugcugaucgugaacaacgccaccaacguggugaucaaggugugcgaguuucaguucugcaacgaccccuuccugggcguguacuaccacaagaacaacaagagcuggauggagagcgaguuccgggucuacagcagcgcuaacaauugcaccuucgaguacgugagccagcccuuccugauggaccucgagggcaagcagggcaacuucaagaaccugcgggaguucguguucaagaacaucgauggcuacuucaagaucuacagcaagcacacccccaucaaccuggugcgggaccugccccagggauucagcgcccuggagccucugguggaccugcccaucggcaucaacaucaccagguuccagacccugcuggcccugcaccggagcuaccugacccccggcgacagcagcagcggcuggaccgccggcgccgccgcauacuacgugggcuaccugcagccacggaccuuccugcugaaguacaacgagaacggcaccaucaccgacgccguggacugcgcccuggacccccugagcgagaccaagugcacccuaaagagcuucaccguggagaagggcaucuaccagaccagcaacuuccgggugcagcccacugagagcaucgugcgguuccccaacauuaccaaccugugucccuucggcgagguguucaacgccacccgguucgccagcguguacgccuggaaccggaagcggaucagcaacugcguggccgacuacagcgugcuguacaacagcgccagcuucagcaccuucaagugcuacggcgugagcccuaccaagcugaacgaccugugcuucaccaacguguacgcugacagcuucgugauccggggcgacgaggugcggcagaucgcccccggccagaccggcaagaucgccgacuacaacuacaagcugcccgacgacuucaccggcugcgugaucgccuggaacagcaacaaccuggacagcaaggugggcggcaacuacaacuaccuguaccggcuguuccguaagagcaaccugaagccauucgagcgggacaucagcaccgagaucuaccaggccggcagcacccccugcaacgguguggagggcuuuaacugcuacuucccccugcagagcuacggcuuccagcccaccaacggcgugggcuaccagcccuaccgggugguggugcugagcuucgagcugcugcacgcccccgccaccgugugcggcccuaaaaagagcaccaaccuggugaagaacaagugcgugaacuucaauuucaacggccugaccggcaccggcgugcugaccgagagcaacaagaaguuccugcccuuccagcaguucggccgggauaucgccgacaccaccgacgcagugcgggacccccagacccuggagauccuggacaucaccccaugcagcuucggcggcgugagcgucaucacccccggcacaaacaccagcaaccagguggccgugcuguaccagggagugaacugcaccgaggugcccguggccauccacgccgaccagcugacccccaccuggcggguguacagcaccggcagcaacguguuccagacccgggccggcugccugaucggcgccgagcacgugaacaacuccuacgagugcgacauccccaucggcgcuggcaucugcgccagcuaccagacccagaccaacagcccccggcgggcccggagcguggccagccagagcaucaucgccuacaccaugagcuuaggcgccgagaacagcguggccuacagcaacaacagcaucgcgaucccuaccaacuucaccaucagcgugaccaccgagauacugcccgugagcaugaccaagaccagcguggacuguaccauguacaucugcggcgacagcaccgagugcagcaaccugcugcugcaguacggcagcuucugcacccagcugaaccgggcccugaccggcaucgccguggagcaggacaagaacacccaagagguguucgcccaggugaagcagaucuacaagacucccccaaucaaggacuucggcggcuucaacuucagccagauccugcccgaccccagcaagcccagcaagcggagcuucaucgaggaccugcuguucaacaaggugacccuggccgacgccggcuucaucaagcaguacggcgacugccugggggauaucgccgcucgggaccugaucugcgcccagaaguucaacggccugaccgugcugcccccucugcugaccgacgagaugaucgcccaguacaccagcgcccugcuugccggcaccaucaccagcggcuggaccuucggcgccggcgcagcccugcagauccccuucgccaugcagauggccuaccgguucaacggcaucggcgugacccagaacgugcuguacgagaaccagaagcugaucgccaaccaguucaacagcgccaucggcaagauccaggacagccugagcagcaccgccagcgcccugggcaagcugcaggacguggugaaccagaacgcucaggcccugaacacccuggugaagcagcugagcagcaacuucggcgccaucagcucagugcugaaugacauccugagcaggcuggacaagguggaggccgaggugcagaucgaccggcugaucaccggccggcugcagagccugcagaccuacgugacccagcagcugauccgggccgccgagauccgggccagcgccaaccuggcagccaccaagaugagcgagugcgugcugggccagagcaagcggguggacuuuugcggcaagggcuaccaccugaugagcuucccccagagcgccccacacggcgugguguuccuccacgucacauacgugcccgcccaggagaagaacuucaccaccgcccccgccauuugccacgacggcaaggcucacuucccccgggagggaguguucgugagcaacggcacccacugguucgugacccagcggaacuucuacgagccccagaucaucaccaccgacaacaccuucgugagcggcaacugcgacguggugaucggcaucgugaacaacaccguguacgacccccugcagccugagcuggacagcuucaaggaggagcuggacaaguacuucaagaaccacaccagccccgacguggaucugggcgacaucagcggcaucaacgccagcguggugaacauccagaaggagaucgaccggcugaacgagguggccaagaaccugaacgagagccugaucgaccugcaggagcugggcaaguacgagcaguacaucaaguggcccugguacaucuggcugggcuucaucgccggccugaucgccaucgugauggugaccaucaugcugugcugcaugaccagcugcuguagcugccugaagggcugcugcagcugcggcagcugcugcaaguucgacgaggacgacagcgagccagugcugaagggcgugaagcugcacuacaccugaugacucgagcugguacugcaugcacgcaaugcuagcugccccuuucccguccuggguaccccgagucucccccgaccucgggucccagguaugcucccaccuccaccugccccacucaccaccucugcuaguuccagacaccucccaagcacgcagcaaugcagcucaaaacgcuuagccuagccacacccccacgggaaacagcagugauuaaccuuuagcaauaaacgaaaguuuaacuaagcuauacuaaccccaggguuggucaauuucgugccagccacacccuggagcuagcaaaaaaaaaaaaaaaaaaaaaaaaaaaaaagcauaugacuaaaaaaaaaaaaaaaaaaaaaaaaaaaaaaaaaaaaaaaaaaaaaaaaaaaaaaaaaaaaaaaaaaaaaa

SEQ ID NO: 26765 - RNA, 4283 nt, Artificial Sequence
  SARS-CoV-2/Wuhan/WIV05/2019__EPI_ISL_402128 spike protein mRNA gc (1-1273)(A222V_D614G)
agaauaaacuaguauucuucugguccccacagacucagagagaacccgccaccauguucguguuccuggugcugcugccccuggugagcagccagugcgugaaccugaccacccggacccagcugcccccugccuacaccaacagcuucacccggggcguguacuaccccgacaagguguuccggagcagcgugcugcacagcacccaggaccuguuccugcccuucuucagcaacgugaccugguuccacgccauccacgugagcggcaccaacggcaccaagcgguucgacaacccagugcugcccuucaacgacggcguguacuucgccagcaccgagaagucaaacaucauccggggcuggaucuucggcaccacccuggacagcaagacacagagccugcugaucgugaacaacgccaccaacguggugaucaaggugugcgaguuucaguucugcaacgaccccuuccugggcguguacuaccacaagaacaacaagagcuggauggagagcgaguuccgggucuacagcagcgcuaacaauugcaccuucgaguacgugagccagcccuuccugauggaccucgagggcaagcagggcaacuucaagaaccugcgggaguucguguucaagaacaucgauggcuacuucaagaucuacagcaagcacacccccaucaaccuggugcgggaccugccccagggauucagcgugcuggagccucugguggaccugcccaucggcaucaacaucaccagguuccagacccugcuggcccugcaccggagcuaccugacccccggcgacagcagcagcggcuggaccgccggcgccgccgccuacuacgugggcuaccugcagccacggaccuuccugcugaaguacaacgagaacggcaccaucaccgacgcaguggacugcgcccuggacccccugagcgagaccaagugcacccuaaagagcuucaccguggagaagggcaucuaccagaccagcaacuuccgggugcagcccacugagagcaucgugcgguuccccaacauuaccaaccugugucccuucggcgagguguucaacgccacccgguucgccagcguguacgccuggaaccggaagcggaucagcaacugcguggccgacuacagcgugcuguacaacagcgccagcuucagcaccuucaagugcuacggcgugagcccuaccaagcugaacgaccugugcuucaccaacguguacgccgacagcuucgugauccggggcgacgaggugcggcagaucgcucccggccagaccggcaagaucgccgacuacaacuacaagcugcccgacgacuucaccggcugcgugaucgccuggaacagcaacaaccuggacagcaaggugggcggcaacuacaacuaccuguaccggcuguuccguaagagcaaccugaagccauucgagcgggacaucagcaccgagaucuaccaggccggcagcacccccugcaacgguguggagggcuuuaacugcuacuucccccugcagagcuacggcuuccagcccaccaacggcgugggcuaccagcccuaccgggugguggugcugagcuucgagcugcugcacgcccccgccaccgugugcggcccuaaaaagagcaccaaccuggugaagaacaagugcgugaacuucaauuucaacggccugaccggcaccggcgugcugaccgagagcaacaagaaguuccugcccuuccagcaguucggccgggauaucgccgacaccaccgacgccgugcgggacccccagacccuggagauccuggacaucaccccaugcagcuucggcggcgucagcgugaucacccccggcacaaacaccagcaaccagguggcagugcuguaccagggagugaacugcaccgaggugcccguggccauccacgccgaccagcugacccccaccuggcggguguacagcaccggcagcaacguguuccagacccgggccggcugccugaucggcgccgagcacgugaacaacuccuacgagugcgacauccccaucggcgccggcaucugcgcuagcuaccagacccagaccaacagcccccggcgggcccggagcguggccagccagagcaucaucgccuacaccaugagcuuaggcgccgagaacagcguggccuacagcaacaacagcaucgccaucccuaccaacuucaccaucagcgugaccaccgagauacugcccgugagcaugaccaagaccagcguggacuguaccauguacaucugcggcgacagcaccgagugcagcaaccugcugcugcaguacggcagcuucugcacccagcugaaccgggcgcugaccggcaucgccguggagcaggacaagaacacccaagagguguucgcccaggugaagcagaucuacaagacucccccaaucaaggacuucggcggcuucaacuucagccagauccugcccgaccccagcaagcccagcaagcggagcuucaucgaggaccugcuguucaacaaggugacccuggccgacgccggcuucaucaagcaguacggcgacugccugggggauaucgccgcccgggaccugaucugcgcucagaaguucaacggccugaccgugcugcccccucugcugaccgacgagaugaucgcccaguacaccagcgcccugcuugccggcaccaucaccagcggcuggaccuucggcgccggcgccgcacugcagauccccuucgccaugcagauggccuaccgguucaacggcaucggcgugacccagaacgugcuguacgagaaccagaagcugaucgccaaccaguucaacagcgccaucggcaagauccaggacagccugagcagcaccgccagcgcccugggcaagcugcaggacguggugaaccagaacgcccaggcucugaacacccuggugaagcagcugagcagcaacuucggcgccaucagcucagugcugaaugacauccugagcaggcuggacaagguggaggccgaggugcagaucgaccggcugaucaccggccggcugcagagccugcagaccuacgugacccagcagcugauccgggccgccgagauccgggccagcgccaaccuggccgcaaccaagaugagcgagugcgugcugggccagagcaagcggguggacuuuugcggcaagggcuaccaccugaugagcuucccccagagcgccccacacggcguggucuuccuccacgugacauacgugcccgcccaggagaagaacuucaccaccgcccccgccauuugccacgacggcaaggcccacuucccccgggagggaguguucgugagcaacggcacccacugguucgugacccagcggaacuucuacgagccccagaucaucaccaccgacaacaccuucgugagcggcaacugcgacguggugaucggcaucgugaacaacaccguguacgacccccugcagccugagcuggacagcuucaaggaggagcuggacaaguacuucaagaaccacaccagccccgacguggaucugggcgacaucagcggcaucaacgcuagcguggugaacauccagaaggagaucgaccggcugaacgagguggccaagaaccugaacgagagccugaucgaccugcaggagcugggcaaguacgagcaguacaucaaguggcccugguacaucuggcugggcuucaucgccggccugaucgccaucgugauggugaccaucaugcugugcugcaugaccagcugcuguagcugccugaagggcugcugcagcugcggcagcugcugcaaguucgacgaggacgacagcgagccagugcugaagggcgugaagcugcacuacaccugaugacucgagcugguacugcaugcacgcaaugcuagcugccccuuucccguccuggguaccccgagucucccccgaccucgggucccagguaugcucccaccuccaccugccccacucaccaccucugcuaguuccagacaccucccaagcacgcagcaaugcagcucaaaacgcuuagccuagccacacccccacgggaaacagcagugauuaaccuuuagcaauaaacgaaaguuuaacuaagcuauacuaaccccaggguuggucaauuucgugccagccacacccuggagcuagcaaaaaaaaaaaaaaaaaaaaaaaaaaaaaagcauaugacuaaaaaaaaaaaaaaaaaaaaaaaaaaaaaaaaaaaaaaaaaaaaaaaaaaaaaaaaaaaaaaaaaaaaaa

SEQ ID NO: 26766 - RNA, 4283 nt, Artificial Sequence
  SARS-CoV-2/Wuhan/WIV05/2019__EPI_ISL_402128 spike protein mRNA gc (1-1273)(N439K_D614G)
agaauaaacuaguauucuucugguccccacagacucagagagaacccgccaccauguucguguuccuggugcugcugccccuggugagcagccagugcgugaaccugaccacccggacccagcugcccccugccuacaccaacagcuucacccggggcguguacuaccccgacaagguguuccggagcagcgugcugcacagcacccaggaccuguuccugcccuucuucagcaacgugaccugguuccacgccauccacgugagcggcaccaacggcaccaagcgguucgacaacccagugcugcccuucaacgacggcguguacuucgccagcaccgagaagucaaacaucauccggggcuggaucuucggcaccacccuggacagcaagacacagagccugcugaucgugaacaacgccaccaacguggugaucaaggugugcgaguuucaguucugcaacgaccccuuccugggcguguacuaccacaagaacaacaagagcuggauggagagcgaguuccgggucuacagcagcgcuaacaauugcaccuucgaguacgugagccagcccuuccugauggaccucgagggcaagcagggcaacuucaagaaccugcgggaguucguguucaagaacaucgauggcuacuucaagaucuacagcaagcacacccccaucaaccuggugcgggaccugccccagggauucagcgcccuggagccucugguggaccugcccaucggcaucaacaucaccagguuccagacccugcuggcccugcaccggagcuaccugacccccggcgacagcagcagcggcuggaccgccggcgccgccgcauacuacgugggcuaccugcagccacggaccuuccugcugaaguacaacgagaacggcaccaucaccgacgccguggacugcgcccuggacccccugagcgagaccaagugcacccuaaagagcuucaccguggagaagggcaucuaccagaccagcaacuuccgggugcagcccacugagagcaucgugcgguuccccaacauuaccaaccugugucccuucggcgagguguucaacgccacccgguucgccagcguguacgccuggaaccggaagcggaucagcaacugcguggccgacuacagcgugcuguacaacagcgccagcuucagcaccuucaagugcuacggcgugagcccuaccaagcugaacgaccugugcuucaccaacguguacgcugacagcuucgugauccggggcgacgaggugcggcagaucgcccccggccagaccggcaagaucgccgacuacaacuacaagcugcccgacgacuucaccggcugcgugaucgccuggaacagcaagaaccuggacagcaaggugggcggcaacuacaacuaccuguaccggcuguuccguaagagcaaccugaagccauucgagcgggacaucagcaccgagaucuaccaggccggcagcacccccugcaacgguguggagggcuuuaacugcuacuucccccugcagagcuacggcuuccagcccaccaacggcgugggcuaccagcccuaccgggugguggugcugagcuucgagcugcugcacgcccccgccaccgugugcggcccuaaaaagagcaccaaccuggugaagaacaagugcgugaacuucaacuucaauggccugaccggcaccggcgugcugaccgagagcaacaagaaguuccugcccuuccagcaguucggccgggauaucgccgacaccaccgacgcagugcgggacccccagacccuggagauccuggacaucaccccaugcagcuucggcggcgugagcgucaucacccccggcacaaacaccagcaaccagguggccgugcuguaccagggagugaacugcaccgaggugcccguggccauccacgccgaccagcugacccccaccuggcggguguacagcaccggcagcaacguguuccagacccgggccggcugccugaucggcgccgagcacgugaacaacuccuacgagugcgacauccccaucggcgcuggcaucugcgccagcuaccagacccagaccaacagcccccggcgggcccggagcguggccagccagagcaucaucgccuacaccaugagcuuaggcgccgagaacagcguggccuacagcaacaacagcaucgcgaucccuaccaacuucaccaucagcgugaccaccgagauacugcccgugagcaugaccaagaccagcguggacuguaccauguacaucugcggcgacagcaccgagugcagcaaccugcugcugcaguacggcagcuucugcacccagcugaaccgggcccugaccggcaucgccguggagcaggacaagaacacccaagagguguucgcccaggugaagcagaucuacaagacucccccaaucaaggacuucggcggcuucaacuucagccagauccugcccgaccccagcaagcccagcaagcggagcuucaucgaggaccugcuguucaacaaggugacccuggccgacgccggcuucaucaagcaguacggcgacugccugggggauaucgccgcucgggaccugaucugcgcccagaaguucaacggccugaccgugcugcccccucugcugaccgacgagaugaucgcccaguacaccagcgcccugcuugccggcaccaucaccagcggcuggaccuucggcgccggcgcagcccugcagauccccuucgccaugcagauggccuaccgguucaacggcaucggcgugacccagaacgugcuguacgagaaccagaagcugaucgccaaccaguucaacagcgccaucggcaagauccaggacagccugagcagcaccgccagcgcccugggcaagcugcaggacguggugaaccagaacgcucaggcccugaacacccuggugaagcagcugagcagcaacuucggcgccaucagcucagugcugaacgacauccugagcaggcuggacaagguggaggccgaggugcagaucgaccggcugaucaccggccggcugcagagccugcagaccuacgugacccagcagcugauccgggccgccgagauccgggccagcgccaaucuggcagccaccaagaugagcgagugcgugcugggccagagcaagcggguggacuuuugcggcaagggcuaccaccugaugagcuucccccagagcgccccacacggcgugguguuccuccacgucacauacgugcccgcccaggagaagaacuucaccaccgcccccgccauuugccacgacggcaaggcucacuucccccgggagggaguguucgugagcaacggcacccacugguucgugacccagcggaacuucuacgagccccagaucaucaccaccgacaacaccuucgugagcggcaacugcgacguggugaucggcaucgugaacaacaccguguacgacccccugcagccugagcuggacagcuucaaggaggagcuggacaaguacuucaagaaccacaccagccccgacguggaucugggcgacaucagcggcaucaacgccagcguggugaacauccagaaggagaucgaccggcugaacgagguggccaagaaccugaacgagagccugaucgaccugcaggagcugggcaaguacgagcaguacaucaaguggcccugguacaucuggcugggcuucaucgccggccugaucgccaucgugauggugaccaucaugcugugcugcaugaccagcugcuguagcugccugaagggcugcugcagcugcggcagcugcugcaaguucgacgaggacgacagcgagccagugcugaagggcgugaagcugcacuacaccugaugacucgagcugguacugcaugcacgcaaugcuagcugccccuuucccguccuggguaccccgagucucccccgaccucgggucccagguaugcucccaccuccaccugccccacucaccaccucugcuaguuccagacaccucccaagcacgcagcaaugcagcucaaaacgcuuagccuagccacacccccacgggaaacagcagugauuaaccuuuagcaauaaacgaaaguuuaacuaagcuauacuaaccccaggguuggucaauuucgugccagccacacccuggagcuagcaaaaaaaaaaaaaaaaaaaaaaaaaaaaaagcauaugacuaaaaaaaaaaaaaaaaaaaaaaaaaaaaaaaaaaaaaaaaaaaaaaaaaaaaaaaaaaaaaaaaaaaaaa

SEQ ID NO: 26767 - RNA, 4283 nt, Artificial Sequence
  SARS-CoV-2/Wuhan/WIV05/2019__EPI_ISL_402128 spike protein mRNA gc (1-1273)(S477N_D614G)
agaauaaacuaguauucuucugguccccacagacucagagagaacccgccaccauguucguguuccuggugcugcugccccuggugagcagccagugcgugaaccugaccacccggacccagcugcccccugccuacaccaacagcuucacccggggcguguacuaccccgacaagguguuccggagcagcgugcugcacagcacccaggaccuguuccugcccuucuucagcaacgugaccugguuccacgccauccacgugagcggcaccaacggcaccaagcgguucgacaacccagugcugcccuucaacgacggcguguacuucgccagcaccgagaagucaaacaucauccggggcuggaucuucggcaccacccuggacagcaagacacagagccugcugaucgugaacaacgccaccaacguggugaucaaggugugcgaguuucaguucugcaacgaccccuuccugggcguguacuaccacaagaacaacaagagcuggauggagagcgaguuccgggucuacagcagcgcuaacaauugcaccuucgaguacgugagccagcccuuccugauggaccucgagggcaagcagggcaacuucaagaaccugcgggaguucguguucaagaacaucgauggcuacuucaagaucuacagcaagcacacccccaucaaccuggugcgggaccugccccagggauucagcgcccuggagccucugguggaccugcccaucggcaucaacaucaccagguuccagacccugcuggcccugcaccggagcuaccugacccccggcgacagcagcagcggcuggaccgccggcgccgccgcauacuacgugggcuaccugcagccacggaccuuccugcugaaguacaacgagaacggcaccaucaccgacgccguggacugcgcccuggacccccugagcgagaccaagugcacccuaaagagcuucaccguggagaagggcaucuaccagaccagcaacuuccgggugcagcccacugagagcaucgugcgguuccccaacauuaccaaccugugucccuucggcgagguguucaacgccacccgguucgccagcguguacgccuggaaccggaagcggaucagcaacugcguggccgacuacagcgugcuguacaacagcgccagcuucagcaccuucaagugcuacggcgugagcccuaccaagcugaacgaccugugcuucaccaacguguacgcugacagcuucgugauccggggcgacgaggugcggcagaucgcccccggccagaccggcaagaucgccgacuacaacuacaagcugcccgacgacuucaccggcugcgugaucgccuggaacagcaacaaccuggacagcaaggugggcggcaacuacaacuaccuguaccggcuguuccguaagagcaaccugaagccauucgagcgggacaucagcaccgagaucuaccaggccggcaacacccccugcaacgguguggagggcuuuaacugcuacuucccccugcagagcuacggcuuccagcccaccaacggcgugggcuaccagcccuaccgggugguggugcugagcuucgagcugcugcacgcccccgccaccgugugcggcccuaaaaagagcaccaaccuggugaagaacaagugcgugaauuucaacuucaacggccugaccggcaccggcgugcugaccgagagcaacaagaaguuccugcccuuccagcaguucggccgggauaucgccgacaccaccgacgcagugcgggacccccagacccuggagauccuggacaucaccccaugcagcuucggcggcgugagcgucaucacccccggcacaaacaccagcaaccagguggccgugcuguaccagggagugaacugcaccgaggugcccguggccauccacgccgaccagcugacccccaccuggcggguguacagcaccggcagcaacguguuccagacccgggccggcugccugaucggcgccgagcacgugaacaacagcuacgagugcgacauccccaucggcgcuggcaucugcgccuccuaccagacccagaccaacagcccccggcgggcccggagcguggccagccagagcaucaucgccuacaccaugagcuuaggcgccgagaacagcguggccuacagcaacaacagcaucgcgaucccuaccaacuucaccaucagcgugaccaccgagauacugcccgugagcaugaccaagaccagcguggacuguaccauguacaucugcggcgacagcaccgagugcagcaaccugcugcugcaguacggcagcuucugcacccagcugaaccgggcccugaccggcaucgccguggagcaggacaagaacacccaagagguguucgcccaggugaagcagaucuacaagacucccccaaucaaggacuucggcggcuucaacuucagccagauccugcccgaccccagcaagcccagcaagcggagcuucaucgaggaccugcuguucaacaaggugacccuggccgacgccggcuucaucaagcaguacggcgacugccugggggauaucgccgcucgggaccugaucugcgcccagaaguucaacggccugaccgugcugcccccucugcugaccgacgagaugaucgcccaguacaccagcgcccugcuugccggcaccaucaccagcggcuggaccuucggcgccggcgcagcccugcagauccccuucgccaugcagauggccuaccgguucaacggcaucggcgugacccagaacgugcuguacgagaaccagaagcugaucgccaaccaguucaacagcgccaucggcaagauccaggacagccugagcagcaccgccagcgcccugggcaagcugcaggacguggugaaccagaacgcucaggcccugaacacccuggugaagcagcugagcagcaauuucggcgccaucagcagcgugcugaacgacauccugucaaggcuggacaagguggaggccgaggugcagaucgaccggcugaucaccggccggcugcagagccugcagaccuacgugacccagcagcugauccgggccgccgagauccgggccagcgccaaccuggcagccaccaagaugagcgagugcgugcugggccagagcaagcggguggacuuuugcggcaagggcuaccaccugaugagcuucccccagagcgccccacacggcgugguguuccuccacgucacauacgugcccgcccaggagaagaacuucaccaccgcccccgccauuugccacgacggcaaggcucacuucccccgggagggaguguucgugagcaacggcacccacugguucgugacccagcggaacuucuacgagccccagaucaucaccaccgacaacaccuucgugagcggcaacugcgacguggugaucggcaucgugaacaacaccguguacgacccccugcagccugagcuggacagcuucaaggaggagcuggacaaguacuucaagaaccacaccagccccgacguggaucugggcgacaucagcggcaucaacgccagcguggugaacauccagaaggagaucgaccggcugaacgagguggccaagaaccugaacgagagccugaucgaccugcaggagcugggcaaguacgagcaguacaucaaguggcccugguacaucuggcugggcuucaucgccggccugaucgccaucgugauggugaccaucaugcugugcugcaugaccagcugcuguagcugccugaagggcugcugcagcugcggcagcugcugcaaguucgacgaggacgacagcgagccagugcugaagggcgugaagcugcacuacaccugaugacucgagcugguacugcaugcacgcaaugcuagcugccccuuucccguccuggguaccccgagucucccccgaccucgggucccagguaugcucccaccuccaccugccccacucaccaccucugcuaguuccagacaccucccaagcacgcagcaaugcagcucaaaacgcuuagccuagccacacccccacgggaaacagcagugauuaaccuuuagcaauaaacgaaaguuuaacuaagcuauacuaaccccaggguuggucaauuucgugccagccacacccuggagcuagcaaaaaaaaaaaaaaaaaaaaaaaaaaaaaagcauaugacuaaaaaaaaaaaaaaaaaaaaaaaaaaaaaaaaaaaaaaaaaaaaaaaaaaaaaaaaaaaaaaaaaaaaaa

SEQ ID NO: 26768 - RNA, 4283 nt, Artificial Sequence
  SARS-CoV-2/Wuhan/WIV05/2019__EPI_ISL_402128 spike protein mRNA gc (1-1273)(N501Y_D614G)
agaauaaacuaguauucuucugguccccacagacucagagagaacccgccaccauguucguguuccuggugcugcugccccuggugagcagccagugcgugaaccugaccacccggacccagcugcccccugccuacaccaacagcuucacccggggcguguacuaccccgacaagguguuccggagcagcgugcugcacagcacccaggaccuguuccugcccuucuucagcaacgugaccugguuccacgccauccacgugagcggcaccaacggcaccaagcgguucgacaacccagugcugcccuucaacgacggcguguacuucgccagcaccgagaagucaaacaucauccggggcuggaucuucggcaccacccuggacagcaagacacagagccugcugaucgugaacaacgccaccaacguggugaucaaggugugcgaguuucaguucugcaacgaccccuuccugggcguguacuaccacaagaacaacaagagcuggauggagagcgaguuccgggucuacagcagcgcuaacaauugcaccuucgaguacgugagccagcccuuccugauggaccucgagggcaagcagggcaacuucaagaaccugcgggaguucguguucaagaacaucgauggcuacuucaagaucuacagcaagcacacccccaucaaccuggugcgggaccugccccagggauucagcgcccuggagccucugguggaccugcccaucggcaucaacaucaccagguuccagacccugcuggcccugcaccggagcuaccugacccccggcgacagcagcagcggcuggaccgccggcgccgccgcauacuacgugggcuaccugcagccacggaccuuccugcugaaguacaacgagaacggcaccaucaccgacgccguggacugcgcccuggacccccugagcgagaccaagugcacccuaaagagcuucaccguggagaagggcaucuaccagaccagcaacuuccgggugcagcccacugagagcaucgugcgguuccccaacauuaccaaccugugucccuucggcgagguguucaacgccacccgguucgccagcguguacgccuggaaccggaagcggaucagcaacugcguggccgacuacagcgugcuguacaacagcgccagcuucagcaccuucaagugcuacggcgugagcccuaccaagcugaacgaccugugcuucaccaacguguacgcugacagcuucgugauccggggcgacgaggugcggcagaucgcccccggccagaccggcaagaucgccgacuacaacuacaagcugcccgacgacuucaccggcugcgugaucgccuggaacagcaacaaccuggacagcaaggugggcggcaacuacaacuaccuguaccggcuguuccguaagagcaaccugaagccauucgagcgggacaucagcaccgagaucuaccaggccggcagcacccccugcaacgguguggagggcuuuaacugcuacuucccccugcagagcuacggcuuccagcccaccuacggcgugggcuaccagcccuaccgggugguggugcugagcuucgagcugcugcacgcccccgccaccgugugcggcccuaaaaagagcaccaaccuggugaagaacaagugcgugaacuucaacuucaauggccugaccggcaccggcgugcugaccgagagcaacaagaaguuccugcccuuccagcaguucggccgggauaucgccgacaccaccgacgcagugcgggacccccagacccuggagauccuggacaucaccccaugcagcuucggcggcgugagcgucaucacccccggcacaaacaccagcaaccagguggccgugcuguaccagggagugaacugcaccgaggugcccguggccauccacgccgaccagcugacccccaccuggcggguguacagcaccggcagcaacguguuccagacccgggccggcugccugaucggcgccgagcacgugaacaacuccuacgagugcgacauccccaucggcgcuggcaucugcgccagcuaccagacccagaccaacagcccccggcgggcccggagcguggccagccagagcaucaucgccuacaccaugagcuuaggcgccgagaacagcguggccuacagcaacaacagcaucgcgaucccuaccaacuucaccaucagcgugaccaccgagauacugcccgugagcaugaccaagaccagcguggacuguaccauguacaucugcggcgacagcaccgagugcagcaaccugcugcugcaguacggcagcuucugcacccagcugaaccgggcccugaccggcaucgccguggagcaggacaagaacacccaagagguguucgcccaggugaagcagaucuacaagacucccccaaucaaggacuucggcggcuucaacuucagccagauccugcccgaccccagcaagcccagcaagcggagcuucaucgaggaccugcuguucaacaaggugacccuggccgacgccggcuucaucaagcaguacggcgacugccugggggauaucgccgcucgggaccugaucugcgcccagaaguucaacggccugaccgugcugcccccucugcugaccgacgagaugaucgcccaguacaccagcgcccugcuugccggcaccaucaccagcggcuggaccuucggcgccggcgcagcccugcagauccccuucgccaugcagauggccuaccgguucaacggcaucggcgugacccagaacgugcuguacgagaaccagaagcugaucgccaaccaguucaacagcgccaucggcaagauccaggacagccugagcagcaccgccagcgcccugggcaagcugcaggacguggugaaccagaacgcucaggcccugaacacccuggugaagcagcugagcagcaacuucggcgccaucagcucagugcugaacgacauccugagcaggcuggacaagguggaggccgaggugcagaucgaccggcugaucaccggccggcugcagagccugcagaccuacgugacccagcagcugauccgggccgccgagauccgggccagcgccaaucuggcagccaccaagaugagcgagugcgugcugggccagagcaagcggguggacuuuugcggcaagggcuaccaccugaugagcuucccccagagcgccccacacggcgugguguuccuccacgucacauacgugcccgcccaggagaagaacuucaccaccgcccccgccauuugccacgacggcaaggcucacuucccccgggagggaguguucgugagcaacggcacccacugguucgugacccagcggaacuucuacgagccccagaucaucaccaccgacaacaccuucgugagcggcaacugcgacguggugaucggcaucgugaacaacaccguguacgacccccugcagccugagcuggacagcuucaaggaggagcuggacaaguacuucaagaaccacaccagccccgacguggaucugggcgacaucagcggcaucaacgccagcguggugaacauccagaaggagaucgaccggcugaacgagguggccaagaaccugaacgagagccugaucgaccugcaggagcugggcaaguacgagcaguacaucaaguggcccugguacaucuggcugggcuucaucgccggccugaucgccaucgugauggugaccaucaugcugugcugcaugaccagcugcuguagcugccugaagggcugcugcagcugcggcagcugcugcaaguucgacgaggacgacagcgagccagugcugaagggcgugaagcugcacuacaccugaugacucgagcugguacugcaugcacgcaaugcuagcugccccuuucccguccuggguaccccgagucucccccgaccucgggucccagguaugcucccaccuccaccugccccacucaccaccucugcuaguuccagacaccucccaagcacgcagcaaugcagcucaaaacgcuuagccuagccacacccccacgggaaacagcagugauuaaccuuuagcaauaaacgaaaguuuaacuaagcuauacuaaccccaggguuggucaauuucgugccagccacacccuggagcuagcaaaaaaaaaaaaaaaaaaaaaaaaaaaaaagcauaugacuaaaaaaaaaaaaaaaaaaaaaaaaaaaaaaaaaaaaaaaaaaaaaaaaaaaaaaaaaaaaaaaaaaaaaa

SEQ ID NO: 26769 - RNA, 4277 nt, Artificial Sequence
  SARS-CoV-2/Wuhan/WIV05/2019__EPI_ISL_402128 spike protein mRNA gc (1-1273)(H69del_V70del_D614G)
agaauaaacuaguauucuucugguccccacagacucagagagaacccgccaccauguucguguuccuggugcugcugccccuggugagcagccagugcgugaaccugaccacccggacccagcugcccccugccuacaccaacagcuucacccggggcguguacuaccccgacaagguguuccggagcagcgugcugcacagcacccaggaccuguuccugcccuucuucagcaacgugaccugguuccacgccaucagcggcaccaacggcaccaagcgguucgacaacccagugcugcccuucaacgacggcguguacuucgccagcaccgagaagucaaacaucauccggggcuggaucuucggcaccacccuggacagcaagacacagagccugcugaucgugaacaacgccaccaacguggugaucaaggugugcgaguuucaguucugcaacgaccccuuccugggcguguacuaccacaagaacaacaagagcuggauggagagcgaguuccggguguacagcagcgcuaacaauugcaccuucgaguacgucagccagcccuuccugauggaccucgagggcaagcagggcaacuucaagaaccugcgggaguucguguucaagaacaucgauggcuacuucaagaucuacagcaagcacacccccaucaaccuggugcgggaccugccccagggauucagcgcccuggagccucugguggaccugcccaucggcaucaacaucaccagguuccagacccugcuggcccugcaccggagcuaccugacccccggcgacagcagcagcggcuggaccgccggcgccgccgcauacuacgugggcuaccugcagccacggaccuuccugcugaaguacaacgagaacggcaccaucaccgacgccguggacugcgcccuggacccccugagcgagaccaagugcacccuaaagagcuucaccguggagaagggcaucuaccagaccagcaacuuccgggugcagcccacugagagcaucgugcgguuccccaacauuaccaaccugugucccuucggcgagguguucaacgccacccgguucgccagcguguacgccuggaaccggaagcggaucagcaacugcguggccgacuacagcgugcuguacaacagcgccagcuucagcaccuucaagugcuacggcgugagcccuaccaagcugaacgaccugugcuucaccaacguguacgcugacagcuucgugauccggggcgacgaggugcggcagaucgcccccggccagaccggcaagaucgccgacuacaacuacaagcugcccgacgacuucaccggcugcgugaucgccuggaacagcaacaaccuggacagcaaggugggcggcaacuacaacuaccuguaccggcuguuccguaagagcaaccugaagccauucgagcgggacaucagcaccgagaucuaccaggccggcagcacccccugcaacgguguggagggcuuuaacugcuacuucccccugcagagcuacggcuuccagcccaccaacggcgugggcuaccagcccuaccgggugguggugcugagcuucgagcugcugcacgcccccgccaccgugugcggcccuaaaaagagcaccaaccuggugaagaacaagugcgugaacuucaauuucaacggccugaccggcaccggcgugcugaccgagagcaacaagaaguuccugcccuuccagcaguucggccgggauaucgccgacaccaccgacgcagugcgggacccccagacccuggagauccuggacaucaccccaugcagcuucggcggcgugagcgugaucacccccggcacaaacaccagcaaccaggucgccgugcuguaccagggagugaacugcaccgaggugcccguggccauccacgccgaccagcugacccccaccuggcggguguacagcaccggcagcaacguguuccagacccgggccggcugccugaucggcgccgagcacgugaacaacuccuacgagugcgacauccccaucggcgcuggcaucugcgccagcuaccagacccagaccaacagcccccggcgggcccggagcguggccagccagagcaucaucgccuacaccaugagcuuaggcgccgagaacagcguggccuacagcaacaacagcaucgcgaucccuaccaacuucaccaucagcgugaccaccgagauacugcccgugagcaugaccaagaccagcguggacuguaccauguacaucugcggcgacagcaccgagugcagcaaccugcugcugcaguacggcagcuucugcacccagcugaaccgggcccugaccggcaucgccguggagcaggacaagaacacccaagagguguucgcccaggugaagcagaucuacaagacucccccaaucaaggacuucggcggcuucaacuucagccagauccugcccgaccccagcaagcccagcaagcggagcuucaucgaggaccugcuguucaacaaggugacccuggccgacgccggcuucaucaagcaguacggcgacugccugggggauaucgccgcucgggaccugaucugcgcccagaaguucaacggccugaccgugcugcccccucugcugaccgacgagaugaucgcccaguacaccagcgcccugcuugccggcaccaucaccagcggcuggaccuucggcgccggcgcagcccugcagauccccuucgccaugcagauggccuaccgguucaacggcaucggcgugacccagaacgugcuguacgagaaccagaagcugaucgccaaccaguucaacagcgccaucggcaagauccaggacagccugagcagcaccgccagcgcccugggcaagcugcaggacguggugaaccagaacgcucaggcccugaacacccuggugaagcagcugagcagcaacuucggcgccaucagcucagugcugaaugacauccugagcaggcuggacaagguggaggccgaggugcagaucgaccggcugaucaccggccggcugcagagccugcagaccuacgugacccagcagcugauccgggccgccgagauccgggccagcgccaaccuggcagccaccaagaugagcgagugcgugcugggccagagcaagcggguggacuuuugcggcaagggcuaccaccugaugagcuucccccagagcgccccacacggcgugguguuccuccacgugacauacguccccgcccaggagaagaacuucaccaccgcccccgccauuugccacgacggcaaggcucacuucccccgggagggaguguucgugagcaacggcacccacugguucgugacccagcggaacuucuacgagccccagaucaucaccaccgacaacaccuucgugagcggcaacugcgacguggugaucggcaucgugaacaacaccguguacgacccccugcagccugagcuggacagcuucaaggaggagcuggacaaguacuucaagaaccacaccagccccgacguggaucugggcgacaucagcggcaucaacgccagcguggugaacauccagaaggagaucgaccggcugaacgagguggccaagaaccugaacgagagccugaucgaccugcaggagcugggcaaguacgagcaguacaucaaguggcccugguacaucuggcugggcuucaucgccggccugaucgccaucgugauggugaccaucaugcugugcugcaugaccagcugcuguagcugccugaagggcugcugcagcugcggcagcugcugcaaguucgacgaggacgacagcgagccagugcugaagggcgugaagcugcacuacaccugaugacucgagcugguacugcaugcacgcaaugcuagcugccccuuucccguccuggguaccccgagucucccccgaccucgggucccagguaugcucccaccuccaccugccccacucaccaccucugcuaguuccagacaccucccaagcacgcagcaaugcagcucaaaacgcuuagccuagccacacccccacgggaaacagcagugauuaaccuuuagcaauaaacgaaaguuuaacuaagcuauacuaaccccaggguuggucaauuucgugccagccacacccuggagcuagcaaaaaaaaaaaaaaaaaaaaaaaaaaaaaagcauaugacuaaaaaaaaaaaaaaaaaaaaaaaaaaaaaaaaaaaaaaaaaaaaaaaaaaaaaaaaaaaaaaaaaaaaaa

SEQ ID NO: 26770 - RNA, 4283 nt, Artificial Sequence
  SARS-CoV-2/Wuhan/WIV05/2019__EPI_ISL_402128 spike protein mRNA gc (1-1273)(Y453F_D614G)
agaauaaacuaguauucuucugguccccacagacucagagagaacccgccaccauguucguguuccuggugcugcugccccuggugagcagccagugcgugaaccugaccacccggacccagcugcccccugccuacaccaacagcuucacccggggcguguacuaccccgacaagguguuccggagcagcgugcugcacagcacccaggaccuguuccugcccuucuucagcaacgugaccugguuccacgccauccacgugagcggcaccaacggcaccaagcgguucgacaacccagugcugcccuucaacgacggcguguacuucgccagcaccgagaagucaaacaucauccggggcuggaucuucggcaccacccuggacagcaagacacagagccugcugaucgugaacaacgccaccaacguggugaucaaggugugcgaguuucaguucugcaacgaccccuuccugggcguguacuaccacaagaacaacaagagcuggauggagagcgaguuccgggucuacagcagcgcuaacaauugcaccuucgaguacgugagccagcccuuccugauggaccucgagggcaagcagggcaacuucaagaaccugcgggaguucguguucaagaacaucgauggcuacuucaagaucuacagcaagcacacccccaucaaccuggugcgggaccugccccagggauucagcgcccuggagccucugguggaccugcccaucggcaucaacaucaccagguuccagacccugcuggcccugcaccggagcuaccugacccccggcgacagcagcagcggcuggaccgccggcgccgccgcauacuacgugggcuaccugcagccacggaccuuccugcugaaguacaacgagaacggcaccaucaccgacgccguggacugcgcccuggacccccugagcgagaccaagugcacccuaaagagcuucaccguggagaagggcaucuaccagaccagcaacuuccgggugcagcccacugagagcaucgugcgguuccccaacauuaccaaccugugucccuucggcgagguguucaacgccacccgguucgccagcguguacgccuggaaccggaagcggaucagcaacugcguggccgacuacagcgugcuguacaacagcgccagcuucagcaccuucaagugcuacggcgugagcccuaccaagcugaacgaccugugcuucaccaacguguacgcugacagcuucgugauccggggcgacgaggugcggcagaucgcccccggccagaccggcaagaucgccgacuacaacuacaagcugcccgacgacuucaccggcugcgugaucgccuggaacagcaacaaccuggacagcaaggugggcggcaacuacaacuaccuguuccggcuguuccguaagagcaaccugaagccauuugagcgggacaucagcaccgagaucuaccaggccggcagcacccccugcaacgguguggagggcuucaacugcuacuucccccugcagagcuacggcuuccagcccaccaacggcgugggcuaccagcccuaccgggugguggugcugagcuucgagcugcugcacgcccccgccaccgugugcggcccuaaaaagagcaccaaccuggugaagaacaagugcgugaacuucaauuucaacggccugaccggcaccggcgugcugaccgagagcaacaagaaguuccugcccuuccagcaguucggccgggauaucgccgacaccaccgacgcagugcgggacccccagacccuggagauccuggacaucaccccaugcagcuucggcggcgugagcgucaucacccccggcacaaacaccagcaaccagguggccgugcuguaccagggagugaacugcaccgaggugcccguggccauccacgccgaccagcugacccccaccuggcggguguacagcaccggcagcaacguguuccagacccgggccggcugccugaucggcgccgagcacgugaacaacuccuacgagugcgacauccccaucggcgcuggcaucugcgccagcuaccagacccagaccaacagcccccggcgggcccggagcguggccagccagagcaucaucgccuacaccaugagcuuaggcgccgagaacagcguggccuacagcaacaacagcaucgcgaucccuaccaacuucaccaucagcgugaccaccgagauacugcccgugagcaugaccaagaccagcguggacuguaccauguacaucugcggcgacagcaccgagugcagcaaccugcugcugcaguacggcagcuucugcacccagcugaaccgggcccugaccggcaucgccguggagcaggacaagaacacccaagagguguucgcccaggugaagcagaucuacaagacucccccaaucaaggacuucggcggcuucaacuucagccagauccugcccgaccccagcaagcccagcaagcggagcuucaucgaggaccugcuguucaacaaggugacccuggccgacgccggcuucaucaagcaguacggcgacugccugggggauaucgccgcucgggaccugaucugcgcccagaaguucaacggccugaccgugcugcccccucugcugaccgacgagaugaucgcccaguacaccagcgcccugcuugccggcaccaucaccagcggcuggaccuucggcgccggcgcagcccugcagauccccuucgccaugcagauggccuaccgguucaacggcaucggcgugacccagaacgugcuguacgagaaccagaagcugaucgccaaccaguucaacagcgccaucggcaagauccaggacagccugagcagcaccgccagcgcccugggcaagcugcaggacguggugaaccagaacgcucaggcccugaacacccuggugaagcagcugagcagcaacuuuggcgccaucagcucagugcugaaugacauccugagcaggcuggacaagguggaggccgaggugcagaucgaccggcugaucaccggccggcugcagagccugcagaccuacgugacccagcagcugauccgggccgccgagauccgggccagcgccaaccuggcagccaccaagaugagcgagugcgugcugggccagagcaagcggguggacuucugcggcaagggcuaccaccugaugagcuucccccagagcgccccacacggcgugguguuccuccacgucacauacgugcccgcccaggagaagaacuucaccaccgcccccgccauuugccacgacggcaaggcucacuucccccgggagggaguguucgugagcaacggcacccacugguucgugacccagcggaacuucuacgagccccagaucaucaccaccgacaacaccuucgugagcggcaacugcgacguggugaucggcaucgugaacaacaccguguacgacccccugcagccugagcuggacagcuucaaggaggagcuggacaaguacuucaagaaccacaccagccccgacguggaucugggcgacaucagcggcaucaacgccagcguggugaacauccagaaggagaucgaccggcugaacgagguggccaagaaccugaacgagagccugaucgaccugcaggagcugggcaaguacgagcaguacaucaaguggcccugguacaucuggcugggcuucaucgccggccugaucgccaucgugauggugaccaucaugcugugcugcaugaccagcugcuguagcugccugaagggcugcugcagcugcggcagcugcugcaaguucgacgaggacgacagcgagccagugcugaagggcgugaagcugcacuacaccugaugacucgagcugguacugcaugcacgcaaugcuagcugccccuuucccguccuggguaccccgagucucccccgaccucgggucccagguaugcucccaccuccaccugccccacucaccaccucugcuaguuccagacaccucccaagcacgcagcaaugcagcucaaaacgcuuagccuagccacacccccacgggaaacagcagugauuaaccuuuagcaauaaacgaaaguuuaacuaagcuauacuaaccccaggguuggucaauuucgugccagccacacccuggagcuagcaaaaaaaaaaaaaaaaaaaaaaaaaaaaaagcauaugacuaaaaaaaaaaaaaaaaaaaaaaaaaaaaaaaaaaaaaaaaaaaaaaaaaaaaaaaaaaaaaaaaaaaaaa

SEQ ID NO: 26771 - RNA, 4283 nt, Artificial Sequence
  SARS-CoV-2/Wuhan/WIV05/2019__EPI_ISL_402128 spike protein mRNA gc (1-1273)(D614G_I692V)
agaauaaacuaguauucuucugguccccacagacucagagagaacccgccaccauguucguguuccuggugcugcugccccuggugagcagccagugcgugaaccugaccacccggacccagcugcccccugccuacaccaacagcuucacccggggcguguacuaccccgacaagguguuccggagcagcgugcugcacagcacccaggaccuguuccugcccuucuucagcaacgugaccugguuccacgccauccacgugagcggcaccaacggcaccaagcgguucgacaacccagugcugcccuucaacgacggcguguacuucgccagcaccgagaagucaaacaucauccggggcuggaucuucggcaccacccuggacagcaagacacagagccugcugaucgugaacaacgccaccaacguggugaucaaggugugcgaguuucaguucugcaacgaccccuuccugggcguguacuaccacaagaacaacaagagcuggauggagagcgaguuccgggucuacagcagcgcuaacaauugcaccuucgaguacgugagccagcccuuccugauggaccucgagggcaagcagggcaacuucaagaaccugcgggaguucguguucaagaacaucgauggcuacuucaagaucuacagcaagcacacccccaucaaccuggugcgggaccugccccagggauucagcgcccuggagccucugguggaccugcccaucggcaucaacaucaccagguuccagacccugcuggcccugcaccggagcuaccugacccccggcgacagcagcagcggcuggaccgccggcgccgccgcauacuacgugggcuaccugcagccacggaccuuccugcugaaguacaacgagaacggcaccaucaccgacgccguggacugcgcccuggacccccugagcgagaccaagugcacccuaaagagcuucaccguggagaagggcaucuaccagaccagcaacuuccgggugcagcccacugagagcaucgugcgguuccccaacauuaccaaccugugucccuucggcgagguguucaacgccacccgguucgccagcguguacgccuggaaccggaagcggaucagcaacugcguggccgacuacagcgugcuguacaacagcgccagcuucagcaccuucaagugcuacggcgugagcccuaccaagcugaacgaccugugcuucaccaacguguacgcugacagcuucgugauccggggcgacgaggugcggcagaucgcccccggccagaccggcaagaucgccgacuacaacuacaagcugcccgacgacuucaccggcugcgugaucgccuggaacagcaacaaccuggacagcaaggugggcggcaacuacaacuaccuguaccggcuguuccguaagagcaaccugaagccauucgagcgggacaucagcaccgagaucuaccaggccggcagcacccccugcaacgguguggagggcuuuaacugcuacuucccccugcagagcuacggcuuccagcccaccaacggcgugggcuaccagcccuaccgggugguggugcugagcuucgagcugcugcacgcccccgccaccgugugcggcccuaaaaagagcaccaaccuggugaagaacaagugcgugaacuucaauuucaacggccugaccggcaccggcgugcugaccgagagcaacaagaaguuccugcccuuccagcaguucggccgggauaucgccgacaccaccgacgcagugcgggacccccagacccuggagauccuggacaucaccccaugcagcuucggcggcgugagcgucaucacccccggcacaaacaccagcaaccagguggccgugcuguaccagggagugaacugcaccgaggugcccguggccauccacgccgaccagcugacccccaccuggcggguguacagcaccggcagcaacguguuccagacccgggccggcugccugaucggcgccgagcacgugaacaacuccuacgagugcgacauccccaucggcgcuggcaucugcgccagcuaccagacccagaccaacagcccccggcgggcccggagcguggccagccagagcgugaucgccuacaccaugagcuuaggcgccgagaacagcguggccuacagcaacaacagcaucgcgaucccuaccaacuucaccaucagcgugaccaccgagauccugcccgugagcaugaccaagaccagcguggacuguaccauguacauaugcggcgacagcaccgagugcagcaaccugcugcugcaguacggcagcuucugcacccagcugaaccgggcccugaccggcaucgccguggagcaggacaagaacacccaagagguguucgcccaggugaagcagaucuacaagacucccccaaucaaggacuucggcggcuucaacuucagccagauccugcccgaccccagcaagcccagcaagcggagcuucaucgaggaccugcuguucaacaaggugacccuggccgacgccggcuucaucaagcaguacggcgacugccugggggauaucgccgcucgggaccugaucugcgcccagaaguucaacggccugaccgugcugcccccucugcugaccgacgagaugaucgcccaguacaccagcgcccugcuugccggcaccaucaccagcggcuggaccuucggcgccggcgcagcccugcagauccccuucgccaugcagauggccuaccgguucaacggcaucggcgugacccagaacgugcuguacgagaaccagaagcugaucgccaaccaguucaacagcgccaucggcaagauccaggacagccugagcagcaccgccagcgcccugggcaagcugcaggacguggugaaccagaacgcucaggcccugaacacccuggugaagcagcugagcagcaacuucggcgccaucagcucagugcugaaugacauccugagcaggcuggacaagguggaggccgaggugcagaucgaccggcugaucaccggccggcugcagagccugcagaccuacgugacccagcagcugauccgggccgccgagauccgggccagcgccaaccuggcagccaccaagaugagcgagugcgugcugggccagagcaagcggguggacuuuugcggcaagggcuaccaccugaugagcuucccccagagcgccccacacggcguggucuuccuccacgugacauacgugcccgcccaggagaagaacuucaccaccgcccccgccaucugccacgacggcaaggcucacuucccccgggagggaguguucgugagcaacggcacccacugguucgugacccagcggaacuucuacgagccccagauuaucaccaccgacaacaccuucgugagcggcaacugcgacguggugaucggcaucgugaacaacaccguguacgacccccugcagccugagcuggacagcuucaaggaggagcuggacaaguacuucaagaaccacaccagccccgacguggaucugggcgacaucagcggcaucaacgccagcguggugaacauccagaaggagaucgaccggcugaacgagguggccaagaaccugaacgagagccugaucgaccugcaggagcugggcaaguacgagcaguacaucaaguggcccugguacaucuggcugggcuucaucgccggccugaucgccaucgugauggugaccaucaugcugugcugcaugaccagcugcuguagcugccugaagggcugcugcagcugcggcagcugcugcaaguucgacgaggacgacagcgagccagugcugaagggcgugaagcugcacuacaccugaugacucgagcugguacugcaugcacgcaaugcuagcugccccuuucccguccuggguaccccgagucucccccgaccucgggucccagguaugcucccaccuccaccugccccacucaccaccucugcuaguuccagacaccucccaagcacgcagcaaugcagcucaaaacgcuuagccuagccacacccccacgggaaacagcagugauuaaccuuuagcaauaaacgaaaguuuaacuaagcuauacuaaccccaggguuggucaauuucgugccagccacacccuggagcuagcaaaaaaaaaaaaaaaaaaaaaaaaaaaaaagcauaugacuaaaaaaaaaaaaaaaaaaaaaaaaaaaaaaaaaaaaaaaaaaaaaaaaaaaaaaaaaaaaaaaaaaaaaa

SEQ ID NO: 26772 - RNA, 4283 nt, Artificial Sequence
  SARS-CoV-2/Wuhan/WIV05/2019__EPI_ISL_402128 spike protein mRNA gc (1-1273)(D614G_M1229I)
agaauaaacuaguauucuucugguccccacagacucagagagaacccgccaccauguucguguuccuggugcugcugccccuggugagcagccagugcgugaaccugaccacccggacccagcugcccccugccuacaccaacagcuucacccggggcguguacuaccccgacaagguguuccggagcagcgugcugcacagcacccaggaccuguuccugcccuucuucagcaacgugaccugguuccacgccauccacgugagcggcaccaacggcaccaagcgguucgacaacccagugcugcccuucaacgacggcguguacuucgccagcaccgagaagucaaacaucauccggggcuggaucuucggcaccacccuggacagcaagacacagagccugcugaucgugaacaacgccaccaacguggugaucaaggugugcgaguuucaguucugcaacgaccccuuccugggcguguacuaccacaagaacaacaagagcuggauggagagcgaguuccgggucuacagcagcgcuaacaauugcaccuucgaguacgugagccagcccuuccugauggaccucgagggcaagcagggcaacuucaagaaccugcgggaguucguguucaagaacaucgauggcuacuucaagaucuacagcaagcacacccccaucaaccuggugcgggaccugccccagggauucagcgcccuggagccucugguggaccugcccaucggcaucaacaucaccagguuccagacccugcuggcccugcaccggagcuaccugacccccggcgacagcagcagcggcuggaccgccggcgccgccgcauacuacgugggcuaccugcagccacggaccuuccugcugaaguacaacgagaacggcaccaucaccgacgccguggacugcgcccuggacccccugagcgagaccaagugcacccuaaagagcuucaccguggagaagggcaucuaccagaccagcaacuuccgggugcagcccacugagagcaucgugcgguuccccaacauuaccaaccugugucccuucggcgagguguucaacgccacccgguucgccagcguguacgccuggaaccggaagcggaucagcaacugcguggccgacuacagcgugcuguacaacagcgccagcuucagcaccuucaagugcuacggcgugagcccuaccaagcugaacgaccugugcuucaccaacguguacgcugacagcuucgugauccggggcgacgaggugcggcagaucgcccccggccagaccggcaagaucgccgacuacaacuacaagcugcccgacgacuucaccggcugcgugaucgccuggaacagcaacaaccuggacagcaaggugggcggcaacuacaacuaccuguaccggcuguuccguaagagcaaccugaagccauucgagcgggacaucagcaccgagaucuaccaggccggcagcacccccugcaacgguguggagggcuuuaacugcuacuucccccugcagagcuacggcuuccagcccaccaacggcgugggcuaccagcccuaccgggugguggugcugagcuucgagcugcugcacgcccccgccaccgugugcggcccuaaaaagagcaccaaccuggugaagaacaagugcgugaacuucaauuucaacggccugaccggcaccggcgugcugaccgagagcaacaagaaguuccugcccuuccagcaguucggccgggauaucgccgacaccaccgacgcagugcgggacccccagacccuggagauccuggacaucaccccaugcagcuucggcggcgugagcgucaucacccccggcacaaacaccagcaaccagguggccgugcuguaccagggagugaacugcaccgaggugcccguggccauccacgccgaccagcugacccccaccuggcggguguacagcaccggcagcaacguguuccagacccgggccggcugccugaucggcgccgagcacgugaacaacuccuacgagugcgacauccccaucggcgcuggcaucugcgccagcuaccagacccagaccaacagcccccggcgggcccggagcguggccagccagagcaucaucgccuacaccaugagcuuaggcgccgagaacagcguggccuacagcaacaacagcaucgcgaucccuaccaacuucaccaucagcgugaccaccgagauacugcccgugagcaugaccaagaccagcguggacuguaccauguacaucugcggcgacagcaccgagugcagcaaccugcugcugcaguacggcagcuucugcacccagcugaaccgggcccugaccggcaucgccguggagcaggacaagaacacccaagagguguucgcccaggugaagcagaucuacaagacucccccaaucaaggacuucggcggcuucaacuucagccagauccugcccgaccccagcaagcccagcaagcggagcuucaucgaggaccugcuguucaacaaggugacccuggccgacgccggcuucaucaagcaguacggcgacugccugggggauaucgccgcucgggaccugaucugcgcccagaaguucaacggccugaccgugcugcccccucugcugaccgacgagaugaucgcccaguacaccagcgcccugcuugccggcaccaucaccagcggcuggaccuucggcgccggcgcagcccugcagauccccuucgccaugcagauggccuaccgguucaacggcaucggcgugacccagaacgugcuguacgagaaccagaagcugaucgccaaccaguucaacagcgccaucggcaagauccaggacagccugagcagcaccgccagcgcccugggcaagcugcaggacguggugaaccagaacgcucaggcccugaacacccuggugaagcagcugagcagcaacuucggcgccaucagcucagugcugaaugacauccugagcaggcuggacaagguggaggccgaggugcagaucgaccggcugaucaccggccggcugcagagccugcagaccuacgugacccagcagcugauccgggccgccgagauccgggccagcgccaaccuggcagccaccaagaugagcgagugcgugcugggccagagcaagcggguggacuuuugcggcaagggcuaccaccugaugagcuucccccagagcgccccacacggcgugguguuccuccacgucacauacgugcccgcccaggagaagaacuucaccaccgcccccgccauuugccacgacggcaaggcucacuucccccgggagggaguguucgugagcaacggcacccacugguucgugacccagcggaacuucuacgagccccagaucaucaccaccgacaacaccuucgugagcggcaacugcgacguggugaucggcaucgugaacaacaccguguacgacccccugcagccugagcuggacagcuucaaggaggagcuggacaaguacuucaagaaccacaccagccccgacguggaucugggcgacaucagcggcaucaacgccagcguggugaacauccagaaggagaucgaccggcugaacgagguggccaagaaccugaacgagagccugaucgaccugcaggagcugggcaaguacgagcaguacaucaaguggcccugguacaucuggcugggcuucaucgccggccugaucgccaucgugaucgugaccaucaugcugugcugcaugaccagcugcuguagcugccugaagggcugcugcagcugcggcagcugcugcaaguucgacgaggacgacagcgagccagugcugaagggcgugaagcugcacuacaccugaugacucgagcugguacugcaugcacgcaaugcuagcugccccuuucccguccuggguaccccgagucucccccgaccucgggucccagguaugcucccaccuccaccugccccacucaccaccucugcuaguuccagacaccucccaagcacgcagcaaugcagcucaaaacgcuuagccuagccacacccccacgggaaacagcagugauuaaccuuuagcaauaaacgaaaguuuaacuaagcuauacuaaccccaggguuggucaauuucgugccagccacacccuggagcuagcaaaaaaaaaaaaaaaaaaaaaaaaaaaaaagcauaugacuaaaaaaaaaaaaaaaaaaaaaaaaaaaaaaaaaaaaaaaaaaaaaaaaaaaaaaaaaaaaaaaaaaaaaa

SEQ ID NO: 26773 - RNA, 4277 nt, Artificial Sequence
  SARS-CoV-2/Wuhan/WIV05/2019__EPI_ISL_402128 spike protein mRNA gc (1-1273)(H69del_V70del_A222V_Y453F_S477N_D614G_I692V)
agaauaaacuaguauucuucugguccccacagacucagagagaacccgccaccauguucguguuccuggugcugcugccccuggugagcagccagugcgugaaccugaccacccggacccagcugcccccugccuacaccaacagcuucacccggggcguguacuaccccgacaagguguuccggagcagcgugcugcacagcacccaggaccuguuccugcccuucuucagcaacgugaccugguuccacgccaucagcggcaccaacggcaccaagcgguucgacaacccagugcugcccuucaacgacggcguguacuucgccagcaccgagaagucaaacaucauccggggcuggaucuucggcaccacccuggacagcaagacacagagccugcugaucgugaacaacgccaccaacguggugaucaaggugugcgaguuucaguucugcaacgaccccuuccugggcguguacuaccacaagaacaacaagagcuggauggagagcgaguuccggguguacagcagcgcuaacaauugcaccuucgaguacgucagccagcccuuccugauggaccucgagggcaagcagggcaacuucaagaaccugcgggaguucguguucaagaacaucgauggcuacuucaagaucuacagcaagcacacccccaucaaccuggugcgggaccugccccagggauucagcgugcuggagccucugguggaccugcccaucggcaucaacaucaccagguuccagacccugcuggcccugcaccggagcuaccugacccccggcgacagcagcagcggcuggaccgccggcgccgccgccuacuacgugggcuaccugcagccacggaccuuccugcugaaguacaacgagaacggcaccaucaccgacgcaguggacugcgcccuggacccccugagcgagaccaagugcacccuaaagagcuucaccguggagaagggcaucuaccagaccagcaacuuccgggugcagcccacugagagcaucgugcgguuccccaacauuaccaaccugugucccuucggcgagguguucaacgccacccgguucgccagcguguacgccuggaaccggaagcggaucagcaacugcguggccgacuacagcgugcuguacaacagcgccagcuucagcaccuucaagugcuacggcgugagcccuaccaagcugaacgaccugugcuucaccaacguguacgccgacagcuucgugauccggggcgacgaggugcggcagaucgcucccggccagaccggcaagaucgccgacuacaacuacaagcugcccgacgacuucaccggcugcgugaucgccuggaacagcaacaaccuggacagcaaggugggcggcaacuacaacuaccuguuccggcuguuccguaagagcaaccugaagccauuugagcgggacaucagcaccgagaucuaccaggccggcaacacccccugcaacgguguggagggcuucaacugcuacuucccccugcagagcuacggcuuccagcccaccaacggcgugggcuaccagcccuaccgggugguggugcugagcuucgagcugcugcacgcccccgccaccgugugcggcccuaaaaagagcaccaaccuggugaagaacaagugcgugaauuucaacuucaacggccugaccggcaccggcgugcugaccgagagcaacaagaaguuccugcccuuccagcaguucggccgggauaucgccgacaccaccgacgccgugcgggacccccagacccuggagauccuggacaucaccccaugcagcuucggcggcgugagcgucaucacccccggcacaaacaccagcaaccagguggcagugcuguaccagggagugaacugcaccgaggugcccguggccauccacgccgaccagcugacccccaccuggcggguguacagcaccggcagcaacguguuccagacccgggccggcugccugaucggcgccgagcacgugaacaacagcuacgagugcgacauccccaucggcgccggcaucugcgcuuccuaccagacccagaccaacagcccccggcgggcccggagcguggccagccagagcgugaucgccuacaccaugagcuuaggcgccgagaacagcguggccuacagcaacaacagcaucgccaucccuaccaacuucaccaucagcgugaccaccgagauccugcccgugagcaugaccaagaccagcguggacuguaccauguacauaugcggcgacagcaccgagugcagcaaccugcugcugcaguacggcagcuucugcacccagcugaaccgggcgcugaccggcaucgccguggagcaggacaagaacacccaagagguguucgcccaggugaagcagaucuacaagacucccccaaucaaggacuucggcggcuucaacuucagccagauccugcccgaccccagcaagcccagcaagcggagcuucaucgaggaccugcuguucaacaaggugacccuggccgacgccggcuucaucaagcaguacggcgacugccugggggauaucgccgcccgggaccugaucugcgcucagaaguucaacggccugaccgugcugcccccucugcugaccgacgagaugaucgcccaguacaccagcgcccugcuugccggcaccaucaccagcggcuggaccuucggcgccggcgccgcacugcagauccccuucgccaugcagauggccuaccgguucaacggcaucggcgugacccagaacgugcuguacgagaaccagaagcugaucgccaaccaguucaacagcgccaucggcaagauccaggacagccugagcagcaccgccagcgcccugggcaagcugcaggacguggugaaccagaacgcccaggcucugaacacccuggugaagcagcugagcagcaauuuuggcgccaucagcagcgugcugaacgacauccugucaaggcuggacaagguggaggccgaggugcagaucgaccggcugaucaccggccggcugcagagccugcagaccuacgugacccagcagcugauccgggccgccgagauccgggccagcgccaaccuggccgcaaccaagaugagcgagugcgugcugggccagagcaagcggguggacuucugcggcaagggcuaccaccugaugagcuucccccagagcgccccacacggcguggucuuccuccacgugacauacgugcccgcccaggagaagaacuucaccaccgcccccgccaucugccacgacggcaaggcccacuucccccgggagggaguguucgugagcaacggcacccacugguucgugacccagcggaacuucuacgagccccagauuaucaccaccgacaacaccuucgugagcggcaacugcgacguggugaucggcaucgugaacaacaccguguacgacccccugcagccugagcuggacagcuucaaggaggagcuggacaaguacuucaagaaccacaccagccccgacguggaucugggcgacaucagcggcaucaacgcuagcguggugaacauccagaaggagaucgaccggcugaacgagguggccaagaaccugaacgagagccugaucgaccugcaggagcugggcaaguacgagcaguacaucaaguggcccugguacaucuggcugggcuucaucgccggccugaucgccaucgugauggugaccaucaugcugugcugcaugaccagcugcuguagcugccugaagggcugcugcagcugcggcagcugcugcaaguucgacgaggacgacagcgagccagugcugaagggcgugaagcugcacuacaccugaugacucgagcugguacugcaugcacgcaaugcuagcugccccuuucccguccuggguaccccgagucucccccgaccucgggucccagguaugcucccaccuccaccugccccacucaccaccucugcuaguuccagacaccucccaagcacgcagcaaugcagcucaaaacgcuuagccuagccacacccccacgggaaacagcagugauuaaccuuuagcaauaaacgaaaguuuaacuaagcuauacuaaccccaggguuggucaauuucgugccagccacacccuggagcuagcaaaaaaaaaaaaaaaaaaaaaaaaaaaaaagcauaugacuaaaaaaaaaaaaaaaaaaaaaaaaaaaaaaaaaaaaaaaaaaaaaaaaaaaaaaaaaaaaaaaaaaaaaa

SEQ ID NO: 26774 - RNA, 4277 nt, Artificial Sequence
  SARS-CoV-2/Wuhan/WIV05/2019__EPI_ISL_402128 spike protein mRNA gc (1-1273)(H69del_V70del_Y453F_D614G_I692V_M1229I)
agaauaaacuaguauucuucugguccccacagacucagagagaacccgccaccauguucguguuccuggugcugcugccccuggugagcagccagugcgugaaccugaccacccggacccagcugcccccugccuacaccaacagcuucacccggggcguguacuaccccgacaagguguuccggagcagcgugcugcacagcacccaggaccuguuccugcccuucuucagcaacgugaccugguuccacgccaucagcggcaccaacggcaccaagcgguucgacaacccagugcugcccuucaacgacggcguguacuucgccagcaccgagaagucaaacaucauccggggcuggaucuucggcaccacccuggacagcaagacacagagccugcugaucgugaacaacgccaccaacguggugaucaaggugugcgaguuucaguucugcaacgaccccuuccugggcguguacuaccacaagaacaacaagagcuggauggagagcgaguuccggguguacagcagcgcuaacaauugcaccuucgaguacgucagccagcccuuccugauggaccucgagggcaagcagggcaacuucaagaaccugcgggaguucguguucaagaacaucgauggcuacuucaagaucuacagcaagcacacccccaucaaccuggugcgggaccugccccagggauucagcgcccuggagccucugguggaccugcccaucggcaucaacaucaccagguuccagacccugcuggcccugcaccggagcuaccugacccccggcgacagcagcagcggcuggaccgccggcgccgccgcauacuacgugggcuaccugcagccacggaccuuccugcugaaguacaacgagaacggcaccaucaccgacgccguggacugcgcccuggacccccugagcgagaccaagugcacccuaaagagcuucaccguggagaagggcaucuaccagaccagcaacuuccgggugcagcccacugagagcaucgugcgguuccccaacauuaccaaccugugucccuucggcgagguguucaacgccacccgguucgccagcguguacgccuggaaccggaagcggaucagcaacugcguggccgacuacagcgugcuguacaacagcgccagcuucagcaccuucaagugcuacggcgugagcccuaccaagcugaacgaccugugcuucaccaacguguacgcugacagcuucgugauccggggcgacgaggugcggcagaucgcccccggccagaccggcaagaucgccgacuacaacuacaagcugcccgacgacuucaccggcugcgugaucgccuggaacagcaacaaccuggacagcaaggugggcggcaacuacaacuaccuguuccggcuguuccguaagagcaaccugaagccauuugagcgggacaucagcaccgagaucuaccaggccggcagcacccccugcaacgguguggagggcuucaacugcuacuucccccugcagagcuacggcuuccagcccaccaacggcgugggcuaccagcccuaccgggugguggugcugagcuucgagcugcugcacgcccccgccaccgugugcggcccuaaaaagagcaccaaccuggugaagaacaagugcgugaacuucaauuucaacggccugaccggcaccggcgugcugaccgagagcaacaagaaguuccugcccuuccagcaguucggccgggauaucgccgacaccaccgacgcagugcgggacccccagacccuggagauccuggacaucaccccaugcagcuucggcggcgugagcgugaucacccccggcacaaacaccagcaaccaggucgccgugcuguaccagggagugaacugcaccgaggugcccguggccauccacgccgaccagcugacccccaccuggcggguguacagcaccggcagcaacguguuccagacccgggccggcugccugaucggcgccgagcacgugaacaacuccuacgagugcgacauccccaucggcgcuggcaucugcgccagcuaccagacccagaccaacagcccccggcgggcccggagcguggccagccagagcgugaucgccuacaccaugagcuuaggcgccgagaacagcguggccuacagcaacaacagcaucgcgaucccuaccaacuucaccaucagcgugaccaccgagauccugcccgugagcaugaccaagaccagcguggacuguaccauguacauaugcggcgacagcaccgagugcagcaaccugcugcugcaguacggcagcuucugcacccagcugaaccgggcccugaccggcaucgccguggagcaggacaagaacacccaagagguguucgcccaggugaagcagaucuacaagacucccccaaucaaggacuucggcggcuucaacuucagccagauccugcccgaccccagcaagcccagcaagcggagcuucaucgaggaccugcuguucaacaaggugacccuggccgacgccggcuucaucaagcaguacggcgacugccugggggauaucgccgcucgggaccugaucugcgcccagaaguucaacggccugaccgugcugcccccucugcugaccgacgagaugaucgcccaguacaccagcgcccugcuugccggcaccaucaccagcggcuggaccuucggcgccggcgcagcccugcagauccccuucgccaugcagauggccuaccgguucaacggcaucggcgugacccagaacgugcuguacgagaaccagaagcugaucgccaaccaguucaacagcgccaucggcaagauccaggacagccugagcagcaccgccagcgcccugggcaagcugcaggacguggugaaccagaacgcucaggcccugaacacccuggugaagcagcugagcagcaacuuuggcgccaucagcucagugcugaaugacauccugagcaggcuggacaagguggaggccgaggugcagaucgaccggcugaucaccggccggcugcagagccugcagaccuacgugacccagcagcugauccgggccgccgagauccgggccagcgccaaccuggcagccaccaagaugagcgagugcgugcugggccagagcaagcggguggacuucugcggcaagggcuaccaccugaugagcuucccccagagcgccccacacggcgugguguuccuccacgucacauacgugcccgcccaggagaagaacuucaccaccgcccccgccaucugccacgacggcaaggcucacuucccccgggagggaguguucgugagcaacggcacccacugguucgugacccagcggaacuucuacgagccccagauuaucaccaccgacaacaccuucgugagcggcaacugcgacguggugaucggcaucgugaacaacaccguguacgacccccugcagccugagcuggacagcuucaaggaggagcuggacaaguacuucaagaaccacaccagccccgacguggaucugggcgacaucagcggcaucaacgccagcguggugaacauccagaaggagaucgaccggcugaacgagguggccaagaaccugaacgagagccugaucgaccugcaggagcugggcaaguacgagcaguacaucaaguggcccugguacaucuggcugggcuucaucgccggccugaucgccaucgugaucgugaccaucaugcugugcugcaugaccagcugcuguagcugccugaagggcugcugcagcugcggcagcugcugcaaguucgacgaggacgacagcgagccagugcugaagggcgugaagcugcacuacaccugaugacucgagcugguacugcaugcacgcaaugcuagcugccccuuucccguccuggguaccccgagucucccccgaccucgggucccagguaugcucccaccuccaccugccccacucaccaccucugcuaguuccagacaccucccaagcacgcagcaaugcagcucaaaacgcuuagccuagccacacccccacgggaaacagcagugauuaaccuuuagcaauaaacgaaaguuuaacuaagcuauacuaaccccaggguuggucaauuucgugccagccacacccuggagcuagcaaaaaaaaaaaaaaaaaaaaaaaaaaaaaagcauaugacuaaaaaaaaaaaaaaaaaaaaaaaaaaaaaaaaaaaaaaaaaaaaaaaaaaaaaaaaaaaaaaaaaaaaaa

SEQ ID NO: 26775 - RNA, 4274 nt, Artificial Sequence
  SARS-CoV-2/Wuhan/WIV05/2019__EPI_ISL_402128 spike protein mRNA gc (1-1273)(H69del_V70del_Y144del_N501Y_A570D_D614G_P681H_T716I_S982 A_D1118H)
agaauaaacuaguauucuucugguccccacagacucagagagaacccgccaccauguucguguuccuggugcugcugccccuggugagcagccagugcgugaaccugaccacccggacccagcugcccccugccuacaccaacagcuucacccggggcguguacuaccccgacaagguguuccggagcagcgugcugcacagcacccaggaccuguuccugcccuucuucagcaacgugaccugguuccacgccaucagcggcaccaacggcaccaagcgguucgacaacccagugcugcccuucaacgacggcguguacuucgccagcaccgagaagucaaacaucauccggggcuggaucuucggcaccacccuggacagcaagacacagagccugcugaucgugaacaacgccaccaacguggugaucaaggugugcgaguuucaguucugcaacgaccccuuccugggcguguaccacaagaacaacaagagcuggauggagagcgaguuccggguguacagcagcgcuaacaauugcaccuucgaguacgucagccagcccuuccugauggaccucgagggcaagcagggcaacuucaagaaccugcgggaguucguguucaagaacaucgauggcuacuucaagaucuacagcaagcacacccccaucaaccuggugcgggaccugccccagggauucagcgcccuggagccucugguggaccugcccaucggcaucaacaucaccagguuccagacccugcuggcccugcaccggagcuaccugacccccggcgacagcagcagcggcuggaccgccggcgccgccgcauacuacgugggcuaccugcagccacggaccuuccugcugaaguacaacgagaacggcaccaucaccgacgccguggacugcgcccuggacccccugagcgagaccaagugcacccuaaagagcuucaccguggagaagggcaucuaccagaccagcaacuuccgggugcagcccacugagagcaucgugcgguuccccaacauuaccaaccugugucccuucggcgagguguucaacgccacccgguucgccagcguguacgccuggaaccggaagcggaucagcaacugcguggccgacuacagcgugcuguacaacagcgccagcuucagcaccuucaagugcuacggcgugagcccuaccaagcugaacgaccugugcuucaccaacguguacgcugacagcuucgugauccggggcgacgaggugcggcagaucgcccccggccagaccggcaagaucgccgacuacaacuacaagcugcccgacgacuucaccggcugcgugaucgccuggaacagcaacaaccuggacagcaaggugggcggcaacuacaacuaccuguaccggcuguuccguaagagcaaccugaagccauucgagcgggacaucagcaccgagaucuaccaggccggcagcacccccugcaacgguguggagggcuuuaacugcuacuucccccugcagagcuacggcuuccagcccaccuacggcgugggcuaccagcccuaccgggugguggugcugagcuucgagcugcugcacgcccccgccaccgugugcggcccuaaaaagagcaccaaccuggugaagaacaagugcgugaacuucaacuucaauggccugaccggcaccggcgugcugaccgagagcaacaagaaguuccugcccuuccagcaguucggccgggauaucgacgacaccaccgacgccgugcgggacccccagacccuggagauccuggacaucaccccaugcagcuucggcggcgugagcgugaucacccccggcacaaacaccagcaaccaggucgcagugcuguaccagggagugaacugcaccgaggugcccguggccauccacgccgaccagcugacccccaccuggcggguguacagcaccggcagcaacguguuccagacccgggccggcugccugaucggcgccgagcacgugaacaacuccuacgagugcgacauccccaucggcgccggcaucugcgcuagcuaccagacccagaccaacagccaccggcgggcccggagcguggccagccagagcaucaucgccuacaccaugagcuuaggcgccgagaacagcguggccuacagcaacaacagcaucgccauccccaucaacuucaccauaagcgugaccaccgagauccugccugugagcaugaccaagaccagcguggacuguaccauguacaucugcggcgacagcaccgagugcagcaaccugcugcugcaguacggcagcuucugcacccagcugaaccgggcgcugaccggcaucgccguggagcaggacaagaacacccaagagguguucgcccaggugaagcagaucuacaagaccccacccaucaaggacuucggcggcuucaacuucagccagauccugcccgaccccagcaagcccagcaagcggagcuucaucgaggaccugcuguucaacaaggugacucuggccgacgccggcuucaucaagcaguacggcgauugccugggggacaucgccgcccgggaccugaucugcgcucagaaguucaacggccugaccgugcugccuccccugcugaccgacgagaugaucgcccaguacaccagcgcccugcuugccggcaccaucaccagcggcuggaccuucggcgccggcgccgcacugcagauccccuucgccaugcagauggccuaccgguucaacggcaucggcgugacccagaacgugcuguacgagaaccagaagcugaucgccaaccaguucaacagcgccaucggcaagauccaggacagccugagcagcaccgccagcgcccugggcaagcugcaggacguggugaaccagaacgcccaggcucugaacacccuggugaagcagcugagcagcaacuucggcgccaucagcucagugcugaacgacauccuggccaggcuggacaagguggaggccgaggugcagaucgaccggcugaucaccggccggcugcagagccugcagaccuacgugacccagcagcugauccgggccgccgagauucgggccagcgccaaucuggcagccaccaagaugagcgagugcgugcugggccagagcaagcggguggacuuuugcggcaagggcuaccaccugaugagcuucccccagagcgcuccccacggcgugguguuccuccacgugaccuacgucccagcccaggagaagaacuucacaaccgcccccgccaucugccacgacggcaaggcccacuucccccgggagggaguguucgugagcaacggcacccacugguucgugacccagcggaacuucuacgagccccagaucaucaccacccacaacaccuucgugagcggcaacugcgacguggugaucggcaucgugaacaacaccguguacgacccccugcagcccgagcuggacagcuucaaggaggagcuggacaaguacuucaagaaccacaccagcccugacguggaucugggcgacaucagcggcaucaacgccagcguggugaacauccagaaggagaucgaccggcugaacgagguggccaagaaccugaacgagagccugaucgaccugcaggagcugggcaaguacgagcaguacaucaaguggcccugguacaucuggcugggcuucaucgccggccugaucgccaucgugauggugaccaucaugcugugcugcaugaccagcugcuguagcugccugaagggcugcugcagcugcggcagcugcugcaaguucgacgaggacgacagcgagcccgugcugaagggcgugaagcugcacuacaccugaugacucgagcugguacugcaugcacgcaaugcuagcugccccuuucccguccuggguaccccgagucucccccgaccucgggucccagguaugcucccaccuccaccugccccacucaccaccucugcuaguuccagacaccucccaagcacgcagcaaugcagcucaaaacgcuuagccuagccacacccccacgggaaacagcagugauuaaccuuuagcaauaaacgaaaguuuaacuaagcuauacuaaccccaggguuggucaauuucgugccagccacacccuggagcuagcaaaaaaaaaaaaaaaaaaaaaaaaaaaaaagcauaugacuaaaaaaaaaaaaaaaaaaaaaaaaaaaaaaaaaaaaaaaaaaaaaaaaaaaaaaaaaaaaaaaaaaaaaa

SEQ ID NO: 26776 - RNA, 4283 nt, Artificial Sequence
  SARS-CoV-2/Wuhan/WIV05/2019__EPI_ISL_402128 spike protein mRNA gc (1-1273)(K417N_E484K_N501Y_D614G)
agaauaaacuaguauucuucugguccccacagacucagagagaacccgccaccauguucguguuccuggugcugcugccccuggugagcagccagugcgugaaccugaccacccggacccagcugcccccugccuacaccaacagcuucacccggggcguguacuaccccgacaagguguuccggagcagcgugcugcacagcacccaggaccuguuccugcccuucuucagcaacgugaccugguuccacgccauccacgugagcggcaccaacggcaccaagcgguucgacaacccagugcugcccuucaacgacggcguguacuucgccagcaccgagaagucaaacaucauccggggcuggaucuucggcaccacccuggacagcaagacacagagccugcugaucgugaacaacgccaccaacguggugaucaaggugugcgaguuucaguucugcaacgaccccuuccugggcguguacuaccacaagaacaacaagagcuggauggagagcgaguuccgggucuacagcagcgcuaacaauugcaccuucgaguacgugagccagcccuuccugauggaccucgagggcaagcagggcaacuucaagaaccugcgggaguucguguucaagaacaucgauggcuacuucaagaucuacagcaagcacacccccaucaaccuggugcgggaccugccccagggauucagcgcccuggagccucugguggaccugcccaucggcaucaacaucaccagguuccagacccugcuggcccugcaccggagcuaccugacccccggcgacagcagcagcggcuggaccgccggcgccgccgcauacuacgugggcuaccugcagccacggaccuuccugcugaaguacaacgagaacggcaccaucaccgacgccguggacugcgcccuggacccccugagcgagaccaagugcacccuaaagagcuucaccguggagaagggcaucuaccagaccagcaacuuccgggugcagcccacugagagcaucgugcgguuccccaacauuaccaaccugugucccuucggcgagguguucaacgccacccgguucgccagcguguacgccuggaaccggaagcggaucagcaacugcguggccgacuacagcgugcuguacaacagcgccagcuucagcaccuucaagugcuacggcgugagcccuaccaagcugaacgaccugugcuucaccaacguguacgcugacagcuucgugauccggggcgacgaggugcggcagaucgcccccggccagaccggcaacaucgccgacuacaacuacaagcugcccgacgacuucaccggcugcgugaucgccuggaacagcaacaaccuggacagcaaggugggcggcaacuacaacuaccuguaccggcuguuccguaagagcaaccugaagccauucgagcgggacaucagcaccgagaucuaccaggccggcagcacccccugcaacggugugaagggcuuuaacugcuacuucccccugcagagcuacggcuuccagcccaccuacggcgugggcuaccagcccuaccgggugguggugcugagcuucgagcugcugcacgcccccgccaccgugugcggcccuaaaaagagcaccaaccuggugaagaacaagugcgugaacuucaauuucaacggccugaccggcaccggcgugcugaccgagagcaacaagaaguuccugcccuuccagcaguucggccgggauaucgccgacaccaccgacgcagugcgggacccccagacccuggagauccuggacaucaccccaugcagcuucggcggcgugagcgucaucacccccggcacaaacaccagcaaccagguggccgugcuguaccagggagugaacugcaccgaggugcccguggccauccacgccgaccagcugacccccaccuggcggguguacagcaccggcagcaacguguuccagacccgggccggcugccugaucggcgccgagcacgugaacaacuccuacgagugcgacauccccaucggcgcuggcaucugcgccagcuaccagacccagaccaacagcccccggcgggcccggagcguggccagccagagcaucaucgccuacaccaugagcuuaggcgccgagaacagcguggccuacagcaacaacagcaucgcgaucccuaccaacuucaccaucagcgugaccaccgagauacugcccgugagcaugaccaagaccagcguggacuguaccauguacaucugcggcgacagcaccgagugcagcaaccugcugcugcaguacggcagcuucugcacccagcugaaccgggcccugaccggcaucgccguggagcaggacaagaacacccaagagguguucgcccaggugaagcagaucuacaagacucccccaaucaaggacuucggcggcuucaacuucagccagauccugcccgaccccagcaagcccagcaagcggagcuucaucgaggaccugcuguucaacaaggugacccuggccgacgccggcuucaucaagcaguacggcgacugccugggggauaucgccgcucgggaccugaucugcgcccagaaguucaacggccugaccgugcugcccccucugcugaccgacgagaugaucgcccaguacaccagcgcccugcuugccggcaccaucaccagcggcuggaccuucggcgccggcgcagcccugcagauccccuucgccaugcagauggccuaccgguucaacggcaucggcgugacccagaacgugcuguacgagaaccagaagcugaucgccaaccaguucaacagcgccaucggcaagauccaggacagccugagcagcaccgccagcgcccugggcaagcugcaggacguggugaaccagaacgcucaggcccugaacacccuggugaagcagcugagcagcaacuucggcgccaucagcucagugcugaaugacauccugagcaggcuggacaagguggaggccgaggugcagaucgaccggcugaucaccggccggcugcagagccugcagaccuacgugacccagcagcugauccgggccgccgagauccgggccagcgccaaccuggcagccaccaagaugagcgagugcgugcugggccagagcaagcggguggacuuuugcggcaagggcuaccaccugaugagcuucccccagagcgccccacacggcgugguguuccuccacgucacauacgugcccgcccaggagaagaacuucaccaccgcccccgccauuugccacgacggcaaggcucacuucccccgggagggaguguucgugagcaacggcacccacugguucgugacccagcggaacuucuacgagccccagaucaucaccaccgacaacaccuucgugagcggcaacugcgacguggugaucggcaucgugaacaacaccguguacgacccccugcagccugagcuggacagcuucaaggaggagcuggacaaguacuucaagaaccacaccagccccgacguggaucugggcgacaucagcggcaucaacgccagcguggugaacauccagaaggagaucgaccggcugaacgagguggccaagaaccugaacgagagccugaucgaccugcaggagcugggcaaguacgagcaguacaucaaguggcccugguacaucuggcugggcuucaucgccggccugaucgccaucgugauggugaccaucaugcugugcugcaugaccagcugcuguagcugccugaagggcugcugcagcugcggcagcugcugcaaguucgacgaggacgacagcgagccagugcugaagggcgugaagcugcacuacaccugaugacucgagcugguacugcaugcacgcaaugcuagcugccccuuucccguccuggguaccccgagucucccccgaccucgggucccagguaugcucccaccuccaccugccccacucaccaccucugcuaguuccagacaccucccaagcacgcagcaaugcagcucaaaacgcuuagccuagccacacccccacgggaaacagcagugauuaaccuuuagcaauaaacgaaaguuuaacuaagcuauacuaaccccaggguuggucaauuucgugccagccacacccuggagcuagcaaaaaaaaaaaaaaaaaaaaaaaaaaaaaagcauaugacuaaaaaaaaaaaaaaaaaaaaaaaaaaaaaaaaaaaaaaaaaaaaaaaaaaaaaaaaaaaaaaaaaaaaaa

SEQ ID NO: 26777 - RNA, 4274 nt, Artificial Sequence
  SARS-CoV-2/Wuhan/WIV05/2019__EPI_ISL_402128 spike protein mRNA gc (1-1273)(L18F_D80A_D215G_L242del_A243del_L244del_R246I_K417N_E484 K_N501Y_D614G_A701V)
agaauaaacuaguauucuucugguccccacagacucagagagaacccgccaccauguucguguuccuggugcugcugccccuggugagcagccagugcgugaacuucaccacccggacccagcugcccccugccuacaccaacagcuucacccggggcguguacuaccccgacaagguguuccggagcagcgugcugcacagcacccaggaccuguuccugcccuucuucagcaacgugaccugguuccacgccauccacgugagcggcaccaacggcaccaagcgguucgccaacccagugcugcccuucaacgacggcguguacuucgccagcaccgagaagucaaacaucauccggggcuggaucuuuggcaccacccuggacagcaagacacagagccugcugaucgugaacaacgcuaccaacguggugaucaaggugugcgaguuccaguucugcaacgaccccuuccugggcguguacuaccacaagaacaacaagagcuggauggagagcgaguuccgggucuacagcagcgccaacaauugcaccuucgaguacgugagccagcccuuccugauggaccuggagggcaagcagggcaacuucaagaaccuccgggaguucguguucaagaacaucgacggcuacuucaagaucuacagcaagcacacccccaucaaccuggugcggggacugccccagggcuucagcgcccuggagccucugguggaucugcccaucggcaucaacaucaccagguuccagacccugcacaucagcuaccugacccccggcgacagcagcagcggcuggaccgccggcgccgccgcauacuacgugggcuaccugcagccacggaccuuccugcugaaguacaacgagaacggcaccaucaccgacgccguggacugcgcccuggacccccugagcgagaccaagugcacccuuaagagcuucaccguggagaagggcaucuaccagaccagcaacuuccgggugcagcccacugagagcauugugcgguuccccaacaucaccaaccugugucccuucggcgagguguucaacgccacccgguucgccagcguguacgccuggaaccggaagcggaucagcaacugcguggccgacuacagcgugcuguacaacagcgccagcuucagcaccuucaagugcuacggcgugagcccuaccaagcugaacgaccugugcuucaccaacguguacgcugacagcuucgugauccggggcgacgaggugcggcagaucgcccccggccagaccggcaacaucgccgacuacaacuacaagcugcccgacgacuucaccggcugcgugaucgccuggaacagcaacaaccuggacagcaaggugggcggcaacuacaacuaccuguaccggcuauuccguaagagcaaccugaagccauuugagcgggacaucagcaccgagaucuaccaggccgguagcacccccugcaacggcgugaagggcuucaacugcuacuucccccugcagagcuacggcuuccagcccaccuacggcgugggcuaccagcccuaccgggugguggugcugagcuucgagcugcugcacgcccccgccaccgugugcggcccuaaaaagagcaccaaccuggugaagaacaagugcgugaacuucaauuucaacggccugaccggcaccggcgugcugaccgagagcaacaagaaguuccugcccuuccagcaguucggccgggacaucgccgacaccaccgaugcagugcgggacccccagacccuggagauccuggacaucaccccaugcagcuucggcggcgugagcgucaucacccccggaacaaacaccagcaaccagguggccgugcuguaccagggcgugaacugcaccgaggugcccguggccauccacgccgaccagcugacccccaccuggcggguguacagcaccggcagcaacguguuccagacccgggccggcugccugaucggcgccgagcacgugaacaacuccuacgagugcgacauccccaucggcgcuggcaucugcgccagcuaccagacccagaccaacagcccccggcgggcccggagcguggccagccagagcaucaucgccuacaccaugagccugggcguggagaacagcguggccuacagcaacaacagcaucgccaucccuaccaacuucaccauaagcgugaccaccgagauccugcccgugagcaugaccaagaccagcguggacuguaccauguacaucugcggcgacagcaccgagugcagcaaccuguuacugcaguacggcagcuucugcacccagcugaaccgggcgcugaccggcaucgccguggagcaggacaagaacacccaagagguguucgcccaggugaagcagaucuacaagacucccccaaucaaggacuucggcggcuucaacuucagccagauccugcccgaccccagcaagcccagcaagcggagcuucaucgaggaccugcuguucaacaaggugacccuggccgacgccggcuucaucaagcaguacggggacugccugggcgacaucgccgcccgggaccugaucugcgcucagaaguucaacggccugaccgugcugcccccucugcugaccgaugagaugaucgcccaguacaccagcgcccugcuggccggcaccaucaccagcggcuggaccuucggcgccggcgccgcacugcagauccccuucgccaugcagauggccuaccgguucaacggcaucggcgugacccagaacgugcuguacgagaaccagaagcugaucgccaaccaguucaacagcgccaucggcaagauccaggacagccugagcagcaccgccagcgcccugggcaagcugcaggacguggugaaccagaacgcccaggcucugaacacccuggugaagcagcugagcagcaacuuuggcgccaucagcucagugcugaaugacauccugagccggcuggacaagguggaggccgaggugcagaucgacaggcugaucaccggccggcugcagagccugcagaccuacgugacccagcagcugauccgggccgccgagauucgggccagcgccaaccuggccgcaaccaagaugagcgagugcgugcugggccagagcaagcggguggacuucugcggcaagggcuaccaccugaugagcuucccccagagcgccccacacggcguggucuuccugcacgugacauacgugcccgcccaggagaagaacuucaccaccgcccccgccaucugccacgacggaaaggcccacuucccccgggagggcguguucgugagcaacggcacccacugguucgugacccagcggaacuucuacgagccccagaucaucaccaccgacaacaccuucgugagcggcaacugcgacguggugaucggcaucgugaacaacaccguguacgacccccugcagccugagcuggacagcuucaaggaggagcucgacaaguacuucaagaaccacaccagccccgacguggaccugggcgacaucagcggcaucaacgcuagcguggugaacauccagaaggagaucgaucggcugaacgagguggccaagaaccugaacgagagccugaucgaccugcaggagcugggcaaguacgagcaguacaucaaguggcccugguacaucuggcugggcuucaucgccggccugaucgccaucgugauggugaccaucaugcugugcugcaugaccagcugcuguagcugccugaagggcugcugcagcugcggcagcugcugcaaguucgacgaggacgacagcgagccagugcugaagggcgugaagcugcacuacaccugaugacucgagcugguacugcaugcacgcaaugcuagcugccccuuucccguccuggguaccccgagucucccccgaccucgggucccagguaugcucccaccuccaccugccccacucaccaccucugcuaguuccagacaccucccaagcacgcagcaaugcagcucaaaacgcuuagccuagccacacccccacgggaaacagcagugauuaaccuuuagcaauaaacgaaaguuuaacuaagcuauacuaaccccaggguuggucaauuucgugccagccacacccuggagcuagcaaaaaaaaaaaaaaaaaaaaaaaaaaaaaagcauaugacuaaaaaaaaaaaaaaaaaaaaaaaaaaaaaaaaaaaaaaaaaaaaaaaaaaaaaaaaaaaaaaaaaaaaaa

SEQ ID NO: 26778 - RNA, 4283 nt, Artificial Sequence
  SARS-CoV-2/Wuhan/WIV05/2019__EPI_ISL_402128 spike protein mRNA gc (1-1273)(E484K_D614G)
agaauaaacuaguauucuucugguccccacagacucagagagaacccgccaccauguucguguuccuggugcugcugccccuggugagcagccagugcgugaaccugaccacccggacccagcugcccccugccuacaccaacagcuucacccggggcguguacuaccccgacaagguguuccggagcagcgugcugcacagcacccaggaccuguuccugcccuucuucagcaacgugaccugguuccacgccauccacgugagcggcaccaacggcaccaagcgguucgacaacccagugcugcccuucaacgacggcguguacuucgccagcaccgagaagucaaacaucauccggggcuggaucuucggcaccacccuggacagcaagacacagagccugcugaucgugaacaacgccaccaacguggugaucaaggugugcgaguuucaguucugcaacgaccccuuccugggcguguacuaccacaagaacaacaagagcuggauggagagcgaguuccgggucuacagcagcgcuaacaauugcaccuucgaguacgugagccagcccuuccugauggaccucgagggcaagcagggcaacuucaagaaccugcgggaguucguguucaagaacaucgauggcuacuucaagaucuacagcaagcacacccccaucaaccuggugcgggaccugccccagggauucagcgcccuggagccucugguggaccugcccaucggcaucaacaucaccagguuccagacccugcuggcccugcaccggagcuaccugacccccggcgacagcagcagcggcuggaccgccggcgccgccgcauacuacgugggcuaccugcagccacggaccuuccugcugaaguacaacgagaacggcaccaucaccgacgccguggacugcgcccuggacccccugagcgagaccaagugcacccuaaagagcuucaccguggagaagggcaucuaccagaccagcaacuuccgggugcagcccacugagagcaucgugcgguuccccaacauuaccaaccugugucccuucggcgagguguucaacgccacccgguucgccagcguguacgccuggaaccggaagcggaucagcaacugcguggccgacuacagcgugcuguacaacagcgccagcuucagcaccuucaagugcuacggcgugagcccuaccaagcugaacgaccugugcuucaccaacguguacgcugacagcuucgugauccggggcgacgaggugcggcagaucgcccccggccagaccggcaagaucgccgacuacaacuacaagcugcccgacgacuucaccggcugcgugaucgccuggaacagcaacaaccuggacagcaaggugggcggcaacuacaacuaccuguaccggcuguuccguaagagcaaccugaagccauucgagcgggacaucagcaccgagaucuaccaggccggcagcacccccugcaacggugugaagggcuuuaacugcuacuucccccugcagagcuacggcuuccagcccaccaacggcgugggcuaccagcccuaccgggugguggugcugagcuucgagcugcugcacgcccccgccaccgugugcggcccuaaaaagagcaccaaccuggugaagaacaagugcgugaacuucaauuucaacggccugaccggcaccggcgugcugaccgagagcaacaagaaguuccugcccuuccagcaguucggccgggauaucgccgacaccaccgacgcagugcgggacccccagacccuggagauccuggacaucaccccaugcagcuucggcggcgugagcgucaucacccccggcacaaacaccagcaaccagguggccgugcuguaccagggagugaacugcaccgaggugcccguggccauccacgccgaccagcugacccccaccuggcggguguacagcaccggcagcaacguguuccagacccgggccggcugccugaucggcgccgagcacgugaacaacuccuacgagugcgacauccccaucggcgcuggcaucugcgccagcuaccagacccagaccaacagcccccggcgggcccggagcguggccagccagagcaucaucgccuacaccaugagcuuaggcgccgagaacagcguggccuacagcaacaacagcaucgcgaucccuaccaacuucaccaucagcgugaccaccgagauacugcccgugagcaugaccaagaccagcguggacuguaccauguacaucugcggcgacagcaccgagugcagcaaccugcugcugcaguacggcagcuucugcacccagcugaaccgggcccugaccggcaucgccguggagcaggacaagaacacccaagagguguucgcccaggugaagcagaucuacaagacucccccaaucaaggacuucggcggcuucaacuucagccagauccugcccgaccccagcaagcccagcaagcggagcuucaucgaggaccugcuguucaacaaggugacccuggccgacgccggcuucaucaagcaguacggcgacugccugggggauaucgccgcucgggaccugaucugcgcccagaaguucaacggccugaccgugcugcccccucugcugaccgacgagaugaucgcccaguacaccagcgcccugcuugccggcaccaucaccagcggcuggaccuucggcgccggcgcagcccugcagauccccuucgccaugcagauggccuaccgguucaacggcaucggcgugacccagaacgugcuguacgagaaccagaagcugaucgccaaccaguucaacagcgccaucggcaagauccaggacagccugagcagcaccgccagcgcccugggcaagcugcaggacguggugaaccagaacgcucaggcccugaacacccuggugaagcagcugagcagcaacuucggcgccaucagcucagugcugaaugacauccugagcaggcuggacaagguggaggccgaggugcagaucgaccggcugaucaccggccggcugcagagccugcagaccuacgugacccagcagcugauccgggccgccgagauccgggccagcgccaaccuggcagccaccaagaugagcgagugcgugcugggccagagcaagcggguggacuuuugcggcaagggcuaccaccugaugagcuucccccagagcgccccacacggcgugguguuccuccacgucacauacgugcccgcccaggagaagaacuucaccaccgcccccgccauuugccacgacggcaaggcucacuucccccgggagggaguguucgugagcaacggcacccacugguucgugacccagcggaacuucuacgagccccagaucaucaccaccgacaacaccuucgugagcggcaacugcgacguggugaucggcaucgugaacaacaccguguacgacccccugcagccugagcuggacagcuucaaggaggagcuggacaaguacuucaagaaccacaccagccccgacguggaucugggcgacaucagcggcaucaacgccagcguggugaacauccagaaggagaucgaccggcugaacgagguggccaagaaccugaacgagagccugaucgaccugcaggagcugggcaaguacgagcaguacaucaaguggcccugguacaucuggcugggcuucaucgccggccugaucgccaucgugauggugaccaucaugcugugcugcaugaccagcugcuguagcugccugaagggcugcugcagcugcggcagcugcugcaaguucgacgaggacgacagcgagccagugcugaagggcgugaagcugcacuacaccugaugacucgagcugguacugcaugcacgcaaugcuagcugccccuuucccguccuggguaccccgagucucccccgaccucgggucccagguaugcucccaccuccaccugccccacucaccaccucugcuaguuccagacaccucccaagcacgcagcaaugcagcucaaaacgcuuagccuagccacacccccacgggaaacagcagugauuaaccuuuagcaauaaacgaaaguuuaacuaagcuauacuaaccccaggguuggucaauuucgugccagccacacccuggagcuagcaaaaaaaaaaaaaaaaaaaaaaaaaaaaaagcauaugacuaaaaaaaaaaaaaaaaaaaaaaaaaaaaaaaaaaaaaaaaaaaaaaaaaaaaaaaaaaaaaaaaaaaaaa

SEQ ID NO: 26779 - RNA, 4283 nt, Artificial Sequence
  SARS-CoV-2/Wuhan/WIV05/2019__EPI_ISL_402128 spike protein mRNA gc (1-1273)(L18F_T20N_P26S_D138Y_R190S_K417T_E484K_N501Y_D614G_H655Y _T1027I)
agaauaaacuaguauucuucugguccccacagacucagagagaacccgccaccauguucguguuccuggugcugcugccccuggugagcagccagugcgugaacuucaccaaccggacccagcugcccagcgccuacaccaacagcuucacccggggcguguacuacccugacaagguguuccggagcagcgugcugcacagcacccaggaccuguuccugcccuucuucagcaacgugaccugguuccacgccauccacgugagcggcaccaacggcaccaagcgguucgacaaccccgugcugccauucaacgacggcguguacuucgccagcaccgagaagucaaacaucauccggggcuggaucuuuggcaccacccuggacagcaagacccagagccugcugaucgugaacaacgccacaaacguggugaucaaggugugcgaguuccaguucugcaacuaccccuuccugggcguguacuaccacaagaacaacaagagcuggauggagagcgaguuccgggucuacagcagcgcuaauaacugcaccuucgaguacgugagccagcccuuccugauggaccuggagggcaagcagggcaacuucaagaaccucagcgaguucguguucaagaacaucgacggcuacuucaagaucuacagcaagcacacccccaucaaccuggugcgggaucugccccagggauucagcgcccuggagccccugguggaccugccuaucggcaucaacaucacccgguuccagacccugcuggcccugcacaggagcuaccugacccccggcgacagcagcagcggcuggaccgccggcgccgccgcauacuacgugggcuaccugcagccccggaccuuccugcugaaguacaacgagaacggcaccaucaccgacgccguggacugcgcccuggacccacugagcgagaccaagugcacccuaaagagcuucaccguggagaagggcaucuaccagaccagcaacuuccgggugcagcccaccgagagcaucgugcgguuccccaacauuacuaaccugugucccuucggcgagguguucaacgccacccgguucgccagcguguacgccuggaaccggaagcggaucagcaacugcguggccgacuacagcgugcuguacaacagcgccagcuucagcaccuucaagugcuacggcgugagccccaccaagcugaacgaccugugcuucaccaacguguacgcugacagcuucgugauccggggcgacgaggugcggcagaucgccccuggccagaccggcaccaucgccgacuacaacuacaagcugcccgacgacuucaccggcugcgugaucgccuggaacagcaacaaccuggacagcaaggugggcggcaacuacaacuaccuguaccggcuguuccguaagagcaaccugaagcccuuugagcgggacaucagcaccgagaucuaccaggccggcagcaccccaugcaacggugugaagggcuucaacugcuacuucccccugcagagcuacggcuuccagcccaccuacggcgugggcuaccagcccuaccgggugguggugcugagcuucgagcugcugcacgcccccgccaccgugugcggccccaaaaagagcaccaaccuggugaagaacaagugcgugaacuucaauuucaacggccugaccggcaccggcgugcugaccgagagcaacaagaaguuccugccuuuccagcaguucggccgggacaucgccgauaccaccgacgcagugcgggacccccagacccuggagauccuggacaucacccccugcagcuucggcggcgugagcgucaucaccccaggcacaaacaccagcaaccagguggccgugcuguaccagggagugaacugcaccgaggugcccguggccauccacgccgaccagcugacccccaccuggcggguguacuccaccggcagcaacguguuccagacccgggccggcugccugaucggcgccgaguacgugaacaacagcuacgagugcgacauccccaucggcgcuggcaucugcgccagcuaccagacccagaccaacagcccccggcgggcccggagcguggccagccagagcaucaucgccuacaccaugagccugggcgccgagaacagcguggccuacagcaacaacagcaucgcgauccccaccaacuucaccaucagcgugaccaccgagauauuaccugugagcaugaccaagaccagcguggacuguaccauguacaucugcggcgacagcaccgagugcagcaaccugcugcugcaguacggcagcuucugcacccagcugaaccgggcccugaccggcaucgccguggagcaggacaagaacacccaagagguguucgcccaggugaagcagaucuacaagacuccacccaucaaggacuucggcggcuucaacuucagccagauccugcccgaccccagcaagcccagcaagcggagcuucaucgaggaccugcuguucaacaaggugacccuggccgacgccggcuucaucaagcaguacggcgacugccugggggacaucgccgcucgggaucugaucugcgcccagaaguucaacggccugaccgugcugccuccccugcugaccgacgagaugaucgcccaguacaccagcgcccugcuggccggcaccaucaccagcggcuggaccuucggcgccggcgcagcccuucagauccccuucgccaugcagauggccuaccgguucaacggcaucggcgugacccagaacgugcuguacgagaaccagaagcugaucgccaaccaguucaacagcgccaucggcaagauccaggacagccugagcagcaccgccagcgcccugggcaagcugcaggacguggugaaccagaacgcucaggcccugaacacccuggugaagcagcugagcucaaacuuuggcgccaucagcagcgugcugaaugacauccugagccggcuggacaagguggaggccgaggugcagaucgacaggcugaucaccggccggcugcagagccugcagaccuacgugacccagcagcugauccgggccgccgagauccgggccagcgccaaccuggcagccauuaagaugagcgagugcgugcugggccagagcaagcggguggacuucugcggcaagggcuaccaccugaugagcuucccccagagcgcuccccacggcgugguguuccugcacgucaccuacgugccagcccaggagaagaacuucacaaccgcccccgccaucugccacgacggcaaggcccacuucccccgggagggaguguucgugagcaacggcacccacugguucgugacccagcggaacuucuacgagccccagaucaucaccaccgacaacaccuucgugagcggcaacugcgacguggugaucggcaucgugaacaacaccguguacgacccccuccagcccgagcuggacagcuucaaggaggagcuggacaaguacuucaagaaccacaccagcccugacguggaccugggcgauaucagcggcaucaacgccagcguggugaacauccagaaggagaucgaccggcugaacgagguggccaagaaccugaacgagagccugaucgaccugcaggagcugggcaaguacgagcaguacaucaaguggcccugguacaucuggcugggcuucaucgccggccugaucgccaucgugauggugaccaucaugcugugcugcaugaccagcugcuguagcugccugaagggcugcugcagcugcggcagcugcugcaaguucgacgaggacgacagcgagcccgugcugaagggcgugaagcugcacuacaccugaugacucgagcugguacugcaugcacgcaaugcuagcugccccuuucccguccuggguaccccgagucucccccgaccucgggucccagguaugcucccaccuccaccugccccacucaccaccucugcuaguuccagacaccucccaagcacgcagcaaugcagcucaaaacgcuuagccuagccacacccccacgggaaacagcagugauuaaccuuuagcaauaaacgaaaguuuaacuaagcuauacuaaccccaggguuggucaauuucgugccagccacacccuggagcuagcaaaaaaaaaaaaaaaaaaaaaaaaaaaaaagcauaugacuaaaaaaaaaaaaaaaaaaaaaaaaaaaaaaaaaaaaaaaaaaaaaaaaaaaaaaaaaaaaaaaaaaaaaa

SEQ ID NO: 26780 - RNA, 4283 nt, Artificial Sequence
  SARS-CoV-2/Wuhan/WIV05/2019__EPI_ISL_402128 spike protein mRNA gc (1-1273)(S13I_W152C_L452R_D614G)
agaauaaacuaguauucuucugguccccacagacucagagagaacccgccaccauguucguguuccuggugcugcugccccuggugagcauccagugcgugaaccugaccacccggacccagcugcccccugccuacaccaacagcuucacccggggcguguacuaccccgacaagguguuccggagcagcgugcugcacagcacccaggaccuguuccugcccuucuucagcaacgugaccugguuccacgccauccacgugagcggcaccaacggcaccaagcgguucgacaacccagugcugcccuucaacgacggcguguacuucgccagcaccgagaagucaaacaucauccggggcuggaucuucggcaccacccuggacagcaagacacagagccugcugaucgugaacaacgccaccaacguggugaucaaggugugcgaguuucaguucugcaacgaccccuuccugggcguguacuaccacaagaacaacaagagcugcauggagagcgaguuccgggucuacagcagcgcuaacaauugcaccuucgaguacgugagccagcccuuccugauggaccucgagggcaagcagggcaacuucaagaaccugcgggaguucguguucaagaacaucgauggcuacuucaagaucuacagcaagcacacccccaucaaccuggugcgggaccugccccagggauucagcgcccuggagccucugguggaccugcccaucggcaucaacaucaccagguuccagacccugcuggcccugcaccggagcuaccugacccccggcgacagcagcagcggcuggaccgccggcgccgccgcauacuacgugggcuaccugcagccacggaccuuccugcugaaguacaacgagaacggcaccaucaccgacgccguggacugcgcccuggacccccugagcgagaccaaguguacccuaaagagcuucaccguggagaagggcaucuaccagaccagcaacuuccgggugcagcccacugagagcauugugcgguuccccaacaucaccaaccugugccccuucggcgagguguucaacgccacccgguucgccagcguguacgccuggaaccggaagcggaucagcaacugcguggccgacuacagcgugcuguacaacagcgccagcuucagcaccuucaagugcuacggcgugagcccuaccaagcugaacgaccugugcuucaccaacguguacgcugacagcuucgugauccggggcgacgaggugcggcagaucgcccccggccagaccggcaagaucgccgacuacaacuacaagcugcccgacgacuucaccggcugcgugaucgccuggaacagcaacaaccuggacagcaaggugggcggcaacuacaacuaccgguaccggcuguuccguaagagcaaccugaagccauucgagcgggacaucagcaccgagaucuaccaggccggcagcacccccugcaacgguguggagggcuuuaacugcuacuucccccugcagagcuacggcuuccagcccaccaacggcgugggcuaccagcccuaccgggugguggugcugagcuucgagcugcugcacgcccccgccaccgugugcggcccuaaaaagagcaccaaccuggugaagaacaagugcgugaacuucaauuucaacggccugaccggcaccggcgugcugaccgagagcaacaagaaguuccugcccuuccagcaguucggccgggauaucgccgacaccaccgacgcagugcgggacccccagacccuggagauccuggacaucaccccaugcagcuucggcggcgugagcgucaucacccccggcacaaacaccagcaaccagguggccgugcuguaccagggagugaacugcaccgaggugcccguggccauccacgccgaccagcugacccccaccuggcggguguacagcaccggcagcaacguguuccagacccgggccggcugccugaucggcgccgagcacgugaacaacagcuacgagugcgacauccccaucggcgcuggcaucugugccuccuaccagacccagaccaacagcccccggcgggcccggagcguggccagccagagcaucaucgccuacaccaugagccugggcgccgagaacagcguggccuacagcaacaacagcaucgcgaucccuaccaacuucaccauaagcgugaccaccgagaucuuacccgugagcaugaccaagaccagcguggacugcaccauguacaucugcggcgacagcaccgagugcagcaaccugcugcugcaguacggcagcuucugcacccagcugaaccgggcccugaccggcaucgccguggagcaggacaagaacacccaagagguguucgcccaggugaagcagaucuacaagacucccccaaucaaggacuucggcggcuucaacuucagccagauccugcccgaccccagcaagcccagcaagcggagcuucaucgaggaccugcuguucaacaaggugacccuggccgacgccggcuucaucaagcaguacggcgacugccugggggauaucgccgcucgggaccugaucugcgcccagaaguucaacggccugaccgugcugcccccucugcugaccgacgagaugaucgcccaguacaccagcgcccugcuggccggcaccaucaccagcggcuggaccuucggcgccggcgcagcccuucagauccccuucgccaugcagauggccuacagguucaacggcaucggcgugacccagaacgugcuguacgagaaccagaagcugaucgccaaccaguucaacagcgccaucggcaagauccaggacagccugagcagcaccgccagcgcccugggcaagcugcaggacguggugaaccagaacgcucaggcccugaacacccuggugaagcagcugagcagcaacuucggcgccaucagcagcgugcugaaugacauccugucacggcuggacaagguggaggccgaggugcagaucgaccggcugaucaccggccggcugcagagccugcagaccuacgugacccagcagcugauccgggccgccgagauucgggccagcgccaaccuggcagccaccaagaugagcgagugcgugcugggccagagcaagcggguggacuuuugcggcaagggcuaccaccugaugagcuucccccagagcgccccacacggcgugguguuccugcacgucacauacgugcccgcccaggagaagaacuucaccaccgcccccgccaucugccacgacggcaaggcucacuucccccgggagggaguguucgugagcaacggcacccacugguucgugacccagcggaacuucuacgagccccagaucaucaccaccgacaacaccuucgugagcggcaacugcgacguggugaucggcaucgugaacaacaccguguacgacccccuccagccugagcuggacagcuucaaggaggagcuggacaaguacuucaagaaccacaccagccccgacguggaucugggcgacaucagcggcaucaacgccagcguggugaacauccagaaggagaucgaccggcugaacgagguggccaagaaccugaacgagagccugaucgaccugcaggagcugggcaaguacgagcaguacaucaaguggcccugguacaucuggcugggcuucaucgccggccugaucgccaucgugauggugaccaucaugcugugcugcaugaccagcuguugcagcugccugaagggcugcugcagcugcggcagcugcugcaaguucgacgaggacgacagcgagccagugcugaagggcgugaagcugcacuacaccugaugacucgagcugguacugcaugcacgcaaugcuagcugccccuuucccguccuggguaccccgagucucccccgaccucgggucccagguaugcucccaccuccaccugccccacucaccaccucugcuaguuccagacaccucccaagcacgcagcaaugcagcucaaaacgcuuagccuagccacacccccacgggaaacagcagugauuaaccuuuagcaauaaacgaaaguuuaacuaagcuauacuaaccccaggguuggucaauuucgugccagccacacccuggagcuagcaaaaaaaaaaaaaaaaaaaaaaaaaaaaaagcauaugacuaaaaaaaaaaaaaaaaaaaaaaaaaaaaaaaaaaaaaaaaaaaaaaaaaaaaaaaaaaaaaaaaaaaaaa

SEQ ID NO: 26781 - RNA, 4283 nt, Artificial Sequence
  SARS-CoV-2/Wuhan/WIV05/2019__EPI_ISL_402128 spike protein mRNA gc mod (1-1273)
agaauaaacuaguauucuucugguccccacagacucagagagaacccgccaccauguucguguuucuggugcugcugccccugguguccagccagugugugaaccugaccaccagaacacagcugccuccagccuacaccaacagcuucaccagaggcguguacuaccccgacaagguguucagauccagcgugcugcacucuacccaggaccuguuccugccuuucuucagcaacgugaccugguuccacgccauccacguguccggcaccaauggcaccaagagauucgacaaccccgugcugcccuucaacgacgggguguacuuugccagcaccgagaaguccaacaucaucagaggcuggaucuucggcaccacacuggacagcaagacccagagccugcugaucgugaacaacgccaccaacguggucaucaaagugugcgaguuccaguucugcaacgaccccuuccugggcgucuacuaccacaagaacaacaagagcuggauggaaagcgaguuccggguguacagcagcgccaacaacugcaccuucgaguacgugucccagccuuuccugauggaccuggaaggcaagcagggcaacuucaagaaccugcgcgaguucguguucaagaacaucgacggcuacuucaaaaucuacagcaagcacaccccuaucaaccucgugcgggaucugccucagggcuucucugcucuggaaccccugguggaucugcccaucggcaucaacaucacccgguuucagacacugcuggcccugcacagaagcuaccugacaccuggcgauagcagcagcggauggacagcuggugccgccgcuuacuaugugggcuaccugcagccuagaaccuuccugcugaaguacaacgagaacggcaccaucaccgacgccguggauugugcucuggauccucugagcgagacaaagugcacccugaaguccuucaccguggaaaagggcaucuaccagaccagcaacuuccgggugcagcccaccgaauccaucgugcgguuccccaauaucaccaaucugugccccuucggcgagguguucaaugccaccagauucgccucuguguacgccuggaaccggaagcggaucagcaauugcguggccgacuacuccgugcuguacaacuccgccagcuucagcaccuucaagugcuacggcguguccccuaccaagcugaacgaccugugcuucacaaacguguacgccgacagcuucgugauccggggagaugaagugcggcagauugccccuggacagacaggcaagaucgccgacuacaacuacaagcugcccgacgacuucaccggcugugugauugccuggaacagcaacaaccuggacuccaaagucggcggcaacuacaauuaccuguaccggcuguuccggaaguccaaucugaagcccuucgagcgggacaucagcaccgaaaucuaucaggccggcagcaccccuugcaacggcguggaaggcuucaacugcuacuucccacugcaguccuacggcuuucagcccacaaauggcgugggcuaucagcccuacagagugguggugcugagcuucgaacugcugcaugcuccugccacagugugcggcccuaagaaaagcaccaaucucgugaagaacaaaugcgugaacuucaacuucaacggccugaccggcaccggcgugcugacagagagcaacaagaaguuccugccauuccagcaguuuggccgggauaucgccgauaccacagacgccguuagagauccccagacacuggaaauccuggacaucaccccaugcagcuucggcggagugucugugaucaccccuggcaccaacaccagcaaucagguggcagugcuguaccaggacgugaacuguaccgaagugcccguggccauucacgccgaucagcugacaccuacauggcggguguacuccaccggcagcaauguguuucagaccagagccggcugucugaucggagccgagcacgugaacaauagcuacgagugcgacauccccaucggcgcuggcaucugugccagcuaccagacacagacaaacagccccagacgggcuagaagcguggccagccagagcaucauugccuacacaaugucucugggcgccgagaacagcguggccuacuccaacaacucuaucgcuauccccaccaacuucaccaucagcgugaccaccgagauccugccuguguccaugaccaagaccagcguggacugcaccauguacaucugcggcgauuccaccgagugcuccaaccugcugcugcaguacggcagcuucugcacccagcugaauagagcccugacagggaucgccguggaacaggacaagaacacccaagagguguucgcccaagugaagcaaaucuacaagaccccuccuaucaaggacuucggcggcuucaauuucagccagauucugcccgauccuagcaagcccagcaagcggagcuucaucgaggaccugcuguucaacaaagugacacuggccgacgccggcuucaucaagcaguauggcgauugucugggcgacauugccgccagggaucugauuugcgcccagaaguuuaacggacugacagugcugccuccucugcugaccgaugagaugaucgcccaguacacaucugcccugcuggccggcacaaucacaagcggcuggacauuuggagcuggcgccgcucugcagauccccuuugcuaugcagauggccuaccgguucaacggcaucggagugacccagaaugugcuguacgagaaccagaagcugaucgccaaccaguucaacagcgccaucggcaagauccaggacagccugagcagcacagcaagcgcccugggaaagcugcaggacguggucaaccagaaugcccaggcacugaacacccuggucaagcagcuguccuccaacuucggcgccaucagcucugugcugaacgauauccugagcagacuggacaaggucgaggccgaggugcagaucgacagacugaucacaggcagacugcagagccuccagacauacgugacccagcagcugaucagagccgccgagauuagagccucugccaaucuggccgccaccaagaugucugagugugugcugggccagagcaagagaguggacuuuugcggcaagggcuaccaccugaugagcuucccucagucugccccucacggcgugguguuucugcacgugacauaugugcccgcucaagagaagaauuucaccaccgcuccagccaucugccacgacggcaaagcccacuuuccuagagaaggcguguucguguccaacggcacccauugguucgugacacagcggaacuucuacgagccccagaucaucaccaccgacaacaccuucgugucuggcaacugcgacguugugaucggcauugugaacaauaccguguacgacccucugcagcccgagcuggacagcuucaaagaggaacuggacaaguacuuuaagaaccacacaagccccgacguggaccugggcgauaucagcggaaucaaugccagcgucgugaacauccagaaagagaucgaccggcugaacgagguggccaagaaucugaacgagagccugaucgaccugcaagaacuggggaaguacgagcaguacaucaaguggcccugguacaucuggcugggcuuuaucgccggacugauugccaucgugauggucacaaucaugcuguguugcaugaccagcugcuguagcugccugaagggcuguuguagcuguggcagcugcugcaaguucgacgaggacgauucugagcccgugcugaagggcgugaaacugcacuacaccugaugacucgagcugguacugcaugcacgcaaugcuagcugccccuuucccguccuggguaccccgagucucccccgaccucgggucccagguaugcucccaccuccaccugccccacucaccaccucugcuaguuccagacaccucccaagcacgcagcaaugcagcucaaaacgcuuagccuagccacacccccacgggaaacagcagugauuaaccuuuagcaauaaacgaaaguuuaacuaagcuauacuaaccccaggguuggucaauuucgugccagccacacccuggagcuagcaaaaaaaaaaaaaaaaaaaaaaaaaaaaaagcauaugacuaaaaaaaaaaaaaaaaaaaaaaaaaaaaaaaaaaaaaaaaaaaaaaaaaaaaaaaaaaaaaaaaaaaaaa

SEQ ID NO: 26782 - RNA, 4283 nt, Artificial Sequence
  SARS-CoV-2/Wuhan/WIV05/2019__EPI_ISL_402128 spike protein mRNA gc mod (1-1273)(D614G)
agaauaaacuaguauucuucugguccccacagacucagagagaacccgccaccauguucguguuucuggugcugcugccccugguguccagccagugugugaaccugaccaccagaacacagcugccuccagccuacaccaacagcuucaccagaggcguguacuaccccgacaagguguucagauccagcgugcugcacucuacccaggaccuguuccugccuuucuucagcaacgugaccugguuccacgccauccacguguccggcaccaauggcaccaagagauucgacaaccccgugcugcccuucaacgacgggguguacuuugccagcaccgagaaguccaacaucaucagaggcuggaucuucggcaccacacuggacagcaagacccagagccugcugaucgugaacaacgccaccaacguggucaucaaagugugcgaguuccaguucugcaacgaccccuuccugggcgucuacuaccacaagaacaacaagagcuggauggaaagcgaguuccggguguacagcagcgccaacaacugcaccuucgaguacgugucccagccuuuccugauggaccuggaaggcaagcagggcaacuucaagaaccugcgcgaguucguguucaagaacaucgacggcuacuucaaaaucuacagcaagcacaccccuaucaaccucgugcgggaucugccucagggcuucucugcucuggaaccccugguggaucugcccaucggcaucaacaucacccgguuucagacacugcuggcccugcacagaagcuaccugacaccuggcgauagcagcagcggauggacagcuggugccgccgcuuacuaugugggcuaccugcagccuagaaccuuccugcugaaguacaacgagaacggcaccaucaccgacgccguggauugugcucuggauccucugagcgagacaaagugcacccugaaguccuucaccguggaaaagggcaucuaccagaccagcaacuuccgggugcagcccaccgaauccaucgugcgguuccccaauaucaccaaucugugccccuucggcgagguguucaaugccaccagauucgccucuguguacgccuggaaccggaagcggaucagcaauugcguggccgacuacuccgugcuguacaacuccgccagcuucagcaccuucaagugcuacggcguguccccuaccaagcugaacgaccugugcuucacaaacguguacgccgacagcuucgugauccggggagaugaagugcggcagauugccccuggacagacaggcaagaucgccgacuacaacuacaagcugcccgacgacuucaccggcugugugauugccuggaacagcaacaaccuggacuccaaagucggcggcaacuacaauuaccuguaccggcuguuccggaaguccaaucugaagcccuucgagcgggacaucagcaccgaaaucuaucaggccggcagcaccccuugcaacggcguggaaggcuucaacugcuacuucccacugcaguccuacggcuuucagcccacaaauggcgugggcuaucagcccuacagagugguggugcugagcuucgaacugcugcaugcuccugccacagugugcggcccuaagaaaagcaccaaucucgugaagaacaaaugcgugaacuucaacuucaacggccugaccggcaccggcgugcugacagagagcaacaagaaguuccugccauuccagcaguuuggccgggauaucgccgauaccacagacgccguuagagauccccagacacuggaaauccuggacaucaccccaugcagcuucggcggagugucugugaucaccccuggcaccaacaccagcaaucagguggcagugcuguaccagggcgugaacuguaccgaagugcccguggccauucacgccgaucagcugacaccuacauggcggguguacuccaccggcagcaauguguuucagaccagagccggcugucugaucggagccgagcacgugaacaauagcuacgagugcgacauccccaucggcgcuggcaucugugccagcuaccagacacagacaaacagccccagacgggcuagaagcguggccagccagagcaucauugccuacacaaugucucugggcgccgagaacagcguggccuacuccaacaacucuaucgcuauccccaccaacuucaccaucagcgugaccaccgagauccugccuguguccaugaccaagaccagcguggacugcaccauguacaucugcggcgauuccaccgagugcuccaaccugcugcugcaguacggcagcuucugcacccagcugaauagagcccugacagggaucgccguggaacaggacaagaacacccaagagguguucgcccaagugaagcaaaucuacaagaccccuccuaucaaggacuucggcggcuucaauuucagccagauucugcccgauccuagcaagcccagcaagcggagcuucaucgaggaccugcuguucaacaaagugacacuggccgacgccggcuucaucaagcaguauggcgauugucugggcgacauugccgccagggaucugauuugcgcccagaaguuuaacggacugacagugcugccuccucugcugaccgaugagaugaucgcccaguacacaucugcccugcuggccggcacaaucacaagcggcuggacauuuggagcuggcgccgcucugcagauccccuuugcuaugcagauggccuaccgguucaacggcaucggagugacccagaaugugcuguacgagaaccagaagcugaucgccaaccaguucaacagcgccaucggcaagauccaggacagccugagcagcacagcaagcgcccugggaaagcugcaggacguggucaaccagaaugcccaggcacugaacacccuggucaagcagcuguccuccaacuucggcgccaucagcucugugcugaacgauauccugagcagacuggacaaggucgaggccgaggugcagaucgacagacugaucacaggcagacugcagagccuccagacauacgugacccagcagcugaucagagccgccgagauuagagccucugccaaucuggccgccaccaagaugucugagugugugcugggccagagcaagagaguggacuuuugcggcaagggcuaccaccugaugagcuucccucagucugccccucacggcgugguguuucugcacgugacauaugugcccgcucaagagaagaauuucaccaccgcuccagccaucugccacgacggcaaagcccacuuuccuagagaaggcguguucguguccaacggcacccauugguucgugacacagcggaacuucuacgagccccagaucaucaccaccgacaacaccuucgugucuggcaacugcgacguugugaucggcauugugaacaauaccguguacgacccucugcagcccgagcuggacagcuucaaagaggaacuggacaaguacuuuaagaaccacacaagccccgacguggaccugggcgauaucagcggaaucaaugccagcgucgugaacauccagaaagagaucgaccggcugaacgagguggccaagaaucugaacgagagccugaucgaccugcaagaacuggggaaguacgagcaguacaucaaguggcccugguacaucuggcugggcuuuaucgccggacugauugccaucgugauggucacaaucaugcuguguugcaugaccagcugcuguagcugccugaagggcuguuguagcuguggcagcugcugcaaguucgacgaggacgauucugagcccgugcugaagggcgugaaacugcacuacaccugaugacucgagcugguacugcaugcacgcaaugcuagcugccccuuucccguccuggguaccccgagucucccccgaccucgggucccagguaugcucccaccuccaccugccccacucaccaccucugcuaguuccagacaccucccaagcacgcagcaaugcagcucaaaacgcuuagccuagccacacccccacgggaaacagcagugauuaaccuuuagcaauaaacgaaaguuuaacuaagcuauacuaaccccaggguuggucaauuucgugccagccacacccuggagcuagcaaaaaaaaaaaaaaaaaaaaaaaaaaaaaagcauaugacuaaaaaaaaaaaaaaaaaaaaaaaaaaaaaaaaaaaaaaaaaaaaaaaaaaaaaaaaaaaaaaaaaaaaaa

SEQ ID NO: 26783 - RNA, 4283 nt, Artificial Sequence
  SARS-CoV-2/Wuhan/WIV05/2019__EPI_ISL_402128 spike protein mRNA gc mod (1-1273)(A222V_D614G)
agaauaaacuaguauucuucugguccccacagacucagagagaacccgccaccauguucguguuucuggugcugcugccccugguguccagccagugugugaaccugaccaccagaacacagcugccuccagccuacaccaacagcuucaccagaggcguguacuaccccgacaagguguucagauccagcgugcugcacucuacccaggaccuguuccugccuuucuucagcaacgugaccugguuccacgccauccacguguccggcaccaauggcaccaagagauucgacaaccccgugcugcccuucaacgacgggguguacuuugccagcaccgagaaguccaacaucaucagaggcuggaucuucggcaccacacuggacagcaagacccagagccugcugaucgugaacaacgccaccaacguggucaucaaagugugcgaguuccaguucugcaacgaccccuuccugggcgucuacuaccacaagaacaacaagagcuggauggaaagcgaguuccggguguacagcagcgccaacaacugcaccuucgaguacgugucccagccuuuccugauggaccuggaaggcaagcagggcaacuucaagaaccugcgcgaguucguguucaagaacaucgacggcuacuucaaaaucuacagcaagcacaccccuaucaaccucgugcgggaucugccucagggcuucucugugcuggaaccccugguggaucugcccaucggcaucaacaucacccgguuucagacacugcuggcccugcacagaagcuaccugacaccuggcgauagcagcagcggauggacagcuggugccgccgcuuacuaugugggcuaccugcagccuagaaccuuccugcugaaguacaacgagaacggcaccaucaccgacgccguggauugugcucuggauccucugagcgagacaaagugcacccugaaguccuucaccguggaaaagggcaucuaccagaccagcaacuuccgggugcagcccaccgaauccaucgugcgguuccccaauaucaccaaucugugccccuucggcgagguguucaaugccaccagauucgccucuguguacgccuggaaccggaagcggaucagcaauugcguggccgacuacuccgugcuguacaacuccgccagcuucagcaccuucaagugcuacggcguguccccuaccaagcugaacgaccugugcuucacaaacguguacgccgacagcuucgugauccggggagaugaagugcggcagauugccccuggacagacaggcaagaucgccgacuacaacuacaagcugcccgacgacuucaccggcugugugauugccuggaacagcaacaaccuggacuccaaagucggcggcaacuacaauuaccuguaccggcuguuccggaaguccaaucugaagcccuucgagcgggacaucagcaccgaaaucuaucaggccggcagcaccccuugcaacggcguggaaggcuucaacugcuacuucccacugcaguccuacggcuuucagcccacaaauggcgugggcuaucagcccuacagagugguggugcugagcuucgaacugcugcaugcuccugccacagugugcggcccuaagaaaagcaccaaucucgugaagaacaaaugcgugaacuucaacuucaacggccugaccggcaccggcgugcugacagagagcaacaagaaguuccugccauuccagcaguuuggccgggauaucgccgauaccacagacgccguuagagauccccagacacuggaaauccuggacaucaccccaugcagcuucggcggagugucugugaucaccccuggcaccaacaccagcaaucagguggcagugcuguaccagggcgugaacuguaccgaagugcccguggccauucacgccgaucagcugacaccuacauggcggguguacuccaccggcagcaauguguuucagaccagagccggcugucugaucggagccgagcacgugaacaauagcuacgagugcgacauccccaucggcgcuggcaucugugccagcuaccagacacagacaaacagccccagacgggcuagaagcguggccagccagagcaucauugccuacacaaugucucugggcgccgagaacagcguggccuacuccaacaacucuaucgcuauccccaccaacuucaccaucagcgugaccaccgagauccugccuguguccaugaccaagaccagcguggacugcaccauguacaucugcggcgauuccaccgagugcuccaaccugcugcugcaguacggcagcuucugcacccagcugaauagagcccugacagggaucgccguggaacaggacaagaacacccaagagguguucgcccaagugaagcaaaucuacaagaccccuccuaucaaggacuucggcggcuucaauuucagccagauucugcccgauccuagcaagcccagcaagcggagcuucaucgaggaccugcuguucaacaaagugacacuggccgacgccggcuucaucaagcaguauggcgauugucugggcgacauugccgccagggaucugauuugcgcccagaaguuuaacggacugacagugcugccuccucugcugaccgaugagaugaucgcccaguacacaucugcccugcuggccggcacaaucacaagcggcuggacauuuggagcuggcgccgcucugcagauccccuuugcuaugcagauggccuaccgguucaacggcaucggagugacccagaaugugcuguacgagaaccagaagcugaucgccaaccaguucaacagcgccaucggcaagauccaggacagccugagcagcacagcaagcgcccugggaaagcugcaggacguggucaaccagaaugcccaggcacugaacacccuggucaagcagcuguccuccaacuucggcgccaucagcucugugcugaacgauauccugagcagacuggacaaggucgaggccgaggugcagaucgacagacugaucacaggcagacugcagagccuccagacauacgugacccagcagcugaucagagccgccgagauuagagccucugccaaucuggccgccaccaagaugucugagugugugcugggccagagcaagagaguggacuuuugcggcaagggcuaccaccugaugagcuucccucagucugccccucacggcgugguguuucugcacgugacauaugugcccgcucaagagaagaauuucaccaccgcuccagccaucugccacgacggcaaagcccacuuuccuagagaaggcguguucguguccaacggcacccauugguucgugacacagcggaacuucuacgagccccagaucaucaccaccgacaacaccuucgugucuggcaacugcgacguugugaucggcauugugaacaauaccguguacgacccucugcagcccgagcuggacagcuucaaagaggaacuggacaaguacuuuaagaaccacacaagccccgacguggaccugggcgauaucagcggaaucaaugccagcgucgugaacauccagaaagagaucgaccggcugaacgagguggccaagaaucugaacgagagccugaucgaccugcaagaacuggggaaguacgagcaguacaucaaguggcccugguacaucuggcugggcuuuaucgccggacugauugccaucgugauggucacaaucaugcuguguugcaugaccagcugcuguagcugccugaagggcuguuguagcuguggcagcugcugcaaguucgacgaggacgauucugagcccgugcugaagggcgugaaacugcacuacaccugaugacucgagcugguacugcaugcacgcaaugcuagcugccccuuucccguccuggguaccccgagucucccccgaccucgggucccagguaugcucccaccuccaccugccccacucaccaccucugcuaguuccagacaccucccaagcacgcagcaaugcagcucaaaacgcuuagccuagccacacccccacgggaaacagcagugauuaaccuuuagcaauaaacgaaaguuuaacuaagcuauacuaaccccaggguuggucaauuucgugccagccacacccuggagcuagcaaaaaaaaaaaaaaaaaaaaaaaaaaaaaagcauaugacuaaaaaaaaaaaaaaaaaaaaaaaaaaaaaaaaaaaaaaaaaaaaaaaaaaaaaaaaaaaaaaaaaaaaaa

SEQ ID NO: 26784 - RNA, 4283 nt, Artificial Sequence
  SARS-CoV-2/Wuhan/WIV05/2019__EPI_ISL_402128 spike protein mRNA gc mod (1-1273)(N439K_D614G)
agaauaaacuaguauucuucugguccccacagacucagagagaacccgccaccauguucguguuucuggugcugcugccccugguguccagccagugugugaaccugaccaccagaacacagcugccuccagccuacaccaacagcuucaccagaggcguguacuaccccgacaagguguucagauccagcgugcugcacucuacccaggaccuguuccugccuuucuucagcaacgugaccugguuccacgccauccacguguccggcaccaauggcaccaagagauucgacaaccccgugcugcccuucaacgacgggguguacuuugccagcaccgagaaguccaacaucaucagaggcuggaucuucggcaccacacuggacagcaagacccagagccugcugaucgugaacaacgccaccaacguggucaucaaagugugcgaguuccaguucugcaacgaccccuuccugggcgucuacuaccacaagaacaacaagagcuggauggaaagcgaguuccggguguacagcagcgccaacaacugcaccuucgaguacgugucccagccuuuccugauggaccuggaaggcaagcagggcaacuucaagaaccugcgcgaguucguguucaagaacaucgacggcuacuucaaaaucuacagcaagcacaccccuaucaaccucgugcgggaucugccucagggcuucucugcucuggaaccccugguggaucugcccaucggcaucaacaucacccgguuucagacacugcuggcccugcacagaagcuaccugacaccuggcgauagcagcagcggauggacagcuggugccgccgcuuacuaugugggcuaccugcagccuagaaccuuccugcugaaguacaacgagaacggcaccaucaccgacgccguggauugugcucuggauccucugagcgagacaaagugcacccugaaguccuucaccguggaaaagggcaucuaccagaccagcaacuuccgggugcagcccaccgaauccaucgugcgguuccccaauaucaccaaucugugccccuucggcgagguguucaaugccaccagauucgccucuguguacgccuggaaccggaagcggaucagcaauugcguggccgacuacuccgugcuguacaacuccgccagcuucagcaccuucaagugcuacggcguguccccuaccaagcugaacgaccugugcuucacaaacguguacgccgacagcuucgugauccggggagaugaagugcggcagauugccccuggacagacaggcaagaucgccgacuacaacuacaagcugcccgacgacuucaccggcugugugauugccuggaacagcaagaaccuggacuccaaagucggcggcaacuacaauuaccuguaccggcuguuccggaaguccaaucugaagcccuucgagcgggacaucagcaccgaaaucuaucaggccggcagcaccccuugcaacggcguggaaggcuucaacugcuacuucccacugcaguccuacggcuuucagcccacaaauggcgugggcuaucagcccuacagagugguggugcugagcuucgaacugcugcaugcuccugccacagugugcggcccuaagaaaagcaccaaucucgugaagaacaaaugcgugaacuucaacuucaacggccugaccggcaccggcgugcugacagagagcaacaagaaguuccugccauuccagcaguuuggccgggauaucgccgauaccacagacgccguuagagauccccagacacuggaaauccuggacaucaccccaugcagcuucggcggagugucugugaucaccccuggcaccaacaccagcaaucagguggcagugcuguaccagggcgugaacuguaccgaagugcccguggccauucacgccgaucagcugacaccuacauggcggguguacuccaccggcagcaauguguuucagaccagagccggcugucugaucggagccgagcacgugaacaauagcuacgagugcgacauccccaucggcgcuggcaucugugccagcuaccagacacagacaaacagccccagacgggcuagaagcguggccagccagagcaucauugccuacacaaugucucugggcgccgagaacagcguggccuacuccaacaacucuaucgcuauccccaccaacuucaccaucagcgugaccaccgagauccugccuguguccaugaccaagaccagcguggacugcaccauguacaucugcggcgauuccaccgagugcuccaaccugcugcugcaguacggcagcuucugcacccagcugaauagagcccugacagggaucgccguggaacaggacaagaacacccaagagguguucgcccaagugaagcaaaucuacaagaccccuccuaucaaggacuucggcggcuucaauuucagccagauucugcccgauccuagcaagcccagcaagcggagcuucaucgaggaccugcuguucaacaaagugacacuggccgacgccggcuucaucaagcaguauggcgauugucugggcgacauugccgccagggaucugauuugcgcccagaaguuuaacggacugacagugcugccuccucugcugaccgaugagaugaucgcccaguacacaucugcccugcuggccggcacaaucacaagcggcuggacauuuggagcuggcgccgcucugcagauccccuuugcuaugcagauggccuaccgguucaacggcaucggagugacccagaaugugcuguacgagaaccagaagcugaucgccaaccaguucaacagcgccaucggcaagauccaggacagccugagcagcacagcaagcgcccugggaaagcugcaggacguggucaaccagaaugcccaggcacugaacacccuggucaagcagcuguccuccaacuucggcgccaucagcucugugcugaacgauauccugagcagacuggacaaggucgaggccgaggugcagaucgacagacugaucacaggcagacugcagagccuccagacauacgugacccagcagcugaucagagccgccgagauuagagccucugccaaucuggccgccaccaagaugucugagugugugcugggccagagcaagagaguggacuuuugcggcaagggcuaccaccugaugagcuucccucagucugccccucacggcgugguguuucugcacgugacauaugugcccgcucaagagaagaauuucaccaccgcuccagccaucugccacgacggcaaagcccacuuuccuagagaaggcguguucguguccaacggcacccauugguucgugacacagcggaacuucuacgagccccagaucaucaccaccgacaacaccuucgugucuggcaacugcgacguugugaucggcauugugaacaauaccguguacgacccucugcagcccgagcuggacagcuucaaagaggaacuggacaaguacuuuaagaaccacacaagccccgacguggaccugggcgauaucagcggaaucaaugccagcgucgugaacauccagaaagagaucgaccggcugaacgagguggccaagaaucugaacgagagccugaucgaccugcaagaacuggggaaguacgagcaguacaucaaguggcccugguacaucuggcugggcuuuaucgccggacugauugccaucgugauggucacaaucaugcuguguugcaugaccagcugcuguagcugccugaagggcuguuguagcuguggcagcugcugcaaguucgacgaggacgauucugagcccgugcugaagggcgugaaacugcacuacaccugaugacucgagcugguacugcaugcacgcaaugcuagcugccccuuucccguccuggguaccccgagucucccccgaccucgggucccagguaugcucccaccuccaccugccccacucaccaccucugcuaguuccagacaccucccaagcacgcagcaaugcagcucaaaacgcuuagccuagccacacccccacgggaaacagcagugauuaaccuuuagcaauaaacgaaaguuuaacuaagcuauacuaaccccaggguuggucaauuucgugccagccacacccuggagcuagcaaaaaaaaaaaaaaaaaaaaaaaaaaaaaagcauaugacuaaaaaaaaaaaaaaaaaaaaaaaaaaaaaaaaaaaaaaaaaaaaaaaaaaaaaaaaaaaaaaaaaaaaaa

SEQ ID NO: 26785 - RNA, 4283 nt, Artificial Sequence
  SARS-CoV-2/Wuhan/WIV05/2019__EPI_ISL_402128 spike protein mRNA gc mod (1-1273)(S477N_D614G)
agaauaaacuaguauucuucugguccccacagacucagagagaacccgccaccauguucguguuucuggugcugcugccccugguguccagccagugugugaaccugaccaccagaacacagcugccuccagccuacaccaacagcuucaccagaggcguguacuaccccgacaagguguucagauccagcgugcugcacucuacccaggaccuguuccugccuuucuucagcaacgugaccugguuccacgccauccacguguccggcaccaauggcaccaagagauucgacaaccccgugcugcccuucaacgacgggguguacuuugccagcaccgagaaguccaacaucaucagaggcuggaucuucggcaccacacuggacagcaagacccagagccugcugaucgugaacaacgccaccaacguggucaucaaagugugcgaguuccaguucugcaacgaccccuuccugggcgucuacuaccacaagaacaacaagagcuggauggaaagcgaguuccggguguacagcagcgccaacaacugcaccuucgaguacgugucccagccuuuccugauggaccuggaaggcaagcagggcaacuucaagaaccugcgcgaguucguguucaagaacaucgacggcuacuucaaaaucuacagcaagcacaccccuaucaaccucgugcgggaucugccucagggcuucucugcucuggaaccccugguggaucugcccaucggcaucaacaucacccgguuucagacacugcuggcccugcacagaagcuaccugacaccuggcgauagcagcagcggauggacagcuggugccgccgcuuacuaugugggcuaccugcagccuagaaccuuccugcugaaguacaacgagaacggcaccaucaccgacgccguggauugugcucuggauccucugagcgagacaaagugcacccugaaguccuucaccguggaaaagggcaucuaccagaccagcaacuuccgggugcagcccaccgaauccaucgugcgguuccccaauaucaccaaucugugccccuucggcgagguguucaaugccaccagauucgccucuguguacgccuggaaccggaagcggaucagcaauugcguggccgacuacuccgugcuguacaacuccgccagcuucagcaccuucaagugcuacggcguguccccuaccaagcugaacgaccugugcuucacaaacguguacgccgacagcuucgugauccggggagaugaagugcggcagauugccccuggacagacaggcaagaucgccgacuacaacuacaagcugcccgacgacuucaccggcugugugauugccuggaacagcaacaaccuggacuccaaagucggcggcaacuacaauuaccuguaccggcuguuccggaaguccaaucugaagcccuucgagcgggacaucagcaccgaaaucuaucaggccggcaacaccccuugcaacggcguggaaggcuucaacugcuacuucccacugcaguccuacggcuuucagcccacaaauggcgugggcuaucagcccuacagagugguggugcugagcuucgaacugcugcaugcuccugccacagugugcggcccuaagaaaagcaccaaucucgugaagaacaaaugcgugaacuucaacuucaacggccugaccggcaccggcgugcugacagagagcaacaagaaguuccugccauuccagcaguuuggccgggauaucgccgauaccacagacgccguuagagauccccagacacuggaaauccuggacaucaccccaugcagcuucggcggagugucugugaucaccccuggcaccaacaccagcaaucagguggcagugcuguaccagggcgugaacuguaccgaagugcccguggccauucacgccgaucagcugacaccuacauggcggguguacuccaccggcagcaauguguuucagaccagagccggcugucugaucggagccgagcacgugaacaauagcuacgagugcgacauccccaucggcgcuggcaucugugccagcuaccagacacagacaaacagccccagacgggcuagaagcguggccagccagagcaucauugccuacacaaugucucugggcgccgagaacagcguggccuacuccaacaacucuaucgcuauccccaccaacuucaccaucagcgugaccaccgagauccugccuguguccaugaccaagaccagcguggacugcaccauguacaucugcggcgauuccaccgagugcuccaaccugcugcugcaguacggcagcuucugcacccagcugaauagagcccugacagggaucgccguggaacaggacaagaacacccaagagguguucgcccaagugaagcaaaucuacaagaccccuccuaucaaggacuucggcggcuucaauuucagccagauucugcccgauccuagcaagcccagcaagcggagcuucaucgaggaccugcuguucaacaaagugacacuggccgacgccggcuucaucaagcaguauggcgauugucugggcgacauugccgccagggaucugauuugcgcccagaaguuuaacggacugacagugcugccuccucugcugaccgaugagaugaucgcccaguacacaucugcccugcuggccggcacaaucacaagcggcuggacauuuggagcuggcgccgcucugcagauccccuuugcuaugcagauggccuaccgguucaacggcaucggagugacccagaaugugcuguacgagaaccagaagcugaucgccaaccaguucaacagcgccaucggcaagauccaggacagccugagcagcacagcaagcgcccugggaaagcugcaggacguggucaaccagaaugcccaggcacugaacacccuggucaagcagcuguccuccaacuucggcgccaucagcucugugcugaacgauauccugagcagacuggacaaggucgaggccgaggugcagaucgacagacugaucacaggcagacugcagagccuccagacauacgugacccagcagcugaucagagccgccgagauuagagccucugccaaucuggccgccaccaagaugucugagugugugcugggccagagcaagagaguggacuuuugcggcaagggcuaccaccugaugagcuucccucagucugccccucacggcgugguguuucugcacgugacauaugugcccgcucaagagaagaauuucaccaccgcuccagccaucugccacgacggcaaagcccacuuuccuagagaaggcguguucguguccaacggcacccauugguucgugacacagcggaacuucuacgagccccagaucaucaccaccgacaacaccuucgugucuggcaacugcgacguugugaucggcauugugaacaauaccguguacgacccucugcagcccgagcuggacagcuucaaagaggaacuggacaaguacuuuaagaaccacacaagccccgacguggaccugggcgauaucagcggaaucaaugccagcgucgugaacauccagaaagagaucgaccggcugaacgagguggccaagaaucugaacgagagccugaucgaccugcaagaacuggggaaguacgagcaguacaucaaguggcccugguacaucuggcugggcuuuaucgccggacugauugccaucgugauggucacaaucaugcuguguugcaugaccagcugcuguagcugccugaagggcuguuguagcuguggcagcugcugcaaguucgacgaggacgauucugagcccgugcugaagggcgugaaacugcacuacaccugaugacucgagcugguacugcaugcacgcaaugcuagcugccccuuucccguccuggguaccccgagucucccccgaccucgggucccagguaugcucccaccuccaccugccccacucaccaccucugcuaguuccagacaccucccaagcacgcagcaaugcagcucaaaacgcuuagccuagccacacccccacgggaaacagcagugauuaaccuuuagcaauaaacgaaaguuuaacuaagcuauacuaaccccaggguuggucaauuucgugccagccacacccuggagcuagcaaaaaaaaaaaaaaaaaaaaaaaaaaaaaagcauaugacuaaaaaaaaaaaaaaaaaaaaaaaaaaaaaaaaaaaaaaaaaaaaaaaaaaaaaaaaaaaaaaaaaaaaaa

SEQ ID NO: 26786 - RNA, 4283 nt, Artificial Sequence
  SARS-CoV-2/Wuhan/WIV05/2019__EPI_ISL_402128 spike protein mRNA gc mod (1-1273)(N501Y_D614G)
agaauaaacuaguauucuucugguccccacagacucagagagaacccgccaccauguucguguuucuggugcugcugccccugguguccagccagugugugaaccugaccaccagaacacagcugccuccagccuacaccaacagcuucaccagaggcguguacuaccccgacaagguguucagauccagcgugcugcacucuacccaggaccuguuccugccuuucuucagcaacgugaccugguuccacgccauccacguguccggcaccaauggcaccaagagauucgacaaccccgugcugcccuucaacgacgggguguacuuugccagcaccgagaaguccaacaucaucagaggcuggaucuucggcaccacacuggacagcaagacccagagccugcugaucgugaacaacgccaccaacguggucaucaaagugugcgaguuccaguucugcaacgaccccuuccugggcgucuacuaccacaagaacaacaagagcuggauggaaagcgaguuccggguguacagcagcgccaacaacugcaccuucgaguacgugucccagccuuuccugauggaccuggaaggcaagcagggcaacuucaagaaccugcgcgaguucguguucaagaacaucgacggcuacuucaaaaucuacagcaagcacaccccuaucaaccucgugcgggaucugccucagggcuucucugcucuggaaccccugguggaucugcccaucggcaucaacaucacccgguuucagacacugcuggcccugcacagaagcuaccugacaccuggcgauagcagcagcggauggacagcuggugccgccgcuuacuaugugggcuaccugcagccuagaaccuuccugcugaaguacaacgagaacggcaccaucaccgacgccguggauugugcucuggauccucugagcgagacaaagugcacccugaaguccuucaccguggaaaagggcaucuaccagaccagcaacuuccgggugcagcccaccgaauccaucgugcgguuccccaauaucaccaaucugugccccuucggcgagguguucaaugccaccagauucgccucuguguacgccuggaaccggaagcggaucagcaauugcguggccgacuacuccgugcuguacaacuccgccagcuucagcaccuucaagugcuacggcguguccccuaccaagcugaacgaccugugcuucacaaacguguacgccgacagcuucgugauccggggagaugaagugcggcagauugccccuggacagacaggcaagaucgccgacuacaacuacaagcugcccgacgacuucaccggcugugugauugccuggaacagcaacaaccuggacuccaaagucggcggcaacuacaauuaccuguaccggcuguuccggaaguccaaucugaagcccuucgagcgggacaucagcaccgaaaucuaucaggccggcagcaccccuugcaacggcguggaaggcuucaacugcuacuucccacugcaguccuacggcuuucagcccacauacggcgugggcuaucagcccuacagagugguggugcugagcuucgaacugcugcaugcuccugccacagugugcggcccuaagaaaagcaccaaucucgugaagaacaaaugcgugaacuucaacuucaacggccugaccggcaccggcgugcugacagagagcaacaagaaguuccugccauuccagcaguuuggccgggauaucgccgauaccacagacgccguuagagauccccagacacuggaaauccuggacaucaccccaugcagcuucggcggagugucugugaucaccccuggcaccaacaccagcaaucagguggcagugcuguaccagggcgugaacuguaccgaagugcccguggccauucacgccgaucagcugacaccuacauggcggguguacuccaccggcagcaauguguuucagaccagagccggcugucugaucggagccgagcacgugaacaauagcuacgagugcgacauccccaucggcgcuggcaucugugccagcuaccagacacagacaaacagccccagacgggcuagaagcguggccagccagagcaucauugccuacacaaugucucugggcgccgagaacagcguggccuacuccaacaacucuaucgcuauccccaccaacuucaccaucagcgugaccaccgagauccugccuguguccaugaccaagaccagcguggacugcaccauguacaucugcggcgauuccaccgagugcuccaaccugcugcugcaguacggcagcuucugcacccagcugaauagagcccugacagggaucgccguggaacaggacaagaacacccaagagguguucgcccaagugaagcaaaucuacaagaccccuccuaucaaggacuucggcggcuucaauuucagccagauucugcccgauccuagcaagcccagcaagcggagcuucaucgaggaccugcuguucaacaaagugacacuggccgacgccggcuucaucaagcaguauggcgauugucugggcgacauugccgccagggaucugauuugcgcccagaaguuuaacggacugacagugcugccuccucugcugaccgaugagaugaucgcccaguacacaucugcccugcuggccggcacaaucacaagcggcuggacauuuggagcuggcgccgcucugcagauccccuuugcuaugcagauggccuaccgguucaacggcaucggagugacccagaaugugcuguacgagaaccagaagcugaucgccaaccaguucaacagcgccaucggcaagauccaggacagccugagcagcacagcaagcgcccugggaaagcugcaggacguggucaaccagaaugcccaggcacugaacacccuggucaagcagcuguccuccaacuucggcgccaucagcucugugcugaacgauauccugagcagacuggacaaggucgaggccgaggugcagaucgacagacugaucacaggcagacugcagagccuccagacauacgugacccagcagcugaucagagccgccgagauuagagccucugccaaucuggccgccaccaagaugucugagugugugcugggccagagcaagagaguggacuuuugcggcaagggcuaccaccugaugagcuucccucagucugccccucacggcgugguguuucugcacgugacauaugugcccgcucaagagaagaauuucaccaccgcuccagccaucugccacgacggcaaagcccacuuuccuagagaaggcguguucguguccaacggcacccauugguucgugacacagcggaacuucuacgagccccagaucaucaccaccgacaacaccuucgugucuggcaacugcgacguugugaucggcauugugaacaauaccguguacgacccucugcagcccgagcuggacagcuucaaagaggaacuggacaaguacuuuaagaaccacacaagccccgacguggaccugggcgauaucagcggaaucaaugccagcgucgugaacauccagaaagagaucgaccggcugaacgagguggccaagaaucugaacgagagccugaucgaccugcaagaacuggggaaguacgagcaguacaucaaguggcccugguacaucuggcugggcuuuaucgccggacugauugccaucgugauggucacaaucaugcuguguugcaugaccagcugcuguagcugccugaagggcuguuguagcuguggcagcugcugcaaguucgacgaggacgauucugagcccgugcugaagggcgugaaacugcacuacaccugaugacucgagcugguacugcaugcacgcaaugcuagcugccccuuucccguccuggguaccccgagucucccccgaccucgggucccagguaugcucccaccuccaccugccccacucaccaccucugcuaguuccagacaccucccaagcacgcagcaaugcagcucaaaacgcuuagccuagccacacccccacgggaaacagcagugauuaaccuuuagcaauaaacgaaaguuuaacuaagcuauacuaaccccaggguuggucaauuucgugccagccacacccuggagcuagcaaaaaaaaaaaaaaaaaaaaaaaaaaaaaagcauaugacuaaaaaaaaaaaaaaaaaaaaaaaaaaaaaaaaaaaaaaaaaaaaaaaaaaaaaaaaaaaaaaaaaaaaaa

SEQ ID NO: 26787 - RNA, 4277 nt, Artificial Sequence
  SARS-CoV-2/Wuhan/WIV05/2019__EPI_ISL_402128 spike protein mRNA gc mod (1-1273)(H69del_V70del_D614G)
agaauaaacuaguauucuucugguccccacagacucagagagaacccgccaccauguucguguuucuggugcugcugccccugguguccagccagugugugaaccugaccaccagaacacagcugccuccagccuacaccaacagcuucaccagaggcguguacuaccccgacaagguguucagauccagcgugcugcacucuacccaggaccuguuccugccuuucuucagcaacgugaccugguuccacgccaucuccggcaccaauggcaccaagagauucgacaaccccgugcugcccuucaacgacgggguguacuuugccagcaccgagaaguccaacaucaucagaggcuggaucuucggcaccacacuggacagcaagacccagagccugcugaucgugaacaacgccaccaacguggucaucaaagugugcgaguuccaguucugcaacgaccccuuccugggcgucuacuaccacaagaacaacaagagcuggauggaaagcgaguuccggguguacagcagcgccaacaacugcaccuucgaguacgugucccagccuuuccugauggaccuggaaggcaagcagggcaacuucaagaaccugcgcgaguucguguucaagaacaucgacggcuacuucaaaaucuacagcaagcacaccccuaucaaccucgugcgggaucugccucagggcuucucugcucuggaaccccugguggaucugcccaucggcaucaacaucacccgguuucagacacugcuggcccugcacagaagcuaccugacaccuggcgauagcagcagcggauggacagcuggugccgccgcuuacuaugugggcuaccugcagccuagaaccuuccugcugaaguacaacgagaacggcaccaucaccgacgccguggauugugcucuggauccucugagcgagacaaagugcacccugaaguccuucaccguggaaaagggcaucuaccagaccagcaacuuccgggugcagcccaccgaauccaucgugcgguuccccaauaucaccaaucugugccccuucggcgagguguucaaugccaccagauucgccucuguguacgccuggaaccggaagcggaucagcaauugcguggccgacuacuccgugcuguacaacuccgccagcuucagcaccuucaagugcuacggcguguccccuaccaagcugaacgaccugugcuucacaaacguguacgccgacagcuucgugauccggggagaugaagugcggcagauugccccuggacagacaggcaagaucgccgacuacaacuacaagcugcccgacgacuucaccggcugugugauugccuggaacagcaacaaccuggacuccaaagucggcggcaacuacaauuaccuguaccggcuguuccggaaguccaaucugaagcccuucgagcgggacaucagcaccgaaaucuaucaggccggcagcaccccuugcaacggcguggaaggcuucaacugcuacuucccacugcaguccuacggcuuucagcccacaaauggcgugggcuaucagcccuacagagugguggugcugagcuucgaacugcugcaugcuccugccacagugugcggcccuaagaaaagcaccaaucucgugaagaacaaaugcgugaacuucaacuucaacggccugaccggcaccggcgugcugacagagagcaacaagaaguuccugccauuccagcaguuuggccgggauaucgccgauaccacagacgccguuagagauccccagacacuggaaauccuggacaucaccccaugcagcuucggcggagugucugugaucaccccuggcaccaacaccagcaaucagguggcagugcuguaccagggcgugaacuguaccgaagugcccguggccauucacgccgaucagcugacaccuacauggcggguguacuccaccggcagcaauguguuucagaccagagccggcugucugaucggagccgagcacgugaacaauagcuacgagugcgacauccccaucggcgcuggcaucugugccagcuaccagacacagacaaacagccccagacgggcuagaagcguggccagccagagcaucauugccuacacaaugucucugggcgccgagaacagcguggccuacuccaacaacucuaucgcuauccccaccaacuucaccaucagcgugaccaccgagauccugccuguguccaugaccaagaccagcguggacugcaccauguacaucugcggcgauuccaccgagugcuccaaccugcugcugcaguacggcagcuucugcacccagcugaauagagcccugacagggaucgccguggaacaggacaagaacacccaagagguguucgcccaagugaagcaaaucuacaagaccccuccuaucaaggacuucggcggcuucaauuucagccagauucugcccgauccuagcaagcccagcaagcggagcuucaucgaggaccugcuguucaacaaagugacacuggccgacgccggcuucaucaagcaguauggcgauugucugggcgacauugccgccagggaucugauuugcgcccagaaguuuaacggacugacagugcugccuccucugcugaccgaugagaugaucgcccaguacacaucugcccugcuggccggcacaaucacaagcggcuggacauuuggagcuggcgccgcucugcagauccccuuugcuaugcagauggccuaccgguucaacggcaucggagugacccagaaugugcuguacgagaaccagaagcugaucgccaaccaguucaacagcgccaucggcaagauccaggacagccugagcagcacagcaagcgcccugggaaagcugcaggacguggucaaccagaaugcccaggcacugaacacccuggucaagcagcuguccuccaacuucggcgccaucagcucugugcugaacgauauccugagcagacuggacaaggucgaggccgaggugcagaucgacagacugaucacaggcagacugcagagccuccagacauacgugacccagcagcugaucagagccgccgagauuagagccucugccaaucuggccgccaccaagaugucugagugugugcugggccagagcaagagaguggacuuuugcggcaagggcuaccaccugaugagcuucccucagucugccccucacggcgugguguuucugcacgugacauaugugcccgcucaagagaagaauuucaccaccgcuccagccaucugccacgacggcaaagcccacuuuccuagagaaggcguguucguguccaacggcacccauugguucgugacacagcggaacuucuacgagccccagaucaucaccaccgacaacaccuucgugucuggcaacugcgacguugugaucggcauugugaacaauaccguguacgacccucugcagcccgagcuggacagcuucaaagaggaacuggacaaguacuuuaagaaccacacaagccccgacguggaccugggcgauaucagcggaaucaaugccagcgucgugaacauccagaaagagaucgaccggcugaacgagguggccaagaaucugaacgagagccugaucgaccugcaagaacuggggaaguacgagcaguacaucaaguggcccugguacaucuggcugggcuuuaucgccggacugauugccaucgugauggucacaaucaugcuguguugcaugaccagcugcuguagcugccugaagggcuguuguagcuguggcagcugcugcaaguucgacgaggacgauucugagcccgugcugaagggcgugaaacugcacuacaccugaugacucgagcugguacugcaugcacgcaaugcuagcugccccuuucccguccuggguaccccgagucucccccgaccucgggucccagguaugcucccaccuccaccugccccacucaccaccucugcuaguuccagacaccucccaagcacgcagcaaugcagcucaaaacgcuuagccuagccacacccccacgggaaacagcagugauuaaccuuuagcaauaaacgaaaguuuaacuaagcuauacuaaccccaggguuggucaauuucgugccagccacacccuggagcuagcaaaaaaaaaaaaaaaaaaaaaaaaaaaaaagcauaugacuaaaaaaaaaaaaaaaaaaaaaaaaaaaaaaaaaaaaaaaaaaaaaaaaaaaaaaaaaaaaaaaaaaaaaa

SEQ ID NO: 26788 - RNA, 4283 nt, Artificial Sequence
  SARS-CoV-2/Wuhan/WIV05/2019__EPI_ISL_402128 spike protein mRNA gc mod (1-1273)(Y453F_D614G)
agaauaaacuaguauucuucugguccccacagacucagagagaacccgccaccauguucguguuucuggugcugcugccccugguguccagccagugugugaaccugaccaccagaacacagcugccuccagccuacaccaacagcuucaccagaggcguguacuaccccgacaagguguucagauccagcgugcugcacucuacccaggaccuguuccugccuuucuucagcaacgugaccugguuccacgccauccacguguccggcaccaauggcaccaagagauucgacaaccccgugcugcccuucaacgacgggguguacuuugccagcaccgagaaguccaacaucaucagaggcuggaucuucggcaccacacuggacagcaagacccagagccugcugaucgugaacaacgccaccaacguggucaucaaagugugcgaguuccaguucugcaacgaccccuuccugggcgucuacuaccacaagaacaacaagagcuggauggaaagcgaguuccggguguacagcagcgccaacaacugcaccuucgaguacgugucccagccuuuccugauggaccuggaaggcaagcagggcaacuucaagaaccugcgcgaguucguguucaagaacaucgacggcuacuucaaaaucuacagcaagcacaccccuaucaaccucgugcgggaucugccucagggcuucucugcucuggaaccccugguggaucugcccaucggcaucaacaucacccgguuucagacacugcuggcccugcacagaagcuaccugacaccuggcgauagcagcagcggauggacagcuggugccgccgcuuacuaugugggcuaccugcagccuagaaccuuccugcugaaguacaacgagaacggcaccaucaccgacgccguggauugugcucuggauccucugagcgagacaaagugcacccugaaguccuucaccguggaaaagggcaucuaccagaccagcaacuuccgggugcagcccaccgaauccaucgugcgguuccccaauaucaccaaucugugccccuucggcgagguguucaaugccaccagauucgccucuguguacgccuggaaccggaagcggaucagcaauugcguggccgacuacuccgugcuguacaacuccgccagcuucagcaccuucaagugcuacggcguguccccuaccaagcugaacgaccugugcuucacaaacguguacgccgacagcuucgugauccggggagaugaagugcggcagauugccccuggacagacaggcaagaucgccgacuacaacuacaagcugcccgacgacuucaccggcugugugauugccuggaacagcaacaaccuggacuccaaagucggcggcaacuacaauuaccuguuccggcuguuccggaaguccaaucugaagcccuucgagcgggacaucagcaccgaaaucuaucaggccggcagcaccccuugcaacggcguggaaggcuucaacugcuacuucccacugcaguccuacggcuuucagcccacaaauggcgugggcuaucagcccuacagagugguggugcugagcuucgaacugcugcaugcuccugccacagugugcggcccuaagaaaagcaccaaucucgugaagaacaaaugcgugaacuucaacuucaacggccugaccggcaccggcgugcugacagagagcaacaagaaguuccugccauuccagcaguuuggccgggauaucgccgauaccacagacgccguuagagauccccagacacuggaaauccuggacaucaccccaugcagcuucggcggagugucugugaucaccccuggcaccaacaccagcaaucagguggcagugcuguaccagggcgugaacuguaccgaagugcccguggccauucacgccgaucagcugacaccuacauggcggguguacuccaccggcagcaauguguuucagaccagagccggcugucugaucggagccgagcacgugaacaauagcuacgagugcgacauccccaucggcgcuggcaucugugccagcuaccagacacagacaaacagccccagacgggcuagaagcguggccagccagagcaucauugccuacacaaugucucugggcgccgagaacagcguggccuacuccaacaacucuaucgcuauccccaccaacuucaccaucagcgugaccaccgagauccugccuguguccaugaccaagaccagcguggacugcaccauguacaucugcggcgauuccaccgagugcuccaaccugcugcugcaguacggcagcuucugcacccagcugaauagagcccugacagggaucgccguggaacaggacaagaacacccaagagguguucgcccaagugaagcaaaucuacaagaccccuccuaucaaggacuucggcggcuucaauuucagccagauucugcccgauccuagcaagcccagcaagcggagcuucaucgaggaccugcuguucaacaaagugacacuggccgacgccggcuucaucaagcaguauggcgauugucugggcgacauugccgccagggaucugauuugcgcccagaaguuuaacggacugacagugcugccuccucugcugaccgaugagaugaucgcccaguacacaucugcccugcuggccggcacaaucacaagcggcuggacauuuggagcuggcgccgcucugcagauccccuuugcuaugcagauggccuaccgguucaacggcaucggagugacccagaaugugcuguacgagaaccagaagcugaucgccaaccaguucaacagcgccaucggcaagauccaggacagccugagcagcacagcaagcgcccugggaaagcugcaggacguggucaaccagaaugcccaggcacugaacacccuggucaagcagcuguccuccaacuucggcgccaucagcucugugcugaacgauauccugagcagacuggacaaggucgaggccgaggugcagaucgacagacugaucacaggcagacugcagagccuccagacauacgugacccagcagcugaucagagccgccgagauuagagccucugccaaucuggccgccaccaagaugucugagugugugcugggccagagcaagagaguggacuuuugcggcaagggcuaccaccugaugagcuucccucagucugccccucacggcgugguguuucugcacgugacauaugugcccgcucaagagaagaauuucaccaccgcuccagccaucugccacgacggcaaagcccacuuuccuagagaaggcguguucguguccaacggcacccauugguucgugacacagcggaacuucuacgagccccagaucaucaccaccgacaacaccuucgugucuggcaacugcgacguugugaucggcauugugaacaauaccguguacgacccucugcagcccgagcuggacagcuucaaagaggaacuggacaaguacuuuaagaaccacacaagccccgacguggaccugggcgauaucagcggaaucaaugccagcgucgugaacauccagaaagagaucgaccggcugaacgagguggccaagaaucugaacgagagccugaucgaccugcaagaacuggggaaguacgagcaguacaucaaguggcccugguacaucuggcugggcuuuaucgccggacugauugccaucgugauggucacaaucaugcuguguugcaugaccagcugcuguagcugccugaagggcuguuguagcuguggcagcugcugcaaguucgacgaggacgauucugagcccgugcugaagggcgugaaacugcacuacaccugaugacucgagcugguacugcaugcacgcaaugcuagcugccccuuucccguccuggguaccccgagucucccccgaccucgggucccagguaugcucccaccuccaccugccccacucaccaccucugcuaguuccagacaccucccaagcacgcagcaaugcagcucaaaacgcuuagccuagccacacccccacgggaaacagcagugauuaaccuuuagcaauaaacgaaaguuuaacuaagcuauacuaaccccaggguuggucaauuucgugccagccacacccuggagcuagcaaaaaaaaaaaaaaaaaaaaaaaaaaaaaagcauaugacuaaaaaaaaaaaaaaaaaaaaaaaaaaaaaaaaaaaaaaaaaaaaaaaaaaaaaaaaaaaaaaaaaaaaaa

SEQ ID NO: 26789 - RNA, 4283 nt, Artificial Sequence
  SARS-CoV-2/Wuhan/WIV05/2019__EPI_ISL_402128 spike protein mRNA gc mod (1-1273)(D614G_I692V)
agaauaaacuaguauucuucugguccccacagacucagagagaacccgccaccauguucguguuucuggugcugcugccccugguguccagccagugugugaaccugaccaccagaacacagcugccuccagccuacaccaacagcuucaccagaggcguguacuaccccgacaagguguucagauccagcgugcugcacucuacccaggaccuguuccugccuuucuucagcaacgugaccugguuccacgccauccacguguccggcaccaauggcaccaagagauucgacaaccccgugcugcccuucaacgacgggguguacuuugccagcaccgagaaguccaacaucaucagaggcuggaucuucggcaccacacuggacagcaagacccagagccugcugaucgugaacaacgccaccaacguggucaucaaagugugcgaguuccaguucugcaacgaccccuuccugggcgucuacuaccacaagaacaacaagagcuggauggaaagcgaguuccggguguacagcagcgccaacaacugcaccuucgaguacgugucccagccuuuccugauggaccuggaaggcaagcagggcaacuucaagaaccugcgcgaguucguguucaagaacaucgacggcuacuucaaaaucuacagcaagcacaccccuaucaaccucgugcgggaucugccucagggcuucucugcucuggaaccccugguggaucugcccaucggcaucaacaucacccgguuucagacacugcuggcccugcacagaagcuaccugacaccuggcgauagcagcagcggauggacagcuggugccgccgcuuacuaugugggcuaccugcagccuagaaccuuccugcugaaguacaacgagaacggcaccaucaccgacgccguggauugugcucuggauccucugagcgagacaaagugcacccugaaguccuucaccguggaaaagggcaucuaccagaccagcaacuuccgggugcagcccaccgaauccaucgugcgguuccccaauaucaccaaucugugccccuucggcgagguguucaaugccaccagauucgccucuguguacgccuggaaccggaagcggaucagcaauugcguggccgacuacuccgugcuguacaacuccgccagcuucagcaccuucaagugcuacggcguguccccuaccaagcugaacgaccugugcuucacaaacguguacgccgacagcuucgugauccggggagaugaagugcggcagauugccccuggacagacaggcaagaucgccgacuacaacuacaagcugcccgacgacuucaccggcugugugauugccuggaacagcaacaaccuggacuccaaagucggcggcaacuacaauuaccuguaccggcuguuccggaaguccaaucugaagcccuucgagcgggacaucagcaccgaaaucuaucaggccggcagcaccccuugcaacggcguggaaggcuucaacugcuacuucccacugcaguccuacggcuuucagcccacaaauggcgugggcuaucagcccuacagagugguggugcugagcuucgaacugcugcaugcuccugccacagugugcggcccuaagaaaagcaccaaucucgugaagaacaaaugcgugaacuucaacuucaacggccugaccggcaccggcgugcugacagagagcaacaagaaguuccugccauuccagcaguuuggccgggauaucgccgauaccacagacgccguuagagauccccagacacuggaaauccuggacaucaccccaugcagcuucggcggagugucugugaucaccccuggcaccaacaccagcaaucagguggcagugcuguaccagggcgugaacuguaccgaagugcccguggccauucacgccgaucagcugacaccuacauggcggguguacuccaccggcagcaauguguuucagaccagagccggcugucugaucggagccgagcacgugaacaauagcuacgagugcgacauccccaucggcgcuggcaucugugccagcuaccagacacagacaaacagccccagacgggcuagaagcguggccagccagagcgugauugccuacacaaugucucugggcgccgagaacagcguggccuacuccaacaacucuaucgcuauccccaccaacuucaccaucagcgugaccaccgagauccugccuguguccaugaccaagaccagcguggacugcaccauguacaucugcggcgauuccaccgagugcuccaaccugcugcugcaguacggcagcuucugcacccagcugaauagagcccugacagggaucgccguggaacaggacaagaacacccaagagguguucgcccaagugaagcaaaucuacaagaccccuccuaucaaggacuucggcggcuucaauuucagccagauucugcccgauccuagcaagcccagcaagcggagcuucaucgaggaccugcuguucaacaaagugacacuggccgacgccggcuucaucaagcaguauggcgauugucugggcgacauugccgccagggaucugauuugcgcccagaaguuuaacggacugacagugcugccuccucugcugaccgaugagaugaucgcccaguacacaucugcccugcuggccggcacaaucacaagcggcuggacauuuggagcuggcgccgcucugcagauccccuuugcuaugcagauggccuaccgguucaacggcaucggagugacccagaaugugcuguacgagaaccagaagcugaucgccaaccaguucaacagcgccaucggcaagauccaggacagccugagcagcacagcaagcgcccugggaaagcugcaggacguggucaaccagaaugcccaggcacugaacacccuggucaagcagcuguccuccaacuucggcgccaucagcucugugcugaacgauauccugagcagacuggacaaggucgaggccgaggugcagaucgacagacugaucacaggcagacugcagagccuccagacauacgugacccagcagcugaucagagccgccgagauuagagccucugccaaucuggccgccaccaagaugucugagugugugcugggccagagcaagagaguggacuuuugcggcaagggcuaccaccugaugagcuucccucagucugccccucacggcgugguguuucugcacgugacauaugugcccgcucaagagaagaauuucaccaccgcuccagccaucugccacgacggcaaagcccacuuuccuagagaaggcguguucguguccaacggcacccauugguucgugacacagcggaacuucuacgagccccagaucaucaccaccgacaacaccuucgugucuggcaacugcgacguugugaucggcauugugaacaauaccguguacgacccucugcagcccgagcuggacagcuucaaagaggaacuggacaaguacuuuaagaaccacacaagccccgacguggaccugggcgauaucagcggaaucaaugccagcgucgugaacauccagaaagagaucgaccggcugaacgagguggccaagaaucugaacgagagccugaucgaccugcaagaacuggggaaguacgagcaguacaucaaguggcccugguacaucuggcugggcuuuaucgccggacugauugccaucgugauggucacaaucaugcuguguugcaugaccagcugcuguagcugccugaagggcuguuguagcuguggcagcugcugcaaguucgacgaggacgauucugagcccgugcugaagggcgugaaacugcacuacaccugaugacucgagcugguacugcaugcacgcaaugcuagcugccccuuucccguccuggguaccccgagucucccccgaccucgggucccagguaugcucccaccuccaccugccccacucaccaccucugcuaguuccagacaccucccaagcacgcagcaaugcagcucaaaacgcuuagccuagccacacccccacgggaaacagcagugauuaaccuuuagcaauaaacgaaaguuuaacuaagcuauacuaaccccaggguuggucaauuucgugccagccacacccuggagcuagcaaaaaaaaaaaaaaaaaaaaaaaaaaaaaagcauaugacuaaaaaaaaaaaaaaaaaaaaaaaaaaaaaaaaaaaaaaaaaaaaaaaaaaaaaaaaaaaaaaaaaaaaaa

SEQ ID NO: 26790 - RNA, 4283 nt, Artificial Sequence
  SARS-CoV-2/Wuhan/WIV05/2019__EPI_ISL_402128 spike protein mRNA gc mod (1-1273)(D614G_M1229I)
agaauaaacuaguauucuucugguccccacagacucagagagaacccgccaccauguucguguuucuggugcugcugccccugguguccagccagugugugaaccugaccaccagaacacagcugccuccagccuacaccaacagcuucaccagaggcguguacuaccccgacaagguguucagauccagcgugcugcacucuacccaggaccuguuccugccuuucuucagcaacgugaccugguuccacgccauccacguguccggcaccaauggcaccaagagauucgacaaccccgugcugcccuucaacgacgggguguacuuugccagcaccgagaaguccaacaucaucagaggcuggaucuucggcaccacacuggacagcaagacccagagccugcugaucgugaacaacgccaccaacguggucaucaaagugugcgaguuccaguucugcaacgaccccuuccugggcgucuacuaccacaagaacaacaagagcuggauggaaagcgaguuccggguguacagcagcgccaacaacugcaccuucgaguacgugucccagccuuuccugauggaccuggaaggcaagcagggcaacuucaagaaccugcgcgaguucguguucaagaacaucgacggcuacuucaaaaucuacagcaagcacaccccuaucaaccucgugcgggaucugccucagggcuucucugcucuggaaccccugguggaucugcccaucggcaucaacaucacccgguuucagacacugcuggcccugcacagaagcuaccugacaccuggcgauagcagcagcggauggacagcuggugccgccgcuuacuaugugggcuaccugcagccuagaaccuuccugcugaaguacaacgagaacggcaccaucaccgacgccguggauugugcucuggauccucugagcgagacaaagugcacccugaaguccuucaccguggaaaagggcaucuaccagaccagcaacuuccgggugcagcccaccgaauccaucgugcgguuccccaauaucaccaaucugugccccuucggcgagguguucaaugccaccagauucgccucuguguacgccuggaaccggaagcggaucagcaauugcguggccgacuacuccgugcuguacaacuccgccagcuucagcaccuucaagugcuacggcguguccccuaccaagcugaacgaccugugcuucacaaacguguacgccgacagcuucgugauccggggagaugaagugcggcagauugccccuggacagacaggcaagaucgccgacuacaacuacaagcugcccgacgacuucaccggcugugugauugccuggaacagcaacaaccuggacuccaaagucggcggcaacuacaauuaccuguaccggcuguuccggaaguccaaucugaagcccuucgagcgggacaucagcaccgaaaucuaucaggccggcagcaccccuugcaacggcguggaaggcuucaacugcuacuucccacugcaguccuacggcuuucagcccacaaauggcgugggcuaucagcccuacagagugguggugcugagcuucgaacugcugcaugcuccugccacagugugcggcccuaagaaaagcaccaaucucgugaagaacaaaugcgugaacuucaacuucaacggccugaccggcaccggcgugcugacagagagcaacaagaaguuccugccauuccagcaguuuggccgggauaucgccgauaccacagacgccguuagagauccccagacacuggaaauccuggacaucaccccaugcagcuucggcggagugucugugaucaccccuggcaccaacaccagcaaucagguggcagugcuguaccagggcgugaacuguaccgaagugcccguggccauucacgccgaucagcugacaccuacauggcggguguacuccaccggcagcaauguguuucagaccagagccggcugucugaucggagccgagcacgugaacaauagcuacgagugcgacauccccaucggcgcuggcaucugugccagcuaccagacacagacaaacagccccagacgggcuagaagcguggccagccagagcaucauugccuacacaaugucucugggcgccgagaacagcguggccuacuccaacaacucuaucgcuauccccaccaacuucaccaucagcgugaccaccgagauccugccuguguccaugaccaagaccagcguggacugcaccauguacaucugcggcgauuccaccgagugcuccaaccugcugcugcaguacggcagcuucugcacccagcugaauagagcccugacagggaucgccguggaacaggacaagaacacccaagagguguucgcccaagugaagcaaaucuacaagaccccuccuaucaaggacuucggcggcuucaauuucagccagauucugcccgauccuagcaagcccagcaagcggagcuucaucgaggaccugcuguucaacaaagugacacuggccgacgccggcuucaucaagcaguauggcgauugucugggcgacauugccgccagggaucugauuugcgcccagaaguuuaacggacugacagugcugccuccucugcugaccgaugagaugaucgcccaguacacaucugcccugcuggccggcacaaucacaagcggcuggacauuuggagcuggcgccgcucugcagauccccuuugcuaugcagauggccuaccgguucaacggcaucggagugacccagaaugugcuguacgagaaccagaagcugaucgccaaccaguucaacagcgccaucggcaagauccaggacagccugagcagcacagcaagcgcccugggaaagcugcaggacguggucaaccagaaugcccaggcacugaacacccuggucaagcagcuguccuccaacuucggcgccaucagcucugugcugaacgauauccugagcagacuggacaaggucgaggccgaggugcagaucgacagacugaucacaggcagacugcagagccuccagacauacgugacccagcagcugaucagagccgccgagauuagagccucugccaaucuggccgccaccaagaugucugagugugugcugggccagagcaagagaguggacuuuugcggcaagggcuaccaccugaugagcuucccucagucugccccucacggcgugguguuucugcacgugacauaugugcccgcucaagagaagaauuucaccaccgcuccagccaucugccacgacggcaaagcccacuuuccuagagaaggcguguucguguccaacggcacccauugguucgugacacagcggaacuucuacgagccccagaucaucaccaccgacaacaccuucgugucuggcaacugcgacguugugaucggcauugugaacaauaccguguacgacccucugcagcccgagcuggacagcuucaaagaggaacuggacaaguacuuuaagaaccacacaagccccgacguggaccugggcgauaucagcggaaucaaugccagcgucgugaacauccagaaagagaucgaccggcugaacgagguggccaagaaucugaacgagagccugaucgaccugcaagaacuggggaaguacgagcaguacaucaaguggcccugguacaucuggcugggcuuuaucgccggacugauugccaucgugaucgucacaaucaugcuguguugcaugaccagcugcuguagcugccugaagggcuguuguagcuguggcagcugcugcaaguucgacgaggacgauucugagcccgugcugaagggcgugaaacugcacuacaccugaugacucgagcugguacugcaugcacgcaaugcuagcugccccuuucccguccuggguaccccgagucucccccgaccucgggucccagguaugcucccaccuccaccugccccacucaccaccucugcuaguuccagacaccucccaagcacgcagcaaugcagcucaaaacgcuuagccuagccacacccccacgggaaacagcagugauuaaccuuuagcaauaaacgaaaguuuaacuaagcuauacuaaccccaggguuggucaauuucgugccagccacacccuggagcuagcaaaaaaaaaaaaaaaaaaaaaaaaaaaaaagcauaugacuaaaaaaaaaaaaaaaaaaaaaaaaaaaaaaaaaaaaaaaaaaaaaaaaaaaaaaaaaaaaaaaaaaaaaa

SEQ ID NO: 26791 - RNA, 4277 nt, Artificial Sequence
  SARS-CoV-2/Wuhan/WIV05/2019__EPI_ISL_402128 spike protein mRNA gc mod (1-1273)(H69del_V70del_A222V_Y453F_S477N_D614G_I692V)
agaauaaacuaguauucuucugguccccacagacucagagagaacccgccaccauguucguguuucuggugcugcugccccugguguccagccagugugugaaccugaccaccagaacacagcugccuccagccuacaccaacagcuucaccagaggcguguacuaccccgacaagguguucagauccagcgugcugcacucuacccaggaccuguuccugccuuucuucagcaacgugaccugguuccacgccaucuccggcaccaauggcaccaagagauucgacaaccccgugcugcccuucaacgacgggguguacuuugccagcaccgagaaguccaacaucaucagaggcuggaucuucggcaccacacuggacagcaagacccagagccugcugaucgugaacaacgccaccaacguggucaucaaagugugcgaguuccaguucugcaacgaccccuuccugggcgucuacuaccacaagaacaacaagagcuggauggaaagcgaguuccggguguacagcagcgccaacaacugcaccuucgaguacgugucccagccuuuccugauggaccuggaaggcaagcagggcaacuucaagaaccugcgcgaguucguguucaagaacaucgacggcuacuucaaaaucuacagcaagcacaccccuaucaaccucgugcgggaucugccucagggcuucucugugcuggaaccccugguggaucugcccaucggcaucaacaucacccgguuucagacacugcuggcccugcacagaagcuaccugacaccuggcgauagcagcagcggauggacagcuggugccgccgcuuacuaugugggcuaccugcagccuagaaccuuccugcugaaguacaacgagaacggcaccaucaccgacgccguggauugugcucuggauccucugagcgagacaaagugcacccugaaguccuucaccguggaaaagggcaucuaccagaccagcaacuuccgggugcagcccaccgaauccaucgugcgguuccccaauaucaccaaucugugccccuucggcgagguguucaaugccaccagauucgccucuguguacgccuggaaccggaagcggaucagcaauugcguggccgacuacuccgugcuguacaacuccgccagcuucagcaccuucaagugcuacggcguguccccuaccaagcugaacgaccugugcuucacaaacguguacgccgacagcuucgugauccggggagaugaagugcggcagauugccccuggacagacaggcaagaucgccgacuacaacuacaagcugcccgacgacuucaccggcugugugauugccuggaacagcaacaaccuggacuccaaagucggcggcaacuacaauuaccuguuccggcuguuccggaaguccaaucugaagcccuucgagcgggacaucagcaccgaaaucuaucaggccggcaacaccccuugcaacggcguggaaggcuucaacugcuacuucccacugcaguccuacggcuuucagcccacaaauggcgugggcuaucagcccuacagagugguggugcugagcuucgaacugcugcaugcuccugccacagugugcggcccuaagaaaagcaccaaucucgugaagaacaaaugcgugaacuucaacuucaacggccugaccggcaccggcgugcugacagagagcaacaagaaguuccugccauuccagcaguuuggccgggauaucgccgauaccacagacgccguuagagauccccagacacuggaaauccuggacaucaccccaugcagcuucggcggagugucugugaucaccccuggcaccaacaccagcaaucagguggcagugcuguaccagggcgugaacuguaccgaagugcccguggccauucacgccgaucagcugacaccuacauggcggguguacuccaccggcagcaauguguuucagaccagagccggcugucugaucggagccgagcacgugaacaauagcuacgagugcgacauccccaucggcgcuggcaucugugccagcuaccagacacagacaaacagccccagacgggcuagaagcguggccagccagagcgugauugccuacacaaugucucugggcgccgagaacagcguggccuacuccaacaacucuaucgcuauccccaccaacuucaccaucagcgugaccaccgagauccugccuguguccaugaccaagaccagcguggacugcaccauguacaucugcggcgauuccaccgagugcuccaaccugcugcugcaguacggcagcuucugcacccagcugaauagagcccugacagggaucgccguggaacaggacaagaacacccaagagguguucgcccaagugaagcaaaucuacaagaccccuccuaucaaggacuucggcggcuucaauuucagccagauucugcccgauccuagcaagcccagcaagcggagcuucaucgaggaccugcuguucaacaaagugacacuggccgacgccggcuucaucaagcaguauggcgauugucugggcgacauugccgccagggaucugauuugcgcccagaaguuuaacggacugacagugcugccuccucugcugaccgaugagaugaucgcccaguacacaucugcccugcuggccggcacaaucacaagcggcuggacauuuggagcuggcgccgcucugcagauccccuuugcuaugcagauggccuaccgguucaacggcaucggagugacccagaaugugcuguacgagaaccagaagcugaucgccaaccaguucaacagcgccaucggcaagauccaggacagccugagcagcacagcaagcgcccugggaaagcugcaggacguggucaaccagaaugcccaggcacugaacacccuggucaagcagcuguccuccaacuucggcgccaucagcucugugcugaacgauauccugagcagacuggacaaggucgaggccgaggugcagaucgacagacugaucacaggcagacugcagagccuccagacauacgugacccagcagcugaucagagccgccgagauuagagccucugccaaucuggccgccaccaagaugucugagugugugcugggccagagcaagagaguggacuuuugcggcaagggcuaccaccugaugagcuucccucagucugccccucacggcgugguguuucugcacgugacauaugugcccgcucaagagaagaauuucaccaccgcuccagccaucugccacgacggcaaagcccacuuuccuagagaaggcguguucguguccaacggcacccauugguucgugacacagcggaacuucuacgagccccagaucaucaccaccgacaacaccuucgugucuggcaacugcgacguugugaucggcauugugaacaauaccguguacgacccucugcagcccgagcuggacagcuucaaagaggaacuggacaaguacuuuaagaaccacacaagccccgacguggaccugggcgauaucagcggaaucaaugccagcgucgugaacauccagaaagagaucgaccggcugaacgagguggccaagaaucugaacgagagccugaucgaccugcaagaacuggggaaguacgagcaguacaucaaguggcccugguacaucuggcugggcuuuaucgccggacugauugccaucgugauggucacaaucaugcuguguugcaugaccagcugcuguagcugccugaagggcuguuguagcuguggcagcugcugcaaguucgacgaggacgauucugagcccgugcugaagggcgugaaacugcacuacaccugaugacucgagcugguacugcaugcacgcaaugcuagcugccccuuucccguccuggguaccccgagucucccccgaccucgggucccagguaugcucccaccuccaccugccccacucaccaccucugcuaguuccagacaccucccaagcacgcagcaaugcagcucaaaacgcuuagccuagccacacccccacgggaaacagcagugauuaaccuuuagcaauaaacgaaaguuuaacuaagcuauacuaaccccaggguuggucaauuucgugccagccacacccuggagcuagcaaaaaaaaaaaaaaaaaaaaaaaaaaaaaagcauaugacuaaaaaaaaaaaaaaaaaaaaaaaaaaaaaaaaaaaaaaaaaaaaaaaaaaaaaaaaaaaaaaaaaaaaaa

SEQ ID NO: 26792 - RNA, 4277 nt, Artificial Sequence
  SARS-CoV-2/Wuhan/WIV05/2019__EPI_ISL_402128 spike protein mRNA gc mod (1-1273)(H69del_V70del_Y453F_D614G_I692V_M1229I)
agaauaaacuaguauucuucugguccccacagacucagagagaacccgccaccauguucguguuucuggugcugcugccccugguguccagccagugugugaaccugaccaccagaacacagcugccuccagccuacaccaacagcuucaccagaggcguguacuaccccgacaagguguucagauccagcgugcugcacucuacccaggaccuguuccugccuuucuucagcaacgugaccugguuccacgccaucuccggcaccaauggcaccaagagauucgacaaccccgugcugcccuucaacgacgggguguacuuugccagcaccgagaaguccaacaucaucagaggcuggaucuucggcaccacacuggacagcaagacccagagccugcugaucgugaacaacgccaccaacguggucaucaaagugugcgaguuccaguucugcaacgaccccuuccugggcgucuacuaccacaagaacaacaagagcuggauggaaagcgaguuccggguguacagcagcgccaacaacugcaccuucgaguacgugucccagccuuuccugauggaccuggaaggcaagcagggcaacuucaagaaccugcgcgaguucguguucaagaacaucgacggcuacuucaaaaucuacagcaagcacaccccuaucaaccucgugcgggaucugccucagggcuucucugcucuggaaccccugguggaucugcccaucggcaucaacaucacccgguuucagacacugcuggcccugcacagaagcuaccugacaccuggcgauagcagcagcggauggacagcuggugccgccgcuuacuaugugggcuaccugcagccuagaaccuuccugcugaaguacaacgagaacggcaccaucaccgacgccguggauugugcucuggauccucugagcgagacaaagugcacccugaaguccuucaccguggaaaagggcaucuaccagaccagcaacuuccgggugcagcccaccgaauccaucgugcgguuccccaauaucaccaaucugugccccuucggcgagguguucaaugccaccagauucgccucuguguacgccuggaaccggaagcggaucagcaauugcguggccgacuacuccgugcuguacaacuccgccagcuucagcaccuucaagugcuacggcguguccccuaccaagcugaacgaccugugcuucacaaacguguacgccgacagcuucgugauccggggagaugaagugcggcagauugccccuggacagacaggcaagaucgccgacuacaacuacaagcugcccgacgacuucaccggcugugugauugccuggaacagcaacaaccuggacuccaaagucggcggcaacuacaauuaccuguuccggcuguuccggaaguccaaucugaagcccuucgagcgggacaucagcaccgaaaucuaucaggccggcagcaccccuugcaacggcguggaaggcuucaacugcuacuucccacugcaguccuacggcuuucagcccacaaauggcgugggcuaucagcccuacagagugguggugcugagcuucgaacugcugcaugcuccugccacagugugcggcccuaagaaaagcaccaaucucgugaagaacaaaugcgugaacuucaacuucaacggccugaccggcaccggcgugcugacagagagcaacaagaaguuccugccauuccagcaguuuggccgggauaucgccgauaccacagacgccguuagagauccccagacacuggaaauccuggacaucaccccaugcagcuucggcggagugucugugaucaccccuggcaccaacaccagcaaucagguggcagugcuguaccagggcgugaacuguaccgaagugcccguggccauucacgccgaucagcugacaccuacauggcggguguacuccaccggcagcaauguguuucagaccagagccggcugucugaucggagccgagcacgugaacaauagcuacgagugcgacauccccaucggcgcuggcaucugugccagcuaccagacacagacaaacagccccagacgggcuagaagcguggccagccagagcgugauugccuacacaaugucucugggcgccgagaacagcguggccuacuccaacaacucuaucgcuauccccaccaacuucaccaucagcgugaccaccgagauccugccuguguccaugaccaagaccagcguggacugcaccauguacaucugcggcgauuccaccgagugcuccaaccugcugcugcaguacggcagcuucugcacccagcugaauagagcccugacagggaucgccguggaacaggacaagaacacccaagagguguucgcccaagugaagcaaaucuacaagaccccuccuaucaaggacuucggcggcuucaauuucagccagauucugcccgauccuagcaagcccagcaagcggagcuucaucgaggaccugcuguucaacaaagugacacuggccgacgccggcuucaucaagcaguauggcgauugucugggcgacauugccgccagggaucugauuugcgcccagaaguuuaacggacugacagugcugccuccucugcugaccgaugagaugaucgcccaguacacaucugcccugcuggccggcacaaucacaagcggcuggacauuuggagcuggcgccgcucugcagauccccuuugcuaugcagauggccuaccgguucaacggcaucggagugacccagaaugugcuguacgagaaccagaagcugaucgccaaccaguucaacagcgccaucggcaagauccaggacagccugagcagcacagcaagcgcccugggaaagcugcaggacguggucaaccagaaugcccaggcacugaacacccuggucaagcagcuguccuccaacuucggcgccaucagcucugugcugaacgauauccugagcagacuggacaaggucgaggccgaggugcagaucgacagacugaucacaggcagacugcagagccuccagacauacgugacccagcagcugaucagagccgccgagauuagagccucugccaaucuggccgccaccaagaugucugagugugugcugggccagagcaagagaguggacuuuugcggcaagggcuaccaccugaugagcuucccucagucugccccucacggcgugguguuucugcacgugacauaugugcccgcucaagagaagaauuucaccaccgcuccagccaucugccacgacggcaaagcccacuuuccuagagaaggcguguucguguccaacggcacccauugguucgugacacagcggaacuucuacgagccccagaucaucaccaccgacaacaccuucgugucuggcaacugcgacguugugaucggcauugugaacaauaccguguacgacccucugcagcccgagcuggacagcuucaaagaggaacuggacaaguacuuuaagaaccacacaagccccgacguggaccugggcgauaucagcggaaucaaugccagcgucgugaacauccagaaagagaucgaccggcugaacgagguggccaagaaucugaacgagagccugaucgaccugcaagaacuggggaaguacgagcaguacaucaaguggcccugguacaucuggcugggcuuuaucgccggacugauugccaucgugaucgucacaaucaugcuguguugcaugaccagcugcuguagcugccugaagggcuguuguagcuguggcagcugcugcaaguucgacgaggacgauucugagcccgugcugaagggcgugaaacugcacuacaccugaugacucgagcugguacugcaugcacgcaaugcuagcugccccuuucccguccuggguaccccgagucucccccgaccucgggucccagguaugcucccaccuccaccugccccacucaccaccucugcuaguuccagacaccucccaagcacgcagcaaugcagcucaaaacgcuuagccuagccacacccccacgggaaacagcagugauuaaccuuuagcaauaaacgaaaguuuaacuaagcuauacuaaccccaggguuggucaauuucgugccagccacacccuggagcuagcaaaaaaaaaaaaaaaaaaaaaaaaaaaaaagcauaugacuaaaaaaaaaaaaaaaaaaaaaaaaaaaaaaaaaaaaaaaaaaaaaaaaaaaaaaaaaaaaaaaaaaaaaa

SEQ ID NO: 26793 - RNA, 4274 nt, Artificial Sequence
  SARS-CoV-2/Wuhan/WIV05/2019__EPI_ISL_402128 spike protein mRNA gc mod (1-1273)(H69del_V70del_Y144del_N501Y_A570D_D614G_P681H_T716I_S982 A_D1118H)
agaauaaacuaguauucuucugguccccacagacucagagagaacccgccaccauguucguguuucuggugcugcugccccugguguccagccagugugugaaccugaccaccagaacacagcugccuccagccuacaccaacagcuucaccagaggcguguacuaccccgacaagguguucagauccagcgugcugcacucuacccaggaccuguuccugccuuucuucagcaacgugaccugguuccacgccaucuccggcaccaauggcaccaagagauucgacaaccccgugcugcccuucaacgacgggguguacuuugccagcaccgagaaguccaacaucaucagaggcuggaucuucggcaccacacuggacagcaagacccagagccugcugaucgugaacaacgccaccaacguggucaucaaagugugcgaguuccaguucugcaacgaccccuuccugggcgucuaccacaagaacaacaagagcuggauggaaagcgaguuccggguguacagcagcgccaacaacugcaccuucgaguacgugucccagccuuuccugauggaccuggaaggcaagcagggcaacuucaagaaccugcgcgaguucguguucaagaacaucgacggcuacuucaaaaucuacagcaagcacaccccuaucaaccucgugcgggaucugccucagggcuucucugcucuggaaccccugguggaucugcccaucggcaucaacaucacccgguuucagacacugcuggcccugcacagaagcuaccugacaccuggcgauagcagcagcggauggacagcuggugccgccgcuuacuaugugggcuaccugcagccuagaaccuuccugcugaaguacaacgagaacggcaccaucaccgacgccguggauugugcucuggauccucugagcgagacaaagugcacccugaaguccuucaccguggaaaagggcaucuaccagaccagcaacuuccgggugcagcccaccgaauccaucgugcgguuccccaauaucaccaaucugugccccuucggcgagguguucaaugccaccagauucgccucuguguacgccuggaaccggaagcggaucagcaauugcguggccgacuacuccgugcuguacaacuccgccagcuucagcaccuucaagugcuacggcguguccccuaccaagcugaacgaccugugcuucacaaacguguacgccgacagcuucgugauccggggagaugaagugcggcagauugccccuggacagacaggcaagaucgccgacuacaacuacaagcugcccgacgacuucaccggcugugugauugccuggaacagcaacaaccuggacuccaaagucggcggcaacuacaauuaccuguaccggcuguuccggaaguccaaucugaagcccuucgagcgggacaucagcaccgaaaucuaucaggccggcagcaccccuugcaacggcguggaaggcuucaacugcuacuucccacugcaguccuacggcuuucagcccacauacggcgugggcuaucagcccuacagagugguggugcugagcuucgaacugcugcaugcuccugccacagugugcggcccuaagaaaagcaccaaucucgugaagaacaaaugcgugaacuucaacuucaacggccugaccggcaccggcgugcugacagagagcaacaagaaguuccugccauuccagcaguuuggccgggauaucgacgauaccacagacgccguuagagauccccagacacuggaaauccuggacaucaccccaugcagcuucggcggagugucugugaucaccccuggcaccaacaccagcaaucagguggcagugcuguaccagggcgugaacuguaccgaagugcccguggccauucacgccgaucagcugacaccuacauggcggguguacuccaccggcagcaauguguuucagaccagagccggcugucugaucggagccgagcacgugaacaauagcuacgagugcgacauccccaucggcgcuggcaucugugccagcuaccagacacagacaaacagccacagacgggcuagaagcguggccagccagagcaucauugccuacacaaugucucugggcgccgagaacagcguggccuacuccaacaacucuaucgcuauccccaucaacuucaccaucagcgugaccaccgagauccugccuguguccaugaccaagaccagcguggacugcaccauguacaucugcggcgauuccaccgagugcuccaaccugcugcugcaguacggcagcuucugcacccagcugaauagagcccugacagggaucgccguggaacaggacaagaacacccaagagguguucgcccaagugaagcaaaucuacaagaccccuccuaucaaggacuucggcggcuucaauuucagccagauucugcccgauccuagcaagcccagcaagcggagcuucaucgaggaccugcuguucaacaaagugacacuggccgacgccggcuucaucaagcaguauggcgauugucugggcgacauugccgccagggaucugauuugcgcccagaaguuuaacggacugacagugcugccuccucugcugaccgaugagaugaucgcccaguacacaucugcccugcuggccggcacaaucacaagcggcuggacauuuggagcuggcgccgcucugcagauccccuuugcuaugcagauggccuaccgguucaacggcaucggagugacccagaaugugcuguacgagaaccagaagcugaucgccaaccaguucaacagcgccaucggcaagauccaggacagccugagcagcacagcaagcgcccugggaaagcugcaggacguggucaaccagaaugcccaggcacugaacacccuggucaagcagcuguccuccaacuucggcgccaucagcucugugcugaacgauauccuggccagacuggacaaggucgaggccgaggugcagaucgacagacugaucacaggcagacugcagagccuccagacauacgugacccagcagcugaucagagccgccgagauuagagccucugccaaucuggccgccaccaagaugucugagugugugcugggccagagcaagagaguggacuuuugcggcaagggcuaccaccugaugagcuucccucagucugccccucacggcgugguguuucugcacgugacauaugugcccgcucaagagaagaauuucaccaccgcuccagccaucugccacgacggcaaagcccacuuuccuagagaaggcguguucguguccaacggcacccauugguucgugacacagcggaacuucuacgagccccagaucaucaccacccacaacaccuucgugucuggcaacugcgacguugugaucggcauugugaacaauaccguguacgacccucugcagcccgagcuggacagcuucaaagaggaacuggacaaguacuuuaagaaccacacaagccccgacguggaccugggcgauaucagcggaaucaaugccagcgucgugaacauccagaaagagaucgaccggcugaacgagguggccaagaaucugaacgagagccugaucgaccugcaagaacuggggaaguacgagcaguacaucaaguggcccugguacaucuggcugggcuuuaucgccggacugauugccaucgugauggucacaaucaugcuguguugcaugaccagcugcuguagcugccugaagggcuguuguagcuguggcagcugcugcaaguucgacgaggacgauucugagcccgugcugaagggcgugaaacugcacuacaccugaugacucgagcugguacugcaugcacgcaaugcuagcugccccuuucccguccuggguaccccgagucucccccgaccucgggucccagguaugcucccaccuccaccugccccacucaccaccucugcuaguuccagacaccucccaagcacgcagcaaugcagcucaaaacgcuuagccuagccacacccccacgggaaacagcagugauuaaccuuuagcaauaaacgaaaguuuaacuaagcuauacuaaccccaggguuggucaauuucgugccagccacacccuggagcuagcaaaaaaaaaaaaaaaaaaaaaaaaaaaaaagcauaugacuaaaaaaaaaaaaaaaaaaaaaaaaaaaaaaaaaaaaaaaaaaaaaaaaaaaaaaaaaaaaaaaaaaaaaa

SEQ ID NO: 26794 - RNA, 4283 nt, Artificial Sequence
  SARS-CoV-2/Wuhan/WIV05/2019__EPI_ISL_402128 spike protein mRNA gc mod (1-1273)(K417N_E484K_N501Y_D614G)
agaauaaacuaguauucuucugguccccacagacucagagagaacccgccaccauguucguguuucuggugcugcugccccugguguccagccagugugugaaccugaccaccagaacacagcugccuccagccuacaccaacagcuucaccagaggcguguacuaccccgacaagguguucagauccagcgugcugcacucuacccaggaccuguuccugccuuucuucagcaacgugaccugguuccacgccauccacguguccggcaccaauggcaccaagagauucgacaaccccgugcugcccuucaacgacgggguguacuuugccagcaccgagaaguccaacaucaucagaggcuggaucuucggcaccacacuggacagcaagacccagagccugcugaucgugaacaacgccaccaacguggucaucaaagugugcgaguuccaguucugcaacgaccccuuccugggcgucuacuaccacaagaacaacaagagcuggauggaaagcgaguuccggguguacagcagcgccaacaacugcaccuucgaguacgugucccagccuuuccugauggaccuggaaggcaagcagggcaacuucaagaaccugcgcgaguucguguucaagaacaucgacggcuacuucaaaaucuacagcaagcacaccccuaucaaccucgugcgggaucugccucagggcuucucugcucuggaaccccugguggaucugcccaucggcaucaacaucacccgguuucagacacugcuggcccugcacagaagcuaccugacaccuggcgauagcagcagcggauggacagcuggugccgccgcuuacuaugugggcuaccugcagccuagaaccuuccugcugaaguacaacgagaacggcaccaucaccgacgccguggauugugcucuggauccucugagcgagacaaagugcacccugaaguccuucaccguggaaaagggcaucuaccagaccagcaacuuccgggugcagcccaccgaauccaucgugcgguuccccaauaucaccaaucugugccccuucggcgagguguucaaugccaccagauucgccucuguguacgccuggaaccggaagcggaucagcaauugcguggccgacuacuccgugcuguacaacuccgccagcuucagcaccuucaagugcuacggcguguccccuaccaagcugaacgaccugugcuucacaaacguguacgccgacagcuucgugauccggggagaugaagugcggcagauugccccuggacagacaggcaacaucgccgacuacaacuacaagcugcccgacgacuucaccggcugugugauugccuggaacagcaacaaccuggacuccaaagucggcggcaacuacaauuaccuguaccggcuguuccggaaguccaaucugaagcccuucgagcgggacaucagcaccgaaaucuaucaggccggcagcaccccuugcaacggcgugaagggcuucaacugcuacuucccacugcaguccuacggcuuucagcccacauacggcgugggcuaucagcccuacagagugguggugcugagcuucgaacugcugcaugcuccugccacagugugcggcccuaagaaaagcaccaaucucgugaagaacaaaugcgugaacuucaacuucaacggccugaccggcaccggcgugcugacagagagcaacaagaaguuccugccauuccagcaguuuggccgggauaucgccgauaccacagacgccguuagagauccccagacacuggaaauccuggacaucaccccaugcagcuucggcggagugucugugaucaccccuggcaccaacaccagcaaucagguggcagugcuguaccagggcgugaacuguaccgaagugcccguggccauucacgccgaucagcugacaccuacauggcggguguacuccaccggcagcaauguguuucagaccagagccggcugucugaucggagccgagcacgugaacaauagcuacgagugcgacauccccaucggcgcuggcaucugugccagcuaccagacacagacaaacagccccagacgggcuagaagcguggccagccagagcaucauugccuacacaaugucucugggcgccgagaacagcguggccuacuccaacaacucuaucgcuauccccaccaacuucaccaucagcgugaccaccgagauccugccuguguccaugaccaagaccagcguggacugcaccauguacaucugcggcgauuccaccgagugcuccaaccugcugcugcaguacggcagcuucugcacccagcugaauagagcccugacagggaucgccguggaacaggacaagaacacccaagagguguucgcccaagugaagcaaaucuacaagaccccuccuaucaaggacuucggcggcuucaauuucagccagauucugcccgauccuagcaagcccagcaagcggagcuucaucgaggaccugcuguucaacaaagugacacuggccgacgccggcuucaucaagcaguauggcgauugucugggcgacauugccgccagggaucugauuugcgcccagaaguuuaacggacugacagugcugccuccucugcugaccgaugagaugaucgcccaguacacaucugcccugcuggccggcacaaucacaagcggcuggacauuuggagcuggcgccgcucugcagauccccuuugcuaugcagauggccuaccgguucaacggcaucggagugacccagaaugugcuguacgagaaccagaagcugaucgccaaccaguucaacagcgccaucggcaagauccaggacagccugagcagcacagcaagcgcccugggaaagcugcaggacguggucaaccagaaugcccaggcacugaacacccuggucaagcagcuguccuccaacuucggcgccaucagcucugugcugaacgauauccugagcagacuggacaaggucgaggccgaggugcagaucgacagacugaucacaggcagacugcagagccuccagacauacgugacccagcagcugaucagagccgccgagauuagagccucugccaaucuggccgccaccaagaugucugagugugugcugggccagagcaagagaguggacuuuugcggcaagggcuaccaccugaugagcuucccucagucugccccucacggcgugguguuucugcacgugacauaugugcccgcucaagagaagaauuucaccaccgcuccagccaucugccacgacggcaaagcccacuuuccuagagaaggcguguucguguccaacggcacccauugguucgugacacagcggaacuucuacgagccccagaucaucaccaccgacaacaccuucgugucuggcaacugcgacguugugaucggcauugugaacaauaccguguacgacccucugcagcccgagcuggacagcuucaaagaggaacuggacaaguacuuuaagaaccacacaagccccgacguggaccugggcgauaucagcggaaucaaugccagcgucgugaacauccagaaagagaucgaccggcugaacgagguggccaagaaucugaacgagagccugaucgaccugcaagaacuggggaaguacgagcaguacaucaaguggcccugguacaucuggcugggcuuuaucgccggacugauugccaucgugauggucacaaucaugcuguguugcaugaccagcugcuguagcugccugaagggcuguuguagcuguggcagcugcugcaaguucgacgaggacgauucugagcccgugcugaagggcgugaaacugcacuacaccugaugacucgagcugguacugcaugcacgcaaugcuagcugccccuuucccguccuggguaccccgagucucccccgaccucgggucccagguaugcucccaccuccaccugccccacucaccaccucugcuaguuccagacaccucccaagcacgcagcaaugcagcucaaaacgcuuagccuagccacacccccacgggaaacagcagugauuaaccuuuagcaauaaacgaaaguuuaacuaagcuauacuaaccccaggguuggucaauuucgugccagccacacccuggagcuagcaaaaaaaaaaaaaaaaaaaaaaaaaaaaaagcauaugacuaaaaaaaaaaaaaaaaaaaaaaaaaaaaaaaaaaaaaaaaaaaaaaaaaaaaaaaaaaaaaaaaaaaaaa

SEQ ID NO: 26795 - RNA, 4274 nt, Artificial Sequence
  SARS-CoV-2/Wuhan/WIV05/2019__EPI_ISL_402128 spike protein mRNA gc mod (1-1273)(L18F_D80A_D215G_L242del_A243del_L244del_R246I_K417N_E484 K_N501Y_D614G_A701V)
agaauaaacuaguauucuucugguccccacagacucagagagaacccgccaccauguucguguuucuggugcugcugccccugguguccagccagugugugaacuucaccaccagaacacagcugccuccagccuacaccaacagcuucaccagaggcguguacuaccccgacaagguguucagauccagcgugcugcacucuacccaggaccuguuccugccuuucuucagcaacgugaccugguuccacgccauccacguguccggcaccaauggcaccaagagauucgccaaccccgugcugcccuucaacgacgggguguacuuugccagcaccgagaaguccaacaucaucagaggcuggaucuucggcaccacacuggacagcaagacccagagccugcugaucgugaacaacgccaccaacguggucaucaaagugugcgaguuccaguucugcaacgaccccuuccugggcgucuacuaccacaagaacaacaagagcuggauggaaagcgaguuccggguguacagcagcgccaacaacugcaccuucgaguacgugucccagccuuuccugauggaccuggaaggcaagcagggcaacuucaagaaccugcgcgaguucguguucaagaacaucgacggcuacuucaaaaucuacagcaagcacaccccuaucaaccucgugcggggccugccucagggcuucucugcucuggaaccccugguggaucugcccaucggcaucaacaucacccgguuucagacacugcacaucagcuaccugacaccuggcgauagcagcagcggauggacagcuggugccgccgcuuacuaugugggcuaccugcagccuagaaccuuccugcugaaguacaacgagaacggcaccaucaccgacgccguggauugugcucuggauccucugagcgagacaaagugcacccugaaguccuucaccguggaaaagggcaucuaccagaccagcaacuuccgggugcagcccaccgaauccaucgugcgguuccccaauaucaccaaucugugccccuucggcgagguguucaaugccaccagauucgccucuguguacgccuggaaccggaagcggaucagcaauugcguggccgacuacuccgugcuguacaacuccgccagcuucagcaccuucaagugcuacggcguguccccuaccaagcugaacgaccugugcuucacaaacguguacgccgacagcuucgugauccggggagaugaagugcggcagauugccccuggacagacaggcaacaucgccgacuacaacuacaagcugcccgacgacuucaccggcugugugauugccuggaacagcaacaaccuggacuccaaagucggcggcaacuacaauuaccuguaccggcuguuccggaaguccaaucugaagcccuucgagcgggacaucagcaccgaaaucuaucaggccggcagcaccccuugcaacggcgugaagggcuucaacugcuacuucccacugcaguccuacggcuuucagcccacauacggcgugggcuaucagcccuacagagugguggugcugagcuucgaacugcugcaugcuccugccacagugugcggcccuaagaaaagcaccaaucucgugaagaacaaaugcgugaacuucaacuucaacggccugaccggcaccggcgugcugacagagagcaacaagaaguuccugccauuccagcaguuuggccgggauaucgccgauaccacagacgccguuagagauccccagacacuggaaauccuggacaucaccccaugcagcuucggcggagugucugugaucaccccuggcaccaacaccagcaaucagguggcagugcuguaccagggcgugaacuguaccgaagugcccguggccauucacgccgaucagcugacaccuacauggcggguguacuccaccggcagcaauguguuucagaccagagccggcugucugaucggagccgagcacgugaacaauagcuacgagugcgacauccccaucggcgcuggcaucugugccagcuaccagacacagacaaacagccccagacgggcuagaagcguggccagccagagcaucauugccuacacaaugucucugggcguggagaacagcguggccuacuccaacaacucuaucgcuauccccaccaacuucaccaucagcgugaccaccgagauccugccuguguccaugaccaagaccagcguggacugcaccauguacaucugcggcgauuccaccgagugcuccaaccugcugcugcaguacggcagcuucugcacccagcugaauagagcccugacagggaucgccguggaacaggacaagaacacccaagagguguucgcccaagugaagcaaaucuacaagaccccuccuaucaaggacuucggcggcuucaauuucagccagauucugcccgauccuagcaagcccagcaagcggagcuucaucgaggaccugcuguucaacaaagugacacuggccgacgccggcuucaucaagcaguauggcgauugucugggcgacauugccgccagggaucugauuugcgcccagaaguuuaacggacugacagugcugccuccucugcugaccgaugagaugaucgcccaguacacaucugcccugcuggccggcacaaucacaagcggcuggacauuuggagcuggcgccgcucugcagauccccuuugcuaugcagauggccuaccgguucaacggcaucggagugacccagaaugugcuguacgagaaccagaagcugaucgccaaccaguucaacagcgccaucggcaagauccaggacagccugagcagcacagcaagcgcccugggaaagcugcaggacguggucaaccagaaugcccaggcacugaacacccuggucaagcagcuguccuccaacuucggcgccaucagcucugugcugaacgauauccugagcagacuggacaaggucgaggccgaggugcagaucgacagacugaucacaggcagacugcagagccuccagacauacgugacccagcagcugaucagagccgccgagauuagagccucugccaaucuggccgccaccaagaugucugagugugugcugggccagagcaagagaguggacuuuugcggcaagggcuaccaccugaugagcuucccucagucugccccucacggcgugguguuucugcacgugacauaugugcccgcucaagagaagaauuucaccaccgcuccagccaucugccacgacggcaaagcccacuuuccuagagaaggcguguucguguccaacggcacccauugguucgugacacagcggaacuucuacgagccccagaucaucaccaccgacaacaccuucgugucuggcaacugcgacguugugaucggcauugugaacaauaccguguacgacccucugcagcccgagcuggacagcuucaaagaggaacuggacaaguacuuuaagaaccacacaagccccgacguggaccugggcgauaucagcggaaucaaugccagcgucgugaacauccagaaagagaucgaccggcugaacgagguggccaagaaucugaacgagagccugaucgaccugcaagaacuggggaaguacgagcaguacaucaaguggcccugguacaucuggcugggcuuuaucgccggacugauugccaucgugauggucacaaucaugcuguguugcaugaccagcugcuguagcugccugaagggcuguuguagcuguggcagcugcugcaaguucgacgaggacgauucugagcccgugcugaagggcgugaaacugcacuacaccugaugacucgagcugguacugcaugcacgcaaugcuagcugccccuuucccguccuggguaccccgagucucccccgaccucgggucccagguaugcucccaccuccaccugccccacucaccaccucugcuaguuccagacaccucccaagcacgcagcaaugcagcucaaaacgcuuagccuagccacacccccacgggaaacagcagugauuaaccuuuagcaauaaacgaaaguuuaacuaagcuauacuaaccccaggguuggucaauuucgugccagccacacccuggagcuagcaaaaaaaaaaaaaaaaaaaaaaaaaaaaaagcauaugacuaaaaaaaaaaaaaaaaaaaaaaaaaaaaaaaaaaaaaaaaaaaaaaaaaaaaaaaaaaaaaaaaaaaaaa

SEQ ID NO: 26796 - RNA, 4283 nt, Artificial Sequence
  SARS-CoV-2/Wuhan/WIV05/2019__EPI_ISL_402128 spike protein mRNA gc mod (1-1273)(E484K_D614G)
agaauaaacuaguauucuucugguccccacagacucagagagaacccgccaccauguucguguuucuggugcugcugccccugguguccagccagugugugaaccugaccaccagaacacagcugccuccagccuacaccaacagcuucaccagaggcguguacuaccccgacaagguguucagauccagcgugcugcacucuacccaggaccuguuccugccuuucuucagcaacgugaccugguuccacgccauccacguguccggcaccaauggcaccaagagauucgacaaccccgugcugcccuucaacgacgggguguacuuugccagcaccgagaaguccaacaucaucagaggcuggaucuucggcaccacacuggacagcaagacccagagccugcugaucgugaacaacgccaccaacguggucaucaaagugugcgaguuccaguucugcaacgaccccuuccugggcgucuacuaccacaagaacaacaagagcuggauggaaagcgaguuccggguguacagcagcgccaacaacugcaccuucgaguacgugucccagccuuuccugauggaccuggaaggcaagcagggcaacuucaagaaccugcgcgaguucguguucaagaacaucgacggcuacuucaaaaucuacagcaagcacaccccuaucaaccucgugcgggaucugccucagggcuucucugcucuggaaccccugguggaucugcccaucggcaucaacaucacccgguuucagacacugcuggcccugcacagaagcuaccugacaccuggcgauagcagcagcggauggacagcuggugccgccgcuuacuaugugggcuaccugcagccuagaaccuuccugcugaaguacaacgagaacggcaccaucaccgacgccguggauugugcucuggauccucugagcgagacaaagugcacccugaaguccuucaccguggaaaagggcaucuaccagaccagcaacuuccgggugcagcccaccgaauccaucgugcgguuccccaauaucaccaaucugugccccuucggcgagguguucaaugccaccagauucgccucuguguacgccuggaaccggaagcggaucagcaauugcguggccgacuacuccgugcuguacaacuccgccagcuucagcaccuucaagugcuacggcguguccccuaccaagcugaacgaccugugcuucacaaacguguacgccgacagcuucgugauccggggagaugaagugcggcagauugccccuggacagacaggcaagaucgccgacuacaacuacaagcugcccgacgacuucaccggcugugugauugccuggaacagcaacaaccuggacuccaaagucggcggcaacuacaauuaccuguaccggcuguuccggaaguccaaucugaagcccuucgagcgggacaucagcaccgaaaucuaucaggccggcagcaccccuugcaacggcgugaagggcuucaacugcuacuucccacugcaguccuacggcuuucagcccacaaauggcgugggcuaucagcccuacagagugguggugcugagcuucgaacugcugcaugcuccugccacagugugcggcccuaagaaaagcaccaaucucgugaagaacaaaugcgugaacuucaacuucaacggccugaccggcaccggcgugcugacagagagcaacaagaaguuccugccauuccagcaguuuggccgggauaucgccgauaccacagacgccguuagagauccccagacacuggaaauccuggacaucaccccaugcagcuucggcggagugucugugaucaccccuggcaccaacaccagcaaucagguggcagugcuguaccagggcgugaacuguaccgaagugcccguggccauucacgccgaucagcugacaccuacauggcggguguacuccaccggcagcaauguguuucagaccagagccggcugucugaucggagccgagcacgugaacaauagcuacgagugcgacauccccaucggcgcuggcaucugugccagcuaccagacacagacaaacagccccagacgggcuagaagcguggccagccagagcaucauugccuacacaaugucucugggcgccgagaacagcguggccuacuccaacaacucuaucgcuauccccaccaacuucaccaucagcgugaccaccgagauccugccuguguccaugaccaagaccagcguggacugcaccauguacaucugcggcgauuccaccgagugcuccaaccugcugcugcaguacggcagcuucugcacccagcugaauagagcccugacagggaucgccguggaacaggacaagaacacccaagagguguucgcccaagugaagcaaaucuacaagaccccuccuaucaaggacuucggcggcuucaauuucagccagauucugcccgauccuagcaagcccagcaagcggagcuucaucgaggaccugcuguucaacaaagugacacuggccgacgccggcuucaucaagcaguauggcgauugucugggcgacauugccgccagggaucugauuugcgcccagaaguuuaacggacugacagugcugccuccucugcugaccgaugagaugaucgcccaguacacaucugcccugcuggccggcacaaucacaagcggcuggacauuuggagcuggcgccgcucugcagauccccuuugcuaugcagauggccuaccgguucaacggcaucggagugacccagaaugugcuguacgagaaccagaagcugaucgccaaccaguucaacagcgccaucggcaagauccaggacagccugagcagcacagcaagcgcccugggaaagcugcaggacguggucaaccagaaugcccaggcacugaacacccuggucaagcagcuguccuccaacuucggcgccaucagcucugugcugaacgauauccugagcagacuggacaaggucgaggccgaggugcagaucgacagacugaucacaggcagacugcagagccuccagacauacgugacccagcagcugaucagagccgccgagauuagagccucugccaaucuggccgccaccaagaugucugagugugugcugggccagagcaagagaguggacuuuugcggcaagggcuaccaccugaugagcuucccucagucugccccucacggcgugguguuucugcacgugacauaugugcccgcucaagagaagaauuucaccaccgcuccagccaucugccacgacggcaaagcccacuuuccuagagaaggcguguucguguccaacggcacccauugguucgugacacagcggaacuucuacgagccccagaucaucaccaccgacaacaccuucgugucuggcaacugcgacguugugaucggcauugugaacaauaccguguacgacccucugcagcccgagcuggacagcuucaaagaggaacuggacaaguacuuuaagaaccacacaagccccgacguggaccugggcgauaucagcggaaucaaugccagcgucgugaacauccagaaagagaucgaccggcugaacgagguggccaagaaucugaacgagagccugaucgaccugcaagaacuggggaaguacgagcaguacaucaaguggcccugguacaucuggcugggcuuuaucgccggacugauugccaucgugauggucacaaucaugcuguguugcaugaccagcugcuguagcugccugaagggcuguuguagcuguggcagcugcugcaaguucgacgaggacgauucugagcccgugcugaagggcgugaaacugcacuacaccugaugacucgagcugguacugcaugcacgcaaugcuagcugccccuuucccguccuggguaccccgagucucccccgaccucgggucccagguaugcucccaccuccaccugccccacucaccaccucugcuaguuccagacaccucccaagcacgcagcaaugcagcucaaaacgcuuagccuagccacacccccacgggaaacagcagugauuaaccuuuagcaauaaacgaaaguuuaacuaagcuauacuaaccccaggguuggucaauuucgugccagccacacccuggagcuagcaaaaaaaaaaaaaaaaaaaaaaaaaaaaaagcauaugacuaaaaaaaaaaaaaaaaaaaaaaaaaaaaaaaaaaaaaaaaaaaaaaaaaaaaaaaaaaaaaaaaaaaaaa

SEQ ID NO: 26797 - RNA, 4283 nt, Artificial Sequence
  SARS-CoV-2/Wuhan/WIV05/2019__EPI_ISL_402128 spike protein mRNA gc mod (1-1273)(L18F_T20N_P26S_D138Y_R190S_K417T_E484K_N501Y_D614G_H655Y _T1027I)
agaauaaacuaguauucuucugguccccacagacucagagagaacccgccaccauguucguguuucuggugcugcugccccugguguccagccagugugugaacuucaccaacagaacacagcugccuagcgccuacaccaacagcuucaccagaggcguguacuaccccgacaagguguucagauccagcgugcugcacucuacccaggaccuguuccugccuuucuucagcaacgugaccugguuccacgccauccacguguccggcaccaauggcaccaagagauucgacaaccccgugcugcccuucaacgacgggguguacuuugccagcaccgagaaguccaacaucaucagaggcuggaucuucggcaccacacuggacagcaagacccagagccugcugaucgugaacaacgccaccaacguggucaucaaagugugcgaguuccaguucugcaacuaccccuuccugggcgucuacuaccacaagaacaacaagagcuggauggaaagcgaguuccggguguacagcagcgccaacaacugcaccuucgaguacgugucccagccuuuccugauggaccuggaaggcaagcagggcaacuucaagaaccugagcgaguucguguucaagaacaucgacggcuacuucaaaaucuacagcaagcacaccccuaucaaccucgugcgggaucugccucagggcuucucugcucuggaaccccugguggaucugcccaucggcaucaacaucacccgguuucagacacugcuggcccugcacagaagcuaccugacaccuggcgauagcagcagcggauggacagcuggugccgccgcuuacuaugugggcuaccugcagccuagaaccuuccugcugaaguacaacgagaacggcaccaucaccgacgccguggauugugcucuggauccucugagcgagacaaagugcacccugaaguccuucaccguggaaaagggcaucuaccagaccagcaacuuccgggugcagcccaccgaauccaucgugcgguuccccaauaucaccaaucugugccccuucggcgagguguucaaugccaccagauucgccucuguguacgccuggaaccggaagcggaucagcaauugcguggccgacuacuccgugcuguacaacuccgccagcuucagcaccuucaagugcuacggcguguccccuaccaagcugaacgaccugugcuucacaaacguguacgccgacagcuucgugauccggggagaugaagugcggcagauugccccuggacagacaggcaccaucgccgacuacaacuacaagcugcccgacgacuucaccggcugugugauugccuggaacagcaacaaccuggacuccaaagucggcggcaacuacaauuaccuguaccggcuguuccggaaguccaaucugaagcccuucgagcgggacaucagcaccgaaaucuaucaggccggcagcaccccuugcaacggcgugaagggcuucaacugcuacuucccacugcaguccuacggcuuucagcccacauacggcgugggcuaucagcccuacagagugguggugcugagcuucgaacugcugcaugcuccugccacagugugcggcccuaagaaaagcaccaaucucgugaagaacaaaugcgugaacuucaacuucaacggccugaccggcaccggcgugcugacagagagcaacaagaaguuccugccauuccagcaguuuggccgggauaucgccgauaccacagacgccguuagagauccccagacacuggaaauccuggacaucaccccaugcagcuucggcggagugucugugaucaccccuggcaccaacaccagcaaucagguggcagugcuguaccagggcgugaacuguaccgaagugcccguggccauucacgccgaucagcugacaccuacauggcggguguacuccaccggcagcaauguguuucagaccagagccggcugucugaucggagccgaguacgugaacaauagcuacgagugcgacauccccaucggcgcuggcaucugugccagcuaccagacacagacaaacagccccagacgggcuagaagcguggccagccagagcaucauugccuacacaaugucucugggcgccgagaacagcguggccuacuccaacaacucuaucgcuauccccaccaacuucaccaucagcgugaccaccgagauccugccuguguccaugaccaagaccagcguggacugcaccauguacaucugcggcgauuccaccgagugcuccaaccugcugcugcaguacggcagcuucugcacccagcugaauagagcccugacagggaucgccguggaacaggacaagaacacccaagagguguucgcccaagugaagcaaaucuacaagaccccuccuaucaaggacuucggcggcuucaauuucagccagauucugcccgauccuagcaagcccagcaagcggagcuucaucgaggaccugcuguucaacaaagugacacuggccgacgccggcuucaucaagcaguauggcgauugucugggcgacauugccgccagggaucugauuugcgcccagaaguuuaacggacugacagugcugccuccucugcugaccgaugagaugaucgcccaguacacaucugcccugcuggccggcacaaucacaagcggcuggacauuuggagcuggcgccgcucugcagauccccuuugcuaugcagauggccuaccgguucaacggcaucggagugacccagaaugugcuguacgagaaccagaagcugaucgccaaccaguucaacagcgccaucggcaagauccaggacagccugagcagcacagcaagcgcccugggaaagcugcaggacguggucaaccagaaugcccaggcacugaacacccuggucaagcagcuguccuccaacuucggcgccaucagcucugugcugaacgauauccugagcagacuggacaaggucgaggccgaggugcagaucgacagacugaucacaggcagacugcagagccuccagacauacgugacccagcagcugaucagagccgccgagauuagagccucugccaaucuggccgccaucaagaugucugagugugugcugggccagagcaagagaguggacuuuugcggcaagggcuaccaccugaugagcuucccucagucugccccucacggcgugguguuucugcacgugacauaugugcccgcucaagagaagaauuucaccaccgcuccagccaucugccacgacggcaaagcccacuuuccuagagaaggcguguucguguccaacggcacccauugguucgugacacagcggaacuucuacgagccccagaucaucaccaccgacaacaccuucgugucuggcaacugcgacguugugaucggcauugugaacaauaccguguacgacccucugcagcccgagcuggacagcuucaaagaggaacuggacaaguacuuuaagaaccacacaagccccgacguggaccugggcgauaucagcggaaucaaugccagcgucgugaacauccagaaagagaucgaccggcugaacgagguggccaagaaucugaacgagagccugaucgaccugcaagaacuggggaaguacgagcaguacaucaaguggcccugguacaucuggcugggcuuuaucgccggacugauugccaucgugauggucacaaucaugcuguguugcaugaccagcugcuguagcugccugaagggcuguuguagcuguggcagcugcugcaaguucgacgaggacgauucugagcccgugcugaagggcgugaaacugcacuacaccugaugacucgagcugguacugcaugcacgcaaugcuagcugccccuuucccguccuggguaccccgagucucccccgaccucgggucccagguaugcucccaccuccaccugccccacucaccaccucugcuaguuccagacaccucccaagcacgcagcaaugcagcucaaaacgcuuagccuagccacacccccacgggaaacagcagugauuaaccuuuagcaauaaacgaaaguuuaacuaagcuauacuaaccccaggguuggucaauuucgugccagccacacccuggagcuagcaaaaaaaaaaaaaaaaaaaaaaaaaaaaaagcauaugacuaaaaaaaaaaaaaaaaaaaaaaaaaaaaaaaaaaaaaaaaaaaaaaaaaaaaaaaaaaaaaaaaaaaaaa

SEQ ID NO: 26798 - RNA, 4283 nt, Artificial Sequence
  SARS-CoV-2/Wuhan/WIV05/2019__EPI_ISL_402128 spike protein mRNA gc mod (1-1273)(S13I_W152C_L452R_D614G)
agaauaaacuaguauucuucugguccccacagacucagagagaacccgccaccauguucguguuucuggugcugcugccccugguguccauccagugugugaaccugaccaccagaacacagcugccuccagccuacaccaacagcuucaccagaggcguguacuaccccgacaagguguucagauccagcgugcugcacucuacccaggaccuguuccugccuuucuucagcaacgugaccugguuccacgccauccacguguccggcaccaauggcaccaagagauucgacaaccccgugcugcccuucaacgacgggguguacuuugccagcaccgagaaguccaacaucaucagaggcuggaucuucggcaccacacuggacagcaagacccagagccugcugaucgugaacaacgccaccaacguggucaucaaagugugcgaguuccaguucugcaacgaccccuuccugggcgucuacuaccacaagaacaacaagagcugcauggaaagcgaguuccggguguacagcagcgccaacaacugcaccuucgaguacgugucccagccuuuccugauggaccuggaaggcaagcagggcaacuucaagaaccugcgcgaguucguguucaagaacaucgacggcuacuucaaaaucuacagcaagcacaccccuaucaaccucgugcgggaucugccucagggcuucucugcucuggaaccccugguggaucugcccaucggcaucaacaucacccgguuucagacacugcuggcccugcacagaagcuaccugacaccuggcgauagcagcagcggauggacagcuggugccgccgcuuacuaugugggcuaccugcagccuagaaccuuccugcugaaguacaacgagaacggcaccaucaccgacgccguggauugugcucuggauccucugagcgagacaaagugcacccugaaguccuucaccguggaaaagggcaucuaccagaccagcaacuuccgggugcagcccaccgaauccaucgugcgguuccccaauaucaccaaucugugccccuucggcgagguguucaaugccaccagauucgccucuguguacgccuggaaccggaagcggaucagcaauugcguggccgacuacuccgugcuguacaacuccgccagcuucagcaccuucaagugcuacggcguguccccuaccaagcugaacgaccugugcuucacaaacguguacgccgacagcuucgugauccggggagaugaagugcggcagauugccccuggacagacaggcaagaucgccgacuacaacuacaagcugcccgacgacuucaccggcugugugauugccuggaacagcaacaaccuggacuccaaagucggcggcaacuacaauuaccgcuaccggcuguuccggaaguccaaucugaagcccuucgagcgggacaucagcaccgaaaucuaucaggccggcagcaccccuugcaacggcguggaaggcuucaacugcuacuucccacugcaguccuacggcuuucagcccacaaauggcgugggcuaucagcccuacagagugguggugcugagcuucgaacugcugcaugcuccugccacagugugcggcccuaagaaaagcaccaaucucgugaagaacaaaugcgugaacuucaacuucaacggccugaccggcaccggcgugcugacagagagcaacaagaaguuccugccauuccagcaguuuggccgggauaucgccgauaccacagacgccguuagagauccccagacacuggaaauccuggacaucaccccaugcagcuucggcggagugucugugaucaccccuggcaccaacaccagcaaucagguggcagugcuguaccagggcgugaacuguaccgaagugcccguggccauucacgccgaucagcugacaccuacauggcggguguacuccaccggcagcaauguguuucagaccagagccggcugucugaucggagccgagcacgugaacaauagcuacgagugcgacauccccaucggcgcuggcaucugugccagcuaccagacacagacaaacagccccagacgggcuagaagcguggccagccagagcaucauugccuacacaaugucucugggcgccgagaacagcguggccuacuccaacaacucuaucgcuauccccaccaacuucaccaucagcgugaccaccgagauccugccuguguccaugaccaagaccagcguggacugcaccauguacaucugcggcgauuccaccgagugcuccaaccugcugcugcaguacggcagcuucugcacccagcugaauagagcccugacagggaucgccguggaacaggacaagaacacccaagagguguucgcccaagugaagcaaaucuacaagaccccuccuaucaaggacuucggcggcuucaauuucagccagauucugcccgauccuagcaagcccagcaagcggagcuucaucgaggaccugcuguucaacaaagugacacuggccgacgccggcuucaucaagcaguauggcgauugucugggcgacauugccgccagggaucugauuugcgcccagaaguuuaacggacugacagugcugccuccucugcugaccgaugagaugaucgcccaguacacaucugcccugcuggccggcacaaucacaagcggcuggacauuuggagcuggcgccgcucugcagauccccuuugcuaugcagauggccuaccgguucaacggcaucggagugacccagaaugugcuguacgagaaccagaagcugaucgccaaccaguucaacagcgccaucggcaagauccaggacagccugagcagcacagcaagcgcccugggaaagcugcaggacguggucaaccagaaugcccaggcacugaacacccuggucaagcagcuguccuccaacuucggcgccaucagcucugugcugaacgauauccugagcagacuggacaaggucgaggccgaggugcagaucgacagacugaucacaggcagacugcagagccuccagacauacgugacccagcagcugaucagagccgccgagauuagagccucugccaaucuggccgccaccaagaugucugagugugugcugggccagagcaagagaguggacuuuugcggcaagggcuaccaccugaugagcuucccucagucugccccucacggcgugguguuucugcacgugacauaugugcccgcucaagagaagaauuucaccaccgcuccagccaucugccacgacggcaaagcccacuuuccuagagaaggcguguucguguccaacggcacccauugguucgugacacagcggaacuucuacgagccccagaucaucaccaccgacaacaccuucgugucuggcaacugcgacguugugaucggcauugugaacaauaccguguacgacccucugcagcccgagcuggacagcuucaaagaggaacuggacaaguacuuuaagaaccacacaagccccgacguggaccugggcgauaucagcggaaucaaugccagcgucgugaacauccagaaagagaucgaccggcugaacgagguggccaagaaucugaacgagagccugaucgaccugcaagaacuggggaaguacgagcaguacaucaaguggcccugguacaucuggcugggcuuuaucgccggacugauugccaucgugauggucacaaucaugcuguguugcaugaccagcugcuguagcugccugaagggcuguuguagcuguggcagcugcugcaaguucgacgaggacgauucugagcccgugcugaagggcgugaaacugcacuacaccugaugacucgagcugguacugcaugcacgcaaugcuagcugccccuuucccguccuggguaccccgagucucccccgaccucgggucccagguaugcucccaccuccaccugccccacucaccaccucugcuaguuccagacaccucccaagcacgcagcaaugcagcucaaaacgcuuagccuagccacacccccacgggaaacagcagugauuaaccuuuagcaauaaacgaaaguuuaacuaagcuauacuaaccccaggguuggucaauuucgugccagccacacccuggagcuagcaaaaaaaaaaaaaaaaaaaaaaaaaaaaaagcauaugacuaaaaaaaaaaaaaaaaaaaaaaaaaaaaaaaaaaaaaaaaaaaaaaaaaaaaaaaaaaaaaaaaaaaaaa

SEQ ID NO: 26799 - RNA, 4283 nt, Artificial Sequence
  SARS-CoV-2/Wuhan/WIV05/2019__EPI_ISL_402128 spike protein mRNA gc mod (1-1273)
agaauaaacuaguauucuucugguccccacagacucagagagaacccgccaccauguucguguuccuggugcugcugccucugguguccagccagugugugaaccugaccaccagaacacagcugccuccagccuacaccaacagcuuuaccagaggcguguacuaccccgacaagguguucagauccagcgugcugcacucuacccaggaccuguuccugccuuucuucagcaacgugaccugguuccacgccauccacguguccggcaccaauggcaccaagagauucgacaaccccgugcugcccuucaacgacgggguguacuuugccagcaccgagaaguccaacaucaucagaggcuggaucuucggcaccacacuggacagcaagacccagagccugcugaucgugaacaacgccaccaacguggucaucaaagugugcgaguuccaguucugcaacgaccccuuccugggcgucuacuaccacaagaacaacaagagcuggauggaaagcgaguuccggguguacagcagcgccaacaacugcaccuucgaguacgugucccagccuuuccugauggaccuggaaggcaagcagggcaacuucaagaaccugcgcgaguucguguuuaagaacaucgacggcuacuucaagaucuacagcaagcacaccccuaucaaccucgugcgggaucugccucagggcuucucugcucuggaaccccugguggaucugcccaucggcaucaacaucacccgguuucagacacugcuggcccugcacagaagcuaccugacaccuggcgauagcagcagcggauggacagcuggugccgccgcuuacuaugugggcuaccugcagccuagaaccuuccugcugaaguacaacgagaacggcaccaucaccgacgccguggauugugcucuggauccucugagcgagacaaagugcacccugaaguccuucaccguggaaaagggcaucuaccagaccagcaacuuccgggugcagcccaccgaauccaucgugcgguuccccaauaucaccaaucugugccccuucggcgagguguucaaugccaccagauucgccucuguguacgccuggaaccggaagcggaucagcaauugcguggccgacuacuccgugcuguacaacuccgccagcuucagcaccuucaagugcuacggcguguccccuaccaagcugaacgaccugugcuucacaaacguguacgccgacagcuucgugauccggggagaugaagugcggcagauugccccuggacagacaggcaagaucgccgacuacaacuacaagcugcccgacgacuucaccggcugugugauugccuggaacagcaacaaccuggacuccaaagucggcggcaacuacaauuaccuguaccggcuguuccggaaguccaaucugaagcccuucgagcgggacaucuccaccgagaucuaucaggccggcagcaccccuuguaacggcguggaaggcuucaacugcuacuucccacugcaguccuacggcuuucagcccacaaauggcgugggcuaucagcccuacagagugguggugcugagcuucgaacugcugcaugccccugccacagugugcggcccuaagaaaagcaccaaucucgugaagaacaaaugcgugaacuucaacuucaacggccugaccggcaccggcgugcugacagagagcaacaagaaguuccugccauuccagcaguuuggccgggauaucgccgauaccacagacgccguuagagauccccagacacuggaaauccuggacaucaccccuugcagcuucggcggagugucugugaucaccccuggcaccaacaccagcaaucagguggcagugcuguaccaggacgugaacuguaccgaagugcccguggccauucacgccgaucagcugacaccuacauggcggguguacuccaccggcagcaauguguuucagaccagagccggcugucugaucggagccgagcacgugaacaauagcuacgagugcgacauccccaucggcgcuggaaucugcgccagcuaccagacacagacaaacagcccucggagagccagaagcguggccagccagagcaucauugccuacacaaugucucugggcgccgagaacagcguggccuacuccaacaacucuaucgcuauccccaccaacuucaccaucagcgugaccacagagauccugccuguguccaugaccaagaccagcguggacugcaccauguacaucugcggcgauuccaccgagugcuccaaccugcugcugcaguacggcagcuucugcacccagcugaauagagcccugacagggaucgccguggaacaggacaagaacacccaagagguguucgcccaagugaagcagaucuacaagaccccuccuaucaaggacuucggcggcuucaauuucagccagauucugcccgauccuagcaagcccagcaagcggagcuucaucgaggaccugcuguucaacaaagugacacuggccgacgccggcuucaucaagcaguauggcgauugucugggcgacauugccgccagggaucugauuugcgcccagaaguuuaacggacugacagugcugccuccucugcugaccgaugagaugaucgcccaguacacaucugcccugcuggccggcacaaucacaagcggcuggacauuuggagcaggcgccgcucugcagauccccuuugcuaugcagauggccuaccgguucaacggcaucggagugacccagaaugugcuguacgagaaccagaagcugaucgccaaccaguucaacagcgccaucggcaagauccaggacagccugagcagcacagcaagcgcccugggaaagcugcaggacguggucaaccagaaugcccaggcacugaacacccuggucaagcagcuguccuccaacuucggcgccaucagcucugugcugaacgauauccugagcagacuggacaaggucgaggccgaggugcagaucgacagacugaucacaggcagacugcagagccuccagacauacgugacccagcagcugaucagagccgccgagauuagagccucugccaaucuggccgccaccaagaugucugagugugugcugggccagagcaagagaguggacuuuugcggcaagggcuaccaccugaugagcuucccucagucugccccucacggcgugguguuucugcacgugacauaugugcccgcucaagagaagaauuucaccaccgcuccagccaucugccacgacggcaaagcccacuuuccuagagaaggcguguucguguccaacggcacccauugguucgugacacagcggaacuucuacgagccccagaucaucaccaccgacaacaccuucgugucuggcaacugcgacgucgugaucggcauugugaacaauaccguguacgacccucugcagcccgagcuggacagcuucaaagaggaacuggacaaguacuuuaagaaccacacaagccccgacguggaccugggcgauaucagcggaaucaaugccagcgucgugaacauccagaaagagaucgaccggcugaacgagguggccaagaaucugaacgagagccugaucgaccugcaagaacuggggaaguacgagcaguacaucaaguggcccugguacaucuggcugggcuuuaucgccggacugauugccaucgugauggucacaaucaugcuguguugcaugaccagcugcuguagcugccugaagggcuguuguagcuguggcagcugcugcaaguucgacgaggacgauucugagcccgugcugaagggcgugaaacugcacuacacaugaugacucgagcugguacugcaugcacgcaaugcuagcugccccuuucccguccuggguaccccgagucucccccgaccucgggucccagguaugcucccaccuccaccugccccacucaccaccucugcuaguuccagacaccucccaagcacgcagcaaugcagcucaaaacgcuuagccuagccacacccccacgggaaacagcagugauuaaccuuuagcaauaaacgaaaguuuaacuaagcuauacuaaccccaggguuggucaauuucgugccagccacacccuggagcuagcaaaaaaaaaaaaaaaaaaaaaaaaaaaaaagcauaugacuaaaaaaaaaaaaaaaaaaaaaaaaaaaaaaaaaaaaaaaaaaaaaaaaaaaaaaaaaaaaaaaaaaaaaa

SEQ ID NO: 26800 - RNA, 4283 nt, Artificial Sequence
  SARS-CoV-2/Wuhan/WIV05/2019__EPI_ISL_402128 spike protein mRNA gc mod (1-1273)(D614G)
agaauaaacuaguauucuucugguccccacagacucagagagaacccgccaccauguucguguuccuggugcugcugccucugguguccagccagugugugaaccugaccaccagaacacagcugccuccagccuacaccaacagcuuuaccagaggcguguacuaccccgacaagguguucagauccagcgugcugcacucuacccaggaccuguuccugccuuucuucagcaacgugaccugguuccacgccauccacguguccggcaccaauggcaccaagagauucgacaaccccgugcugcccuucaacgacgggguguacuuugccagcaccgagaaguccaacaucaucagaggcuggaucuucggcaccacacuggacagcaagacccagagccugcugaucgugaacaacgccaccaacguggucaucaaagugugcgaguuccaguucugcaacgaccccuuccugggcgucuacuaccacaagaacaacaagagcuggauggaaagcgaguuccggguguacagcagcgccaacaacugcaccuucgaguacgugucccagccuuuccugauggaccuggaaggcaagcagggcaacuucaagaaccugcgcgaguucguguuuaagaacaucgacggcuacuucaagaucuacagcaagcacaccccuaucaaccucgugcgggaucugccucagggcuucucugcucuggaaccccugguggaucugcccaucggcaucaacaucacccgguuucagacacugcuggcccugcacagaagcuaccugacaccuggcgauagcagcagcggauggacagcuggugccgccgcuuacuaugugggcuaccugcagccuagaaccuuccugcugaaguacaacgagaacggcaccaucaccgacgccguggauugugcucuggauccucugagcgagacaaagugcacccugaaguccuucaccguggaaaagggcaucuaccagaccagcaacuuccgggugcagcccaccgaauccaucgugcgguuccccaauaucaccaaucugugccccuucggcgagguguucaaugccaccagauucgccucuguguacgccuggaaccggaagcggaucagcaauugcguggccgacuacuccgugcuguacaacuccgccagcuucagcaccuucaagugcuacggcguguccccuaccaagcugaacgaccugugcuucacaaacguguacgccgacagcuucgugauccggggagaugaagugcggcagauugccccuggacagacaggcaagaucgccgacuacaacuacaagcugcccgacgacuucaccggcugugugauugccuggaacagcaacaaccuggacuccaaagucggcggcaacuacaauuaccuguaccggcuguuccggaaguccaaucugaagcccuucgagcgggacaucuccaccgagaucuaucaggccggcagcaccccuuguaacggcguggaaggcuucaacugcuacuucccacugcaguccuacggcuuucagcccacaaauggcgugggcuaucagcccuacagagugguggugcugagcuucgaacugcugcaugccccugccacagugugcggcccuaagaaaagcaccaaucucgugaagaacaaaugcgugaacuucaacuucaacggccugaccggcaccggcgugcugacagagagcaacaagaaguuccugccauuccagcaguuuggccgggauaucgccgauaccacagacgccguuagagauccccagacacuggaaauccuggacaucaccccuugcagcuucggcggagugucugugaucaccccuggcaccaacaccagcaaucagguggcagugcuguaccagggcgugaacuguaccgaagugcccguggccauucacgccgaucagcugacaccuacauggcggguguacuccaccggcagcaauguguuucagaccagagccggcugucugaucggagccgagcacgugaacaauagcuacgagugcgacauccccaucggcgcuggaaucugcgccagcuaccagacacagacaaacagcccucggagagccagaagcguggccagccagagcaucauugccuacacaaugucucugggcgccgagaacagcguggccuacuccaacaacucuaucgcuauccccaccaacuucaccaucagcgugaccacagagauccugccuguguccaugaccaagaccagcguggacugcaccauguacaucugcggcgauuccaccgagugcuccaaccugcugcugcaguacggcagcuucugcacccagcugaauagagcccugacagggaucgccguggaacaggacaagaacacccaagagguguucgcccaagugaagcagaucuacaagaccccuccuaucaaggacuucggcggcuucaauuucagccagauucugcccgauccuagcaagcccagcaagcggagcuucaucgaggaccugcuguucaacaaagugacacuggccgacgccggcuucaucaagcaguauggcgauugucugggcgacauugccgccagggaucugauuugcgcccagaaguuuaacggacugacagugcugccuccucugcugaccgaugagaugaucgcccaguacacaucugcccugcuggccggcacaaucacaagcggcuggacauuuggagcaggcgccgcucugcagauccccuuugcuaugcagauggccuaccgguucaacggcaucggagugacccagaaugugcuguacgagaaccagaagcugaucgccaaccaguucaacagcgccaucggcaagauccaggacagccugagcagcacagcaagcgcccugggaaagcugcaggacguggucaaccagaaugcccaggcacugaacacccuggucaagcagcuguccuccaacuucggcgccaucagcucugugcugaacgauauccugagcagacuggacaaggucgaggccgaggugcagaucgacagacugaucacaggcagacugcagagccuccagacauacgugacccagcagcugaucagagccgccgagauuagagccucugccaaucuggccgccaccaagaugucugagugugugcugggccagagcaagagaguggacuuuugcggcaagggcuaccaccugaugagcuucccucagucugccccucacggcgugguguuucugcacgugacauaugugcccgcucaagagaagaauuucaccaccgcuccagccaucugccacgacggcaaagcccacuuuccuagagaaggcguguucguguccaacggcacccauugguucgugacacagcggaacuucuacgagccccagaucaucaccaccgacaacaccuucgugucuggcaacugcgacgucgugaucggcauugugaacaauaccguguacgacccucugcagcccgagcuggacagcuucaaagaggaacuggacaaguacuuuaagaaccacacaagccccgacguggaccugggcgauaucagcggaaucaaugccagcgucgugaacauccagaaagagaucgaccggcugaacgagguggccaagaaucugaacgagagccugaucgaccugcaagaacuggggaaguacgagcaguacaucaaguggcccugguacaucuggcugggcuuuaucgccggacugauugccaucgugauggucacaaucaugcuguguugcaugaccagcugcuguagcugccugaagggcuguuguagcuguggcagcugcugcaaguucgacgaggacgauucugagcccgugcugaagggcgugaaacugcacuacacaugaugacucgagcugguacugcaugcacgcaaugcuagcugccccuuucccguccuggguaccccgagucucccccgaccucgggucccagguaugcucccaccuccaccugccccacucaccaccucugcuaguuccagacaccucccaagcacgcagcaaugcagcucaaaacgcuuagccuagccacacccccacgggaaacagcagugauuaaccuuuagcaauaaacgaaaguuuaacuaagcuauacuaaccccaggguuggucaauuucgugccagccacacccuggagcuagcaaaaaaaaaaaaaaaaaaaaaaaaaaaaaagcauaugacuaaaaaaaaaaaaaaaaaaaaaaaaaaaaaaaaaaaaaaaaaaaaaaaaaaaaaaaaaaaaaaaaaaaaaa

SEQ ID NO: 26801 - RNA, 4283 nt, Artificial Sequence
  SARS-CoV-2/Wuhan/WIV05/2019__EPI_ISL_402128 spike protein mRNA gc mod (1-1273)(A222V_D614G)
agaauaaacuaguauucuucugguccccacagacucagagagaacccgccaccauguucguguuccuggugcugcugccucugguguccagccagugugugaaccugaccaccagaacacagcugccuccagccuacaccaacagcuuuaccagaggcguguacuaccccgacaagguguucagauccagcgugcugcacucuacccaggaccuguuccugccuuucuucagcaacgugaccugguuccacgccauccacguguccggcaccaauggcaccaagagauucgacaaccccgugcugcccuucaacgacgggguguacuuugccagcaccgagaaguccaacaucaucagaggcuggaucuucggcaccacacuggacagcaagacccagagccugcugaucgugaacaacgccaccaacguggucaucaaagugugcgaguuccaguucugcaacgaccccuuccugggcgucuacuaccacaagaacaacaagagcuggauggaaagcgaguuccggguguacagcagcgccaacaacugcaccuucgaguacgugucccagccuuuccugauggaccuggaaggcaagcagggcaacuucaagaaccugcgcgaguucguguuuaagaacaucgacggcuacuucaagaucuacagcaagcacaccccuaucaaccucgugcgggaucugccucagggcuucucugugcuggaaccccugguggaucugcccaucggcaucaacaucacccgguuucagacacugcuggcccugcacagaagcuaccugacaccuggcgauagcagcagcggauggacagcuggugccgccgcuuacuaugugggcuaccugcagccuagaaccuuccugcugaaguacaacgagaacggcaccaucaccgacgccguggauugugcucuggauccucugagcgagacaaagugcacccugaaguccuucaccguggaaaagggcaucuaccagaccagcaacuuccgggugcagcccaccgaauccaucgugcgguuccccaauaucaccaaucugugccccuucggcgagguguucaaugccaccagauucgccucuguguacgccuggaaccggaagcggaucagcaauugcguggccgacuacuccgugcuguacaacuccgccagcuucagcaccuucaagugcuacggcguguccccuaccaagcugaacgaccugugcuucacaaacguguacgccgacagcuucgugauccggggagaugaagugcggcagauugccccuggacagacaggcaagaucgccgacuacaacuacaagcugcccgacgacuucaccggcugugugauugccuggaacagcaacaaccuggacuccaaagucggcggcaacuacaauuaccuguaccggcuguuccggaaguccaaucugaagcccuucgagcgggacaucuccaccgagaucuaucaggccggcagcaccccuuguaacggcguggaaggcuucaacugcuacuucccacugcaguccuacggcuuucagcccacaaauggcgugggcuaucagcccuacagagugguggugcugagcuucgaacugcugcaugccccugccacagugugcggcccuaagaaaagcaccaaucucgugaagaacaaaugcgugaacuucaacuucaacggccugaccggcaccggcgugcugacagagagcaacaagaaguuccugccauuccagcaguuuggccgggauaucgccgauaccacagacgccguuagagauccccagacacuggaaauccuggacaucaccccuugcagcuucggcggagugucugugaucaccccuggcaccaacaccagcaaucagguggcagugcuguaccagggcgugaacuguaccgaagugcccguggccauucacgccgaucagcugacaccuacauggcggguguacuccaccggcagcaauguguuucagaccagagccggcugucugaucggagccgagcacgugaacaauagcuacgagugcgacauccccaucggcgcuggaaucugcgccagcuaccagacacagacaaacagcccucggagagccagaagcguggccagccagagcaucauugccuacacaaugucucugggcgccgagaacagcguggccuacuccaacaacucuaucgcuauccccaccaacuucaccaucagcgugaccacagagauccugccuguguccaugaccaagaccagcguggacugcaccauguacaucugcggcgauuccaccgagugcuccaaccugcugcugcaguacggcagcuucugcacccagcugaauagagcccugacagggaucgccguggaacaggacaagaacacccaagagguguucgcccaagugaagcagaucuacaagaccccuccuaucaaggacuucggcggcuucaauuucagccagauucugcccgauccuagcaagcccagcaagcggagcuucaucgaggaccugcuguucaacaaagugacacuggccgacgccggcuucaucaagcaguauggcgauugucugggcgacauugccgccagggaucugauuugcgcccagaaguuuaacggacugacagugcugccuccucugcugaccgaugagaugaucgcccaguacacaucugcccugcuggccggcacaaucacaagcggcuggacauuuggagcaggcgccgcucugcagauccccuuugcuaugcagauggccuaccgguucaacggcaucggagugacccagaaugugcuguacgagaaccagaagcugaucgccaaccaguucaacagcgccaucggcaagauccaggacagccugagcagcacagcaagcgcccugggaaagcugcaggacguggucaaccagaaugcccaggcacugaacacccuggucaagcagcuguccuccaacuucggcgccaucagcucugugcugaacgauauccugagcagacuggacaaggucgaggccgaggugcagaucgacagacugaucacaggcagacugcagagccuccagacauacgugacccagcagcugaucagagccgccgagauuagagccucugccaaucuggccgccaccaagaugucugagugugugcugggccagagcaagagaguggacuuuugcggcaagggcuaccaccugaugagcuucccucagucugccccucacggcgugguguuucugcacgugacauaugugcccgcucaagagaagaauuucaccaccgcuccagccaucugccacgacggcaaagcccacuuuccuagagaaggcguguucguguccaacggcacccauugguucgugacacagcggaacuucuacgagccccagaucaucaccaccgacaacaccuucgugucuggcaacugcgacgucgugaucggcauugugaacaauaccguguacgacccucugcagcccgagcuggacagcuucaaagaggaacuggacaaguacuuuaagaaccacacaagccccgacguggaccugggcgauaucagcggaaucaaugccagcgucgugaacauccagaaagagaucgaccggcugaacgagguggccaagaaucugaacgagagccugaucgaccugcaagaacuggggaaguacgagcaguacaucaaguggcccugguacaucuggcugggcuuuaucgccggacugauugccaucgugauggucacaaucaugcuguguugcaugaccagcugcuguagcugccugaagggcuguuguagcuguggcagcugcugcaaguucgacgaggacgauucugagcccgugcugaagggcgugaaacugcacuacacaugaugacucgagcugguacugcaugcacgcaaugcuagcugccccuuucccguccuggguaccccgagucucccccgaccucgggucccagguaugcucccaccuccaccugccccacucaccaccucugcuaguuccagacaccucccaagcacgcagcaaugcagcucaaaacgcuuagccuagccacacccccacgggaaacagcagugauuaaccuuuagcaauaaacgaaaguuuaacuaagcuauacuaaccccaggguuggucaauuucgugccagccacacccuggagcuagcaaaaaaaaaaaaaaaaaaaaaaaaaaaaaagcauaugacuaaaaaaaaaaaaaaaaaaaaaaaaaaaaaaaaaaaaaaaaaaaaaaaaaaaaaaaaaaaaaaaaaaaaaa

SEQ ID NO: 26802 - RNA, 4283 nt, Artificial Sequence
  SARS-CoV-2/Wuhan/WIV05/2019__EPI_ISL_402128 spike protein mRNA gc mod (1-1273)(N439K_D614G)
agaauaaacuaguauucuucugguccccacagacucagagagaacccgccaccauguucguguuccuggugcugcugccucugguguccagccagugugugaaccugaccaccagaacacagcugccuccagccuacaccaacagcuuuaccagaggcguguacuaccccgacaagguguucagauccagcgugcugcacucuacccaggaccuguuccugccuuucuucagcaacgugaccugguuccacgccauccacguguccggcaccaauggcaccaagagauucgacaaccccgugcugcccuucaacgacgggguguacuuugccagcaccgagaaguccaacaucaucagaggcuggaucuucggcaccacacuggacagcaagacccagagccugcugaucgugaacaacgccaccaacguggucaucaaagugugcgaguuccaguucugcaacgaccccuuccugggcgucuacuaccacaagaacaacaagagcuggauggaaagcgaguuccggguguacagcagcgccaacaacugcaccuucgaguacgugucccagccuuuccugauggaccuggaaggcaagcagggcaacuucaagaaccugcgcgaguucguguuuaagaacaucgacggcuacuucaagaucuacagcaagcacaccccuaucaaccucgugcgggaucugccucagggcuucucugcucuggaaccccugguggaucugcccaucggcaucaacaucacccgguuucagacacugcuggcccugcacagaagcuaccugacaccuggcgauagcagcagcggauggacagcuggugccgccgcuuacuaugugggcuaccugcagccuagaaccuuccugcugaaguacaacgagaacggcaccaucaccgacgccguggauugugcucuggauccucugagcgagacaaagugcacccugaaguccuucaccguggaaaagggcaucuaccagaccagcaacuuccgggugcagcccaccgaauccaucgugcgguuccccaauaucaccaaucugugccccuucggcgagguguucaaugccaccagauucgccucuguguacgccuggaaccggaagcggaucagcaauugcguggccgacuacuccgugcuguacaacuccgccagcuucagcaccuucaagugcuacggcguguccccuaccaagcugaacgaccugugcuucacaaacguguacgccgacagcuucgugauccggggagaugaagugcggcagauugccccuggacagacaggcaagaucgccgacuacaacuacaagcugcccgacgacuucaccggcugugugauugccuggaacagcaagaaccuggacuccaaagucggcggcaacuacaauuaccuguaccggcuguuccggaaguccaaucugaagcccuucgagcgggacaucuccaccgagaucuaucaggccggcagcaccccuuguaacggcguggaaggcuucaacugcuacuucccacugcaguccuacggcuuucagcccacaaauggcgugggcuaucagcccuacagagugguggugcugagcuucgaacugcugcaugccccugccacagugugcggcccuaagaaaagcaccaaucucgugaagaacaaaugcgugaacuucaacuucaacggccugaccggcaccggcgugcugacagagagcaacaagaaguuccugccauuccagcaguuuggccgggauaucgccgauaccacagacgccguuagagauccccagacacuggaaauccuggacaucaccccuugcagcuucggcggagugucugugaucaccccuggcaccaacaccagcaaucagguggcagugcuguaccagggcgugaacuguaccgaagugcccguggccauucacgccgaucagcugacaccuacauggcggguguacuccaccggcagcaauguguuucagaccagagccggcugucugaucggagccgagcacgugaacaauagcuacgagugcgacauccccaucggcgcuggaaucugcgccagcuaccagacacagacaaacagcccucggagagccagaagcguggccagccagagcaucauugccuacacaaugucucugggcgccgagaacagcguggccuacuccaacaacucuaucgcuauccccaccaacuucaccaucagcgugaccacagagauccugccuguguccaugaccaagaccagcguggacugcaccauguacaucugcggcgauuccaccgagugcuccaaccugcugcugcaguacggcagcuucugcacccagcugaauagagcccugacagggaucgccguggaacaggacaagaacacccaagagguguucgcccaagugaagcagaucuacaagaccccuccuaucaaggacuucggcggcuucaauuucagccagauucugcccgauccuagcaagcccagcaagcggagcuucaucgaggaccugcuguucaacaaagugacacuggccgacgccggcuucaucaagcaguauggcgauugucugggcgacauugccgccagggaucugauuugcgcccagaaguuuaacggacugacagugcugccuccucugcugaccgaugagaugaucgcccaguacacaucugcccugcuggccggcacaaucacaagcggcuggacauuuggagcaggcgccgcucugcagauccccuuugcuaugcagauggccuaccgguucaacggcaucggagugacccagaaugugcuguacgagaaccagaagcugaucgccaaccaguucaacagcgccaucggcaagauccaggacagccugagcagcacagcaagcgcccugggaaagcugcaggacguggucaaccagaaugcccaggcacugaacacccuggucaagcagcuguccuccaacuucggcgccaucagcucugugcugaacgauauccugagcagacuggacaaggucgaggccgaggugcagaucgacagacugaucacaggcagacugcagagccuccagacauacgugacccagcagcugaucagagccgccgagauuagagccucugccaaucuggccgccaccaagaugucugagugugugcugggccagagcaagagaguggacuuuugcggcaagggcuaccaccugaugagcuucccucagucugccccucacggcgugguguuucugcacgugacauaugugcccgcucaagagaagaauuucaccaccgcuccagccaucugccacgacggcaaagcccacuuuccuagagaaggcguguucguguccaacggcacccauugguucgugacacagcggaacuucuacgagccccagaucaucaccaccgacaacaccuucgugucuggcaacugcgacgucgugaucggcauugugaacaauaccguguacgacccucugcagcccgagcuggacagcuucaaagaggaacuggacaaguacuuuaagaaccacacaagccccgacguggaccugggcgauaucagcggaaucaaugccagcgucgugaacauccagaaagagaucgaccggcugaacgagguggccaagaaucugaacgagagccugaucgaccugcaagaacuggggaaguacgagcaguacaucaaguggcccugguacaucuggcugggcuuuaucgccggacugauugccaucgugauggucacaaucaugcuguguugcaugaccagcugcuguagcugccugaagggcuguuguagcuguggcagcugcugcaaguucgacgaggacgauucugagcccgugcugaagggcgugaaacugcacuacacaugaugacucgagcugguacugcaugcacgcaaugcuagcugccccuuucccguccuggguaccccgagucucccccgaccucgggucccagguaugcucccaccuccaccugccccacucaccaccucugcuaguuccagacaccucccaagcacgcagcaaugcagcucaaaacgcuuagccuagccacacccccacgggaaacagcagugauuaaccuuuagcaauaaacgaaaguuuaacuaagcuauacuaaccccaggguuggucaauuucgugccagccacacccuggagcuagcaaaaaaaaaaaaaaaaaaaaaaaaaaaaaagcauaugacuaaaaaaaaaaaaaaaaaaaaaaaaaaaaaaaaaaaaaaaaaaaaaaaaaaaaaaaaaaaaaaaaaaaaaa

SEQ ID NO: 26803 - RNA, 4283 nt, Artificial Sequence
  SARS-CoV-2/Wuhan/WIV05/2019__EPI_ISL_402128 spike protein mRNA gc mod (1-1273)(S477N_D614G)
agaauaaacuaguauucuucugguccccacagacucagagagaacccgccaccauguucguguuccuggugcugcugccucugguguccagccagugugugaaccugaccaccagaacacagcugccuccagccuacaccaacagcuuuaccagaggcguguacuaccccgacaagguguucagauccagcgugcugcacucuacccaggaccuguuccugccuuucuucagcaacgugaccugguuccacgccauccacguguccggcaccaauggcaccaagagauucgacaaccccgugcugcccuucaacgacgggguguacuuugccagcaccgagaaguccaacaucaucagaggcuggaucuucggcaccacacuggacagcaagacccagagccugcugaucgugaacaacgccaccaacguggucaucaaagugugcgaguuccaguucugcaacgaccccuuccugggcgucuacuaccacaagaacaacaagagcuggauggaaagcgaguuccggguguacagcagcgccaacaacugcaccuucgaguacgugucccagccuuuccugauggaccuggaaggcaagcagggcaacuucaagaaccugcgcgaguucguguuuaagaacaucgacggcuacuucaagaucuacagcaagcacaccccuaucaaccucgugcgggaucugccucagggcuucucugcucuggaaccccugguggaucugcccaucggcaucaacaucacccgguuucagacacugcuggcccugcacagaagcuaccugacaccuggcgauagcagcagcggauggacagcuggugccgccgcuuacuaugugggcuaccugcagccuagaaccuuccugcugaaguacaacgagaacggcaccaucaccgacgccguggauugugcucuggauccucugagcgagacaaagugcacccugaaguccuucaccguggaaaagggcaucuaccagaccagcaacuuccgggugcagcccaccgaauccaucgugcgguuccccaauaucaccaaucugugccccuucggcgagguguucaaugccaccagauucgccucuguguacgccuggaaccggaagcggaucagcaauugcguggccgacuacuccgugcuguacaacuccgccagcuucagcaccuucaagugcuacggcguguccccuaccaagcugaacgaccugugcuucacaaacguguacgccgacagcuucgugauccggggagaugaagugcggcagauugccccuggacagacaggcaagaucgccgacuacaacuacaagcugcccgacgacuucaccggcugugugauugccuggaacagcaacaaccuggacuccaaagucggcggcaacuacaauuaccuguaccggcuguuccggaaguccaaucugaagcccuucgagcgggacaucuccaccgagaucuaucaggccggcaacaccccuuguaacggcguggaaggcuucaacugcuacuucccacugcaguccuacggcuuucagcccacaaauggcgugggcuaucagcccuacagagugguggugcugagcuucgaacugcugcaugccccugccacagugugcggcccuaagaaaagcaccaaucucgugaagaacaaaugcgugaacuucaacuucaacggccugaccggcaccggcgugcugacagagagcaacaagaaguuccugccauuccagcaguuuggccgggauaucgccgauaccacagacgccguuagagauccccagacacuggaaauccuggacaucaccccuugcagcuucggcggagugucugugaucaccccuggcaccaacaccagcaaucagguggcagugcuguaccagggcgugaacuguaccgaagugcccguggccauucacgccgaucagcugacaccuacauggcggguguacuccaccggcagcaauguguuucagaccagagccggcugucugaucggagccgagcacgugaacaauagcuacgagugcgacauccccaucggcgcuggaaucugcgccagcuaccagacacagacaaacagcccucggagagccagaagcguggccagccagagcaucauugccuacacaaugucucugggcgccgagaacagcguggccuacuccaacaacucuaucgcuauccccaccaacuucaccaucagcgugaccacagagauccugccuguguccaugaccaagaccagcguggacugcaccauguacaucugcggcgauuccaccgagugcuccaaccugcugcugcaguacggcagcuucugcacccagcugaauagagcccugacagggaucgccguggaacaggacaagaacacccaagagguguucgcccaagugaagcagaucuacaagaccccuccuaucaaggacuucggcggcuucaauuucagccagauucugcccgauccuagcaagcccagcaagcggagcuucaucgaggaccugcuguucaacaaagugacacuggccgacgccggcuucaucaagcaguauggcgauugucugggcgacauugccgccagggaucugauuugcgcccagaaguuuaacggacugacagugcugccuccucugcugaccgaugagaugaucgcccaguacacaucugcccugcuggccggcacaaucacaagcggcuggacauuuggagcaggcgccgcucugcagauccccuuugcuaugcagauggccuaccgguucaacggcaucggagugacccagaaugugcuguacgagaaccagaagcugaucgccaaccaguucaacagcgccaucggcaagauccaggacagccugagcagcacagcaagcgcccugggaaagcugcaggacguggucaaccagaaugcccaggcacugaacacccuggucaagcagcuguccuccaacuucggcgccaucagcucugugcugaacgauauccugagcagacuggacaaggucgaggccgaggugcagaucgacagacugaucacaggcagacugcagagccuccagacauacgugacccagcagcugaucagagccgccgagauuagagccucugccaaucuggccgccaccaagaugucugagugugugcugggccagagcaagagaguggacuuuugcggcaagggcuaccaccugaugagcuucccucagucugccccucacggcgugguguuucugcacgugacauaugugcccgcucaagagaagaauuucaccaccgcuccagccaucugccacgacggcaaagcccacuuuccuagagaaggcguguucguguccaacggcacccauugguucgugacacagcggaacuucuacgagccccagaucaucaccaccgacaacaccuucgugucuggcaacugcgacgucgugaucggcauugugaacaauaccguguacgacccucugcagcccgagcuggacagcuucaaagaggaacuggacaaguacuuuaagaaccacacaagccccgacguggaccugggcgauaucagcggaaucaaugccagcgucgugaacauccagaaagagaucgaccggcugaacgagguggccaagaaucugaacgagagccugaucgaccugcaagaacuggggaaguacgagcaguacaucaaguggcccugguacaucuggcugggcuuuaucgccggacugauugccaucgugauggucacaaucaugcuguguugcaugaccagcugcuguagcugccugaagggcuguuguagcuguggcagcugcugcaaguucgacgaggacgauucugagcccgugcugaagggcgugaaacugcacuacacaugaugacucgagcugguacugcaugcacgcaaugcuagcugccccuuucccguccuggguaccccgagucucccccgaccucgggucccagguaugcucccaccuccaccugccccacucaccaccucugcuaguuccagacaccucccaagcacgcagcaaugcagcucaaaacgcuuagccuagccacacccccacgggaaacagcagugauuaaccuuuagcaauaaacgaaaguuuaacuaagcuauacuaaccccaggguuggucaauuucgugccagccacacccuggagcuagcaaaaaaaaaaaaaaaaaaaaaaaaaaaaaagcauaugacuaaaaaaaaaaaaaaaaaaaaaaaaaaaaaaaaaaaaaaaaaaaaaaaaaaaaaaaaaaaaaaaaaaaaaa

SEQ ID NO: 26804 - RNA, 4283 nt, Artificial Sequence
  SARS-CoV-2/Wuhan/WIV05/2019__EPI_ISL_402128 spike protein mRNA gc mod (1-1273)(N501Y_D614G)
agaauaaacuaguauucuucugguccccacagacucagagagaacccgccaccauguucguguuccuggugcugcugccucugguguccagccagugugugaaccugaccaccagaacacagcugccuccagccuacaccaacagcuuuaccagaggcguguacuaccccgacaagguguucagauccagcgugcugcacucuacccaggaccuguuccugccuuucuucagcaacgugaccugguuccacgccauccacguguccggcaccaauggcaccaagagauucgacaaccccgugcugcccuucaacgacgggguguacuuugccagcaccgagaaguccaacaucaucagaggcuggaucuucggcaccacacuggacagcaagacccagagccugcugaucgugaacaacgccaccaacguggucaucaaagugugcgaguuccaguucugcaacgaccccuuccugggcgucuacuaccacaagaacaacaagagcuggauggaaagcgaguuccggguguacagcagcgccaacaacugcaccuucgaguacgugucccagccuuuccugauggaccuggaaggcaagcagggcaacuucaagaaccugcgcgaguucguguuuaagaacaucgacggcuacuucaagaucuacagcaagcacaccccuaucaaccucgugcgggaucugccucagggcuucucugcucuggaaccccugguggaucugcccaucggcaucaacaucacccgguuucagacacugcuggcccugcacagaagcuaccugacaccuggcgauagcagcagcggauggacagcuggugccgccgcuuacuaugugggcuaccugcagccuagaaccuuccugcugaaguacaacgagaacggcaccaucaccgacgccguggauugugcucuggauccucugagcgagacaaagugcacccugaaguccuucaccguggaaaagggcaucuaccagaccagcaacuuccgggugcagcccaccgaauccaucgugcgguuccccaauaucaccaaucugugccccuucggcgagguguucaaugccaccagauucgccucuguguacgccuggaaccggaagcggaucagcaauugcguggccgacuacuccgugcuguacaacuccgccagcuucagcaccuucaagugcuacggcguguccccuaccaagcugaacgaccugugcuucacaaacguguacgccgacagcuucgugauccggggagaugaagugcggcagauugccccuggacagacaggcaagaucgccgacuacaacuacaagcugcccgacgacuucaccggcugugugauugccuggaacagcaacaaccuggacuccaaagucggcggcaacuacaauuaccuguaccggcuguuccggaaguccaaucugaagcccuucgagcgggacaucuccaccgagaucuaucaggccggcagcaccccuuguaacggcguggaaggcuucaacugcuacuucccacugcaguccuacggcuuucagcccacauacggcgugggcuaucagcccuacagagugguggugcugagcuucgaacugcugcaugccccugccacagugugcggcccuaagaaaagcaccaaucucgugaagaacaaaugcgugaacuucaacuucaacggccugaccggcaccggcgugcugacagagagcaacaagaaguuccugccauuccagcaguuuggccgggauaucgccgauaccacagacgccguuagagauccccagacacuggaaauccuggacaucaccccuugcagcuucggcggagugucugugaucaccccuggcaccaacaccagcaaucagguggcagugcuguaccagggcgugaacuguaccgaagugcccguggccauucacgccgaucagcugacaccuacauggcggguguacuccaccggcagcaauguguuucagaccagagccggcugucugaucggagccgagcacgugaacaauagcuacgagugcgacauccccaucggcgcuggaaucugcgccagcuaccagacacagacaaacagcccucggagagccagaagcguggccagccagagcaucauugccuacacaaugucucugggcgccgagaacagcguggccuacuccaacaacucuaucgcuauccccaccaacuucaccaucagcgugaccacagagauccugccuguguccaugaccaagaccagcguggacugcaccauguacaucugcggcgauuccaccgagugcuccaaccugcugcugcaguacggcagcuucugcacccagcugaauagagcccugacagggaucgccguggaacaggacaagaacacccaagagguguucgcccaagugaagcagaucuacaagaccccuccuaucaaggacuucggcggcuucaauuucagccagauucugcccgauccuagcaagcccagcaagcggagcuucaucgaggaccugcuguucaacaaagugacacuggccgacgccggcuucaucaagcaguauggcgauugucugggcgacauugccgccagggaucugauuugcgcccagaaguuuaacggacugacagugcugccuccucugcugaccgaugagaugaucgcccaguacacaucugcccugcuggccggcacaaucacaagcggcuggacauuuggagcaggcgccgcucugcagauccccuuugcuaugcagauggccuaccgguucaacggcaucggagugacccagaaugugcuguacgagaaccagaagcugaucgccaaccaguucaacagcgccaucggcaagauccaggacagccugagcagcacagcaagcgcccugggaaagcugcaggacguggucaaccagaaugcccaggcacugaacacccuggucaagcagcuguccuccaacuucggcgccaucagcucugugcugaacgauauccugagcagacuggacaaggucgaggccgaggugcagaucgacagacugaucacaggcagacugcagagccuccagacauacgugacccagcagcugaucagagccgccgagauuagagccucugccaaucuggccgccaccaagaugucugagugugugcugggccagagcaagagaguggacuuuugcggcaagggcuaccaccugaugagcuucccucagucugccccucacggcgugguguuucugcacgugacauaugugcccgcucaagagaagaauuucaccaccgcuccagccaucugccacgacggcaaagcccacuuuccuagagaaggcguguucguguccaacggcacccauugguucgugacacagcggaacuucuacgagccccagaucaucaccaccgacaacaccuucgugucuggcaacugcgacgucgugaucggcauugugaacaauaccguguacgacccucugcagcccgagcuggacagcuucaaagaggaacuggacaaguacuuuaagaaccacacaagccccgacguggaccugggcgauaucagcggaaucaaugccagcgucgugaacauccagaaagagaucgaccggcugaacgagguggccaagaaucugaacgagagccugaucgaccugcaagaacuggggaaguacgagcaguacaucaaguggcccugguacaucuggcugggcuuuaucgccggacugauugccaucgugauggucacaaucaugcuguguugcaugaccagcugcuguagcugccugaagggcuguuguagcuguggcagcugcugcaaguucgacgaggacgauucugagcccgugcugaagggcgugaaacugcacuacacaugaugacucgagcugguacugcaugcacgcaaugcuagcugccccuuucccguccuggguaccccgagucucccccgaccucgggucccagguaugcucccaccuccaccugccccacucaccaccucugcuaguuccagacaccucccaagcacgcagcaaugcagcucaaaacgcuuagccuagccacacccccacgggaaacagcagugauuaaccuuuagcaauaaacgaaaguuuaacuaagcuauacuaaccccaggguuggucaauuucgugccagccacacccuggagcuagcaaaaaaaaaaaaaaaaaaaaaaaaaaaaaagcauaugacuaaaaaaaaaaaaaaaaaaaaaaaaaaaaaaaaaaaaaaaaaaaaaaaaaaaaaaaaaaaaaaaaaaaaaa

SEQ ID NO: 26805 - RNA, 4277 nt, Artificial Sequence
  SARS-CoV-2/Wuhan/WIV05/2019__EPI_ISL_402128 spike protein mRNA gc mod (1-1273)(H69del_V70del_D614G)
agaauaaacuaguauucuucugguccccacagacucagagagaacccgccaccauguucguguuccuggugcugcugccucugguguccagccagugugugaaccugaccaccagaacacagcugccuccagccuacaccaacagcuuuaccagaggcguguacuaccccgacaagguguucagauccagcgugcugcacucuacccaggaccuguuccugccuuucuucagcaacgugaccugguuccacgccaucuccggcaccaauggcaccaagagauucgacaaccccgugcugcccuucaacgacgggguguacuuugccagcaccgagaaguccaacaucaucagaggcuggaucuucggcaccacacuggacagcaagacccagagccugcugaucgugaacaacgccaccaacguggucaucaaagugugcgaguuccaguucugcaacgaccccuuccugggcgucuacuaccacaagaacaacaagagcuggauggaaagcgaguuccggguguacagcagcgccaacaacugcaccuucgaguacgugucccagccuuuccugauggaccuggaaggcaagcagggcaacuucaagaaccugcgcgaguucguguuuaagaacaucgacggcuacuucaagaucuacagcaagcacaccccuaucaaccucgugcgggaucugccucagggcuucucugcucuggaaccccugguggaucugcccaucggcaucaacaucacccgguuucagacacugcuggcccugcacagaagcuaccugacaccuggcgauagcagcagcggauggacagcuggugccgccgcuuacuaugugggcuaccugcagccuagaaccuuccugcugaaguacaacgagaacggcaccaucaccgacgccguggauugugcucuggauccucugagcgagacaaagugcacccugaaguccuucaccguggaaaagggcaucuaccagaccagcaacuuccgggugcagcccaccgaauccaucgugcgguuccccaauaucaccaaucugugccccuucggcgagguguucaaugccaccagauucgccucuguguacgccuggaaccggaagcggaucagcaauugcguggccgacuacuccgugcuguacaacuccgccagcuucagcaccuucaagugcuacggcguguccccuaccaagcugaacgaccugugcuucacaaacguguacgccgacagcuucgugauccggggagaugaagugcggcagauugccccuggacagacaggcaagaucgccgacuacaacuacaagcugcccgacgacuucaccggcugugugauugccuggaacagcaacaaccuggacuccaaagucggcggcaacuacaauuaccuguaccggcuguuccggaaguccaaucugaagcccuucgagcgggacaucuccaccgagaucuaucaggccggcagcaccccuuguaacggcguggaaggcuucaacugcuacuucccacugcaguccuacggcuuucagcccacaaauggcgugggcuaucagcccuacagagugguggugcugagcuucgaacugcugcaugccccugccacagugugcggcccuaagaaaagcaccaaucucgugaagaacaaaugcgugaacuucaacuucaacggccugaccggcaccggcgugcugacagagagcaacaagaaguuccugccauuccagcaguuuggccgggauaucgccgauaccacagacgccguuagagauccccagacacuggaaauccuggacaucaccccuugcagcuucggcggagugucugugaucaccccuggcaccaacaccagcaaucagguggcagugcuguaccagggcgugaacuguaccgaagugcccguggccauucacgccgaucagcugacaccuacauggcggguguacuccaccggcagcaauguguuucagaccagagccggcugucugaucggagccgagcacgugaacaauagcuacgagugcgacauccccaucggcgcuggaaucugcgccagcuaccagacacagacaaacagcccucggagagccagaagcguggccagccagagcaucauugccuacacaaugucucugggcgccgagaacagcguggccuacuccaacaacucuaucgcuauccccaccaacuucaccaucagcgugaccacagagauccugccuguguccaugaccaagaccagcguggacugcaccauguacaucugcggcgauuccaccgagugcuccaaccugcugcugcaguacggcagcuucugcacccagcugaauagagcccugacagggaucgccguggaacaggacaagaacacccaagagguguucgcccaagugaagcagaucuacaagaccccuccuaucaaggacuucggcggcuucaauuucagccagauucugcccgauccuagcaagcccagcaagcggagcuucaucgaggaccugcuguucaacaaagugacacuggccgacgccggcuucaucaagcaguauggcgauugucugggcgacauugccgccagggaucugauuugcgcccagaaguuuaacggacugacagugcugccuccucugcugaccgaugagaugaucgcccaguacacaucugcccugcuggccggcacaaucacaagcggcuggacauuuggagcaggcgccgcucugcagauccccuuugcuaugcagauggccuaccgguucaacggcaucggagugacccagaaugugcuguacgagaaccagaagcugaucgccaaccaguucaacagcgccaucggcaagauccaggacagccugagcagcacagcaagcgcccugggaaagcugcaggacguggucaaccagaaugcccaggcacugaacacccuggucaagcagcuguccuccaacuucggcgccaucagcucugugcugaacgauauccugagcagacuggacaaggucgaggccgaggugcagaucgacagacugaucacaggcagacugcagagccuccagacauacgugacccagcagcugaucagagccgccgagauuagagccucugccaaucuggccgccaccaagaugucugagugugugcugggccagagcaagagaguggacuuuugcggcaagggcuaccaccugaugagcuucccucagucugccccucacggcgugguguuucugcacgugacauaugugcccgcucaagagaagaauuucaccaccgcuccagccaucugccacgacggcaaagcccacuuuccuagagaaggcguguucguguccaacggcacccauugguucgugacacagcggaacuucuacgagccccagaucaucaccaccgacaacaccuucgugucuggcaacugcgacgucgugaucggcauugugaacaauaccguguacgacccucugcagcccgagcuggacagcuucaaagaggaacuggacaaguacuuuaagaaccacacaagccccgacguggaccugggcgauaucagcggaaucaaugccagcgucgugaacauccagaaagagaucgaccggcugaacgagguggccaagaaucugaacgagagccugaucgaccugcaagaacuggggaaguacgagcaguacaucaaguggcccugguacaucuggcugggcuuuaucgccggacugauugccaucgugauggucacaaucaugcuguguugcaugaccagcugcuguagcugccugaagggcuguuguagcuguggcagcugcugcaaguucgacgaggacgauucugagcccgugcugaagggcgugaaacugcacuacacaugaugacucgagcugguacugcaugcacgcaaugcuagcugccccuuucccguccuggguaccccgagucucccccgaccucgggucccagguaugcucccaccuccaccugccccacucaccaccucugcuaguuccagacaccucccaagcacgcagcaaugcagcucaaaacgcuuagccuagccacacccccacgggaaacagcagugauuaaccuuuagcaauaaacgaaaguuuaacuaagcuauacuaaccccaggguuggucaauuucgugccagccacacccuggagcuagcaaaaaaaaaaaaaaaaaaaaaaaaaaaaaagcauaugacuaaaaaaaaaaaaaaaaaaaaaaaaaaaaaaaaaaaaaaaaaaaaaaaaaaaaaaaaaaaaaaaaaaaaaa

SEQ ID NO: 26806 - RNA, 4283 nt, Artificial Sequence
  SARS-CoV-2/Wuhan/WIV05/2019__EPI_ISL_402128 spike protein mRNA gc mod (1-1273)(Y453F_D614G)
agaauaaacuaguauucuucugguccccacagacucagagagaacccgccaccauguucguguuccuggugcugcugccucugguguccagccagugugugaaccugaccaccagaacacagcugccuccagccuacaccaacagcuuuaccagaggcguguacuaccccgacaagguguucagauccagcgugcugcacucuacccaggaccuguuccugccuuucuucagcaacgugaccugguuccacgccauccacguguccggcaccaauggcaccaagagauucgacaaccccgugcugcccuucaacgacgggguguacuuugccagcaccgagaaguccaacaucaucagaggcuggaucuucggcaccacacuggacagcaagacccagagccugcugaucgugaacaacgccaccaacguggucaucaaagugugcgaguuccaguucugcaacgaccccuuccugggcgucuacuaccacaagaacaacaagagcuggauggaaagcgaguuccggguguacagcagcgccaacaacugcaccuucgaguacgugucccagccuuuccugauggaccuggaaggcaagcagggcaacuucaagaaccugcgcgaguucguguuuaagaacaucgacggcuacuucaagaucuacagcaagcacaccccuaucaaccucgugcgggaucugccucagggcuucucugcucuggaaccccugguggaucugcccaucggcaucaacaucacccgguuucagacacugcuggcccugcacagaagcuaccugacaccuggcgauagcagcagcggauggacagcuggugccgccgcuuacuaugugggcuaccugcagccuagaaccuuccugcugaaguacaacgagaacggcaccaucaccgacgccguggauugugcucuggauccucugagcgagacaaagugcacccugaaguccuucaccguggaaaagggcaucuaccagaccagcaacuuccgggugcagcccaccgaauccaucgugcgguuccccaauaucaccaaucugugccccuucggcgagguguucaaugccaccagauucgccucuguguacgccuggaaccggaagcggaucagcaauugcguggccgacuacuccgugcuguacaacuccgccagcuucagcaccuucaagugcuacggcguguccccuaccaagcugaacgaccugugcuucacaaacguguacgccgacagcuucgugauccggggagaugaagugcggcagauugccccuggacagacaggcaagaucgccgacuacaacuacaagcugcccgacgacuucaccggcugugugauugccuggaacagcaacaaccuggacuccaaagucggcggcaacuacaauuaccuguuccggcuguuccggaaguccaaucugaagcccuucgagcgggacaucuccaccgagaucuaucaggccggcagcaccccuuguaacggcguggaaggcuucaacugcuacuucccacugcaguccuacggcuuucagcccacaaauggcgugggcuaucagcccuacagagugguggugcugagcuucgaacugcugcaugccccugccacagugugcggcccuaagaaaagcaccaaucucgugaagaacaaaugcgugaacuucaacuucaacggccugaccggcaccggcgugcugacagagagcaacaagaaguuccugccauuccagcaguuuggccgggauaucgccgauaccacagacgccguuagagauccccagacacuggaaauccuggacaucaccccuugcagcuucggcggagugucugugaucaccccuggcaccaacaccagcaaucagguggcagugcuguaccagggcgugaacuguaccgaagugcccguggccauucacgccgaucagcugacaccuacauggcggguguacuccaccggcagcaauguguuucagaccagagccggcugucugaucggagccgagcacgugaacaauagcuacgagugcgacauccccaucggcgcuggaaucugcgccagcuaccagacacagacaaacagcccucggagagccagaagcguggccagccagagcaucauugccuacacaaugucucugggcgccgagaacagcguggccuacuccaacaacucuaucgcuauccccaccaacuucaccaucagcgugaccacagagauccugccuguguccaugaccaagaccagcguggacugcaccauguacaucugcggcgauuccaccgagugcuccaaccugcugcugcaguacggcagcuucugcacccagcugaauagagcccugacagggaucgccguggaacaggacaagaacacccaagagguguucgcccaagugaagcagaucuacaagaccccuccuaucaaggacuucggcggcuucaauuucagccagauucugcccgauccuagcaagcccagcaagcggagcuucaucgaggaccugcuguucaacaaagugacacuggccgacgccggcuucaucaagcaguauggcgauugucugggcgacauugccgccagggaucugauuugcgcccagaaguuuaacggacugacagugcugccuccucugcugaccgaugagaugaucgcccaguacacaucugcccugcuggccggcacaaucacaagcggcuggacauuuggagcaggcgccgcucugcagauccccuuugcuaugcagauggccuaccgguucaacggcaucggagugacccagaaugugcuguacgagaaccagaagcugaucgccaaccaguucaacagcgccaucggcaagauccaggacagccugagcagcacagcaagcgcccugggaaagcugcaggacguggucaaccagaaugcccaggcacugaacacccuggucaagcagcuguccuccaacuucggcgccaucagcucugugcugaacgauauccugagcagacuggacaaggucgaggccgaggugcagaucgacagacugaucacaggcagacugcagagccuccagacauacgugacccagcagcugaucagagccgccgagauuagagccucugccaaucuggccgccaccaagaugucugagugugugcugggccagagcaagagaguggacuuuugcggcaagggcuaccaccugaugagcuucccucagucugccccucacggcgugguguuucugcacgugacauaugugcccgcucaagagaagaauuucaccaccgcuccagccaucugccacgacggcaaagcccacuuuccuagagaaggcguguucguguccaacggcacccauugguucgugacacagcggaacuucuacgagccccagaucaucaccaccgacaacaccuucgugucuggcaacugcgacgucgugaucggcauugugaacaauaccguguacgacccucugcagcccgagcuggacagcuucaaagaggaacuggacaaguacuuuaagaaccacacaagccccgacguggaccugggcgauaucagcggaaucaaugccagcgucgugaacauccagaaagagaucgaccggcugaacgagguggccaagaaucugaacgagagccugaucgaccugcaagaacuggggaaguacgagcaguacaucaaguggcccugguacaucuggcugggcuuuaucgccggacugauugccaucgugauggucacaaucaugcuguguugcaugaccagcugcuguagcugccugaagggcuguuguagcuguggcagcugcugcaaguucgacgaggacgauucugagcccgugcugaagggcgugaaacugcacuacacaugaugacucgagcugguacugcaugcacgcaaugcuagcugccccuuucccguccuggguaccccgagucucccccgaccucgggucccagguaugcucccaccuccaccugccccacucaccaccucugcuaguuccagacaccucccaagcacgcagcaaugcagcucaaaacgcuuagccuagccacacccccacgggaaacagcagugauuaaccuuuagcaauaaacgaaaguuuaacuaagcuauacuaaccccaggguuggucaauuucgugccagccacacccuggagcuagcaaaaaaaaaaaaaaaaaaaaaaaaaaaaaagcauaugacuaaaaaaaaaaaaaaaaaaaaaaaaaaaaaaaaaaaaaaaaaaaaaaaaaaaaaaaaaaaaaaaaaaaaaa

SEQ ID NO: 26807 - RNA, 4283 nt, Artificial Sequence
  SARS-CoV-2/Wuhan/WIV05/2019__EPI_ISL_402128 spike protein mRNA gc mod (1-1273)(D614G_I692V)
agaauaaacuaguauucuucugguccccacagacucagagagaacccgccaccauguucguguuccuggugcugcugccucugguguccagccagugugugaaccugaccaccagaacacagcugccuccagccuacaccaacagcuuuaccagaggcguguacuaccccgacaagguguucagauccagcgugcugcacucuacccaggaccuguuccugccuuucuucagcaacgugaccugguuccacgccauccacguguccggcaccaauggcaccaagagauucgacaaccccgugcugcccuucaacgacgggguguacuuugccagcaccgagaaguccaacaucaucagaggcuggaucuucggcaccacacuggacagcaagacccagagccugcugaucgugaacaacgccaccaacguggucaucaaagugugcgaguuccaguucugcaacgaccccuuccugggcgucuacuaccacaagaacaacaagagcuggauggaaagcgaguuccggguguacagcagcgccaacaacugcaccuucgaguacgugucccagccuuuccugauggaccuggaaggcaagcagggcaacuucaagaaccugcgcgaguucguguuuaagaacaucgacggcuacuucaagaucuacagcaagcacaccccuaucaaccucgugcgggaucugccucagggcuucucugcucuggaaccccugguggaucugcccaucggcaucaacaucacccgguuucagacacugcuggcccugcacagaagcuaccugacaccuggcgauagcagcagcggauggacagcuggugccgccgcuuacuaugugggcuaccugcagccuagaaccuuccugcugaaguacaacgagaacggcaccaucaccgacgccguggauugugcucuggauccucugagcgagacaaagugcacccugaaguccuucaccguggaaaagggcaucuaccagaccagcaacuuccgggugcagcccaccgaauccaucgugcgguuccccaauaucaccaaucugugccccuucggcgagguguucaaugccaccagauucgccucuguguacgccuggaaccggaagcggaucagcaauugcguggccgacuacuccgugcuguacaacuccgccagcuucagcaccuucaagugcuacggcguguccccuaccaagcugaacgaccugugcuucacaaacguguacgccgacagcuucgugauccggggagaugaagugcggcagauugccccuggacagacaggcaagaucgccgacuacaacuacaagcugcccgacgacuucaccggcugugugauugccuggaacagcaacaaccuggacuccaaagucggcggcaacuacaauuaccuguaccggcuguuccggaaguccaaucugaagcccuucgagcgggacaucuccaccgagaucuaucaggccggcagcaccccuuguaacggcguggaaggcuucaacugcuacuucccacugcaguccuacggcuuucagcccacaaauggcgugggcuaucagcccuacagagugguggugcugagcuucgaacugcugcaugccccugccacagugugcggcccuaagaaaagcaccaaucucgugaagaacaaaugcgugaacuucaacuucaacggccugaccggcaccggcgugcugacagagagcaacaagaaguuccugccauuccagcaguuuggccgggauaucgccgauaccacagacgccguuagagauccccagacacuggaaauccuggacaucaccccuugcagcuucggcggagugucugugaucaccccuggcaccaacaccagcaaucagguggcagugcuguaccagggcgugaacuguaccgaagugcccguggccauucacgccgaucagcugacaccuacauggcggguguacuccaccggcagcaauguguuucagaccagagccggcugucugaucggagccgagcacgugaacaauagcuacgagugcgacauccccaucggcgcuggaaucugcgccagcuaccagacacagacaaacagcccucggagagccagaagcguggccagccagagcgugauugccuacacaaugucucugggcgccgagaacagcguggccuacuccaacaacucuaucgcuauccccaccaacuucaccaucagcgugaccacagagauccugccuguguccaugaccaagaccagcguggacugcaccauguacaucugcggcgauuccaccgagugcuccaaccugcugcugcaguacggcagcuucugcacccagcugaauagagcccugacagggaucgccguggaacaggacaagaacacccaagagguguucgcccaagugaagcagaucuacaagaccccuccuaucaaggacuucggcggcuucaauuucagccagauucugcccgauccuagcaagcccagcaagcggagcuucaucgaggaccugcuguucaacaaagugacacuggccgacgccggcuucaucaagcaguauggcgauugucugggcgacauugccgccagggaucugauuugcgcccagaaguuuaacggacugacagugcugccuccucugcugaccgaugagaugaucgcccaguacacaucugcccugcuggccggcacaaucacaagcggcuggacauuuggagcaggcgccgcucugcagauccccuuugcuaugcagauggccuaccgguucaacggcaucggagugacccagaaugugcuguacgagaaccagaagcugaucgccaaccaguucaacagcgccaucggcaagauccaggacagccugagcagcacagcaagcgcccugggaaagcugcaggacguggucaaccagaaugcccaggcacugaacacccuggucaagcagcuguccuccaacuucggcgccaucagcucugugcugaacgauauccugagcagacuggacaaggucgaggccgaggugcagaucgacagacugaucacaggcagacugcagagccuccagacauacgugacccagcagcugaucagagccgccgagauuagagccucugccaaucuggccgccaccaagaugucugagugugugcugggccagagcaagagaguggacuuuugcggcaagggcuaccaccugaugagcuucccucagucugccccucacggcgugguguuucugcacgugacauaugugcccgcucaagagaagaauuucaccaccgcuccagccaucugccacgacggcaaagcccacuuuccuagagaaggcguguucguguccaacggcacccauugguucgugacacagcggaacuucuacgagccccagaucaucaccaccgacaacaccuucgugucuggcaacugcgacgucgugaucggcauugugaacaauaccguguacgacccucugcagcccgagcuggacagcuucaaagaggaacuggacaaguacuuuaagaaccacacaagccccgacguggaccugggcgauaucagcggaaucaaugccagcgucgugaacauccagaaagagaucgaccggcugaacgagguggccaagaaucugaacgagagccugaucgaccugcaagaacuggggaaguacgagcaguacaucaaguggcccugguacaucuggcugggcuuuaucgccggacugauugccaucgugauggucacaaucaugcuguguugcaugaccagcugcuguagcugccugaagggcuguuguagcuguggcagcugcugcaaguucgacgaggacgauucugagcccgugcugaagggcgugaaacugcacuacacaugaugacucgagcugguacugcaugcacgcaaugcuagcugccccuuucccguccuggguaccccgagucucccccgaccucgggucccagguaugcucccaccuccaccugccccacucaccaccucugcuaguuccagacaccucccaagcacgcagcaaugcagcucaaaacgcuuagccuagccacacccccacgggaaacagcagugauuaaccuuuagcaauaaacgaaaguuuaacuaagcuauacuaaccccaggguuggucaauuucgugccagccacacccuggagcuagcaaaaaaaaaaaaaaaaaaaaaaaaaaaaaagcauaugacuaaaaaaaaaaaaaaaaaaaaaaaaaaaaaaaaaaaaaaaaaaaaaaaaaaaaaaaaaaaaaaaaaaaaaa

SEQ ID NO: 26808 - RNA, 4283 nt, Artificial Sequence
  SARS-CoV-2/Wuhan/WIV05/2019__EPI_ISL_402128 spike protein mRNA gc mod (1-1273)(D614G_M1229I)
agaauaaacuaguauucuucugguccccacagacucagagagaacccgccaccauguucguguuccuggugcugcugccucugguguccagccagugugugaaccugaccaccagaacacagcugccuccagccuacaccaacagcuuuaccagaggcguguacuaccccgacaagguguucagauccagcgugcugcacucuacccaggaccuguuccugccuuucuucagcaacgugaccugguuccacgccauccacguguccggcaccaauggcaccaagagauucgacaaccccgugcugcccuucaacgacgggguguacuuugccagcaccgagaaguccaacaucaucagaggcuggaucuucggcaccacacuggacagcaagacccagagccugcugaucgugaacaacgccaccaacguggucaucaaagugugcgaguuccaguucugcaacgaccccuuccugggcgucuacuaccacaagaacaacaagagcuggauggaaagcgaguuccggguguacagcagcgccaacaacugcaccuucgaguacgugucccagccuuuccugauggaccuggaaggcaagcagggcaacuucaagaaccugcgcgaguucguguuuaagaacaucgacggcuacuucaagaucuacagcaagcacaccccuaucaaccucgugcgggaucugccucagggcuucucugcucuggaaccccugguggaucugcccaucggcaucaacaucacccgguuucagacacugcuggcccugcacagaagcuaccugacaccuggcgauagcagcagcggauggacagcuggugccgccgcuuacuaugugggcuaccugcagccuagaaccuuccugcugaaguacaacgagaacggcaccaucaccgacgccguggauugugcucuggauccucugagcgagacaaagugcacccugaaguccuucaccguggaaaagggcaucuaccagaccagcaacuuccgggugcagcccaccgaauccaucgugcgguuccccaauaucaccaaucugugccccuucggcgagguguucaaugccaccagauucgccucuguguacgccuggaaccggaagcggaucagcaauugcguggccgacuacuccgugcuguacaacuccgccagcuucagcaccuucaagugcuacggcguguccccuaccaagcugaacgaccugugcuucacaaacguguacgccgacagcuucgugauccggggagaugaagugcggcagauugccccuggacagacaggcaagaucgccgacuacaacuacaagcugcccgacgacuucaccggcugugugauugccuggaacagcaacaaccuggacuccaaagucggcggcaacuacaauuaccuguaccggcuguuccggaaguccaaucugaagcccuucgagcgggacaucuccaccgagaucuaucaggccggcagcaccccuuguaacggcguggaaggcuucaacugcuacuucccacugcaguccuacggcuuucagcccacaaauggcgugggcuaucagcccuacagagugguggugcugagcuucgaacugcugcaugccccugccacagugugcggcccuaagaaaagcaccaaucucgugaagaacaaaugcgugaacuucaacuucaacggccugaccggcaccggcgugcugacagagagcaacaagaaguuccugccauuccagcaguuuggccgggauaucgccgauaccacagacgccguuagagauccccagacacuggaaauccuggacaucaccccuugcagcuucggcggagugucugugaucaccccuggcaccaacaccagcaaucagguggcagugcuguaccagggcgugaacuguaccgaagugcccguggccauucacgccgaucagcugacaccuacauggcggguguacuccaccggcagcaauguguuucagaccagagccggcugucugaucggagccgagcacgugaacaauagcuacgagugcgacauccccaucggcgcuggaaucugcgccagcuaccagacacagacaaacagcccucggagagccagaagcguggccagccagagcaucauugccuacacaaugucucugggcgccgagaacagcguggccuacuccaacaacucuaucgcuauccccaccaacuucaccaucagcgugaccacagagauccugccuguguccaugaccaagaccagcguggacugcaccauguacaucugcggcgauuccaccgagugcuccaaccugcugcugcaguacggcagcuucugcacccagcugaauagagcccugacagggaucgccguggaacaggacaagaacacccaagagguguucgcccaagugaagcagaucuacaagaccccuccuaucaaggacuucggcggcuucaauuucagccagauucugcccgauccuagcaagcccagcaagcggagcuucaucgaggaccugcuguucaacaaagugacacuggccgacgccggcuucaucaagcaguauggcgauugucugggcgacauugccgccagggaucugauuugcgcccagaaguuuaacggacugacagugcugccuccucugcugaccgaugagaugaucgcccaguacacaucugcccugcuggccggcacaaucacaagcggcuggacauuuggagcaggcgccgcucugcagauccccuuugcuaugcagauggccuaccgguucaacggcaucggagugacccagaaugugcuguacgagaaccagaagcugaucgccaaccaguucaacagcgccaucggcaagauccaggacagccugagcagcacagcaagcgcccugggaaagcugcaggacguggucaaccagaaugcccaggcacugaacacccuggucaagcagcuguccuccaacuucggcgccaucagcucugugcugaacgauauccugagcagacuggacaaggucgaggccgaggugcagaucgacagacugaucacaggcagacugcagagccuccagacauacgugacccagcagcugaucagagccgccgagauuagagccucugccaaucuggccgccaccaagaugucugagugugugcugggccagagcaagagaguggacuuuugcggcaagggcuaccaccugaugagcuucccucagucugccccucacggcgugguguuucugcacgugacauaugugcccgcucaagagaagaauuucaccaccgcuccagccaucugccacgacggcaaagcccacuuuccuagagaaggcguguucguguccaacggcacccauugguucgugacacagcggaacuucuacgagccccagaucaucaccaccgacaacaccuucgugucuggcaacugcgacgucgugaucggcauugugaacaauaccguguacgacccucugcagcccgagcuggacagcuucaaagaggaacuggacaaguacuuuaagaaccacacaagccccgacguggaccugggcgauaucagcggaaucaaugccagcgucgugaacauccagaaagagaucgaccggcugaacgagguggccaagaaucugaacgagagccugaucgaccugcaagaacuggggaaguacgagcaguacaucaaguggcccugguacaucuggcugggcuuuaucgccggacugauugccaucgugaucgucacaaucaugcuguguugcaugaccagcugcuguagcugccugaagggcuguuguagcuguggcagcugcugcaaguucgacgaggacgauucugagcccgugcugaagggcgugaaacugcacuacacaugaugacucgagcugguacugcaugcacgcaaugcuagcugccccuuucccguccuggguaccccgagucucccccgaccucgggucccagguaugcucccaccuccaccugccccacucaccaccucugcuaguuccagacaccucccaagcacgcagcaaugcagcucaaaacgcuuagccuagccacacccccacgggaaacagcagugauuaaccuuuagcaauaaacgaaaguuuaacuaagcuauacuaaccccaggguuggucaauuucgugccagccacacccuggagcuagcaaaaaaaaaaaaaaaaaaaaaaaaaaaaaagcauaugacuaaaaaaaaaaaaaaaaaaaaaaaaaaaaaaaaaaaaaaaaaaaaaaaaaaaaaaaaaaaaaaaaaaaaaa

SEQ ID NO: 26809 - RNA, 4277 nt, Artificial Sequence
  SARS-CoV-2/Wuhan/WIV05/2019__EPI_ISL_402128 spike protein mRNA gc mod (1-1273)(H69del_V70del_A222V_Y453F_S477N_D614G_I692V)
agaauaaacuaguauucuucugguccccacagacucagagagaacccgccaccauguucguguuccuggugcugcugccucugguguccagccagugugugaaccugaccaccagaacacagcugccuccagccuacaccaacagcuuuaccagaggcguguacuaccccgacaagguguucagauccagcgugcugcacucuacccaggaccuguuccugccuuucuucagcaacgugaccugguuccacgccaucuccggcaccaauggcaccaagagauucgacaaccccgugcugcccuucaacgacgggguguacuuugccagcaccgagaaguccaacaucaucagaggcuggaucuucggcaccacacuggacagcaagacccagagccugcugaucgugaacaacgccaccaacguggucaucaaagugugcgaguuccaguucugcaacgaccccuuccugggcgucuacuaccacaagaacaacaagagcuggauggaaagcgaguuccggguguacagcagcgccaacaacugcaccuucgaguacgugucccagccuuuccugauggaccuggaaggcaagcagggcaacuucaagaaccugcgcgaguucguguuuaagaacaucgacggcuacuucaagaucuacagcaagcacaccccuaucaaccucgugcgggaucugccucagggcuucucugugcuggaaccccugguggaucugcccaucggcaucaacaucacccgguuucagacacugcuggcccugcacagaagcuaccugacaccuggcgauagcagcagcggauggacagcuggugccgccgcuuacuaugugggcuaccugcagccuagaaccuuccugcugaaguacaacgagaacggcaccaucaccgacgccguggauugugcucuggauccucugagcgagacaaagugcacccugaaguccuucaccguggaaaagggcaucuaccagaccagcaacuuccgggugcagcccaccgaauccaucgugcgguuccccaauaucaccaaucugugccccuucggcgagguguucaaugccaccagauucgccucuguguacgccuggaaccggaagcggaucagcaauugcguggccgacuacuccgugcuguacaacuccgccagcuucagcaccuucaagugcuacggcguguccccuaccaagcugaacgaccugugcuucacaaacguguacgccgacagcuucgugauccggggagaugaagugcggcagauugccccuggacagacaggcaagaucgccgacuacaacuacaagcugcccgacgacuucaccggcugugugauugccuggaacagcaacaaccuggacuccaaagucggcggcaacuacaauuaccuguuccggcuguuccggaaguccaaucugaagcccuucgagcgggacaucuccaccgagaucuaucaggccggcaacaccccuuguaacggcguggaaggcuucaacugcuacuucccacugcaguccuacggcuuucagcccacaaauggcgugggcuaucagcccuacagagugguggugcugagcuucgaacugcugcaugccccugccacagugugcggcccuaagaaaagcaccaaucucgugaagaacaaaugcgugaacuucaacuucaacggccugaccggcaccggcgugcugacagagagcaacaagaaguuccugccauuccagcaguuuggccgggauaucgccgauaccacagacgccguuagagauccccagacacuggaaauccuggacaucaccccuugcagcuucggcggagugucugugaucaccccuggcaccaacaccagcaaucagguggcagugcuguaccagggcgugaacuguaccgaagugcccguggccauucacgccgaucagcugacaccuacauggcggguguacuccaccggcagcaauguguuucagaccagagccggcugucugaucggagccgagcacgugaacaauagcuacgagugcgacauccccaucggcgcuggaaucugcgccagcuaccagacacagacaaacagcccucggagagccagaagcguggccagccagagcgugauugccuacacaaugucucugggcgccgagaacagcguggccuacuccaacaacucuaucgcuauccccaccaacuucaccaucagcgugaccacagagauccugccuguguccaugaccaagaccagcguggacugcaccauguacaucugcggcgauuccaccgagugcuccaaccugcugcugcaguacggcagcuucugcacccagcugaauagagcccugacagggaucgccguggaacaggacaagaacacccaagagguguucgcccaagugaagcagaucuacaagaccccuccuaucaaggacuucggcggcuucaauuucagccagauucugcccgauccuagcaagcccagcaagcggagcuucaucgaggaccugcuguucaacaaagugacacuggccgacgccggcuucaucaagcaguauggcgauugucugggcgacauugccgccagggaucugauuugcgcccagaaguuuaacggacugacagugcugccuccucugcugaccgaugagaugaucgcccaguacacaucugcccugcuggccggcacaaucacaagcggcuggacauuuggagcaggcgccgcucugcagauccccuuugcuaugcagauggccuaccgguucaacggcaucggagugacccagaaugugcuguacgagaaccagaagcugaucgccaaccaguucaacagcgccaucggcaagauccaggacagccugagcagcacagcaagcgcccugggaaagcugcaggacguggucaaccagaaugcccaggcacugaacacccuggucaagcagcuguccuccaacuucggcgccaucagcucugugcugaacgauauccugagcagacuggacaaggucgaggccgaggugcagaucgacagacugaucacaggcagacugcagagccuccagacauacgugacccagcagcugaucagagccgccgagauuagagccucugccaaucuggccgccaccaagaugucugagugugugcugggccagagcaagagaguggacuuuugcggcaagggcuaccaccugaugagcuucccucagucugccccucacggcgugguguuucugcacgugacauaugugcccgcucaagagaagaauuucaccaccgcuccagccaucugccacgacggcaaagcccacuuuccuagagaaggcguguucguguccaacggcacccauugguucgugacacagcggaacuucuacgagccccagaucaucaccaccgacaacaccuucgugucuggcaacugcgacgucgugaucggcauugugaacaauaccguguacgacccucugcagcccgagcuggacagcuucaaagaggaacuggacaaguacuuuaagaaccacacaagccccgacguggaccugggcgauaucagcggaaucaaugccagcgucgugaacauccagaaagagaucgaccggcugaacgagguggccaagaaucugaacgagagccugaucgaccugcaagaacuggggaaguacgagcaguacaucaaguggcccugguacaucuggcugggcuuuaucgccggacugauugccaucgugauggucacaaucaugcuguguugcaugaccagcugcuguagcugccugaagggcuguuguagcuguggcagcugcugcaaguucgacgaggacgauucugagcccgugcugaagggcgugaaacugcacuacacaugaugacucgagcugguacugcaugcacgcaaugcuagcugccccuuucccguccuggguaccccgagucucccccgaccucgggucccagguaugcucccaccuccaccugccccacucaccaccucugcuaguuccagacaccucccaagcacgcagcaaugcagcucaaaacgcuuagccuagccacacccccacgggaaacagcagugauuaaccuuuagcaauaaacgaaaguuuaacuaagcuauacuaaccccaggguuggucaauuucgugccagccacacccuggagcuagcaaaaaaaaaaaaaaaaaaaaaaaaaaaaaagcauaugacuaaaaaaaaaaaaaaaaaaaaaaaaaaaaaaaaaaaaaaaaaaaaaaaaaaaaaaaaaaaaaaaaaaaaaa

SEQ ID NO: 26810 - RNA, 4277 nt, Artificial Sequence
  SARS-CoV-2/Wuhan/WIV05/2019__EPI_ISL_402128 spike protein mRNA gc mod (1-1273)(H69del_V70del_Y453F_D614G_I692V_M1229I)
agaauaaacuaguauucuucugguccccacagacucagagagaacccgccaccauguucguguuccuggugcugcugccucugguguccagccagugugugaaccugaccaccagaacacagcugccuccagccuacaccaacagcuuuaccagaggcguguacuaccccgacaagguguucagauccagcgugcugcacucuacccaggaccuguuccugccuuucuucagcaacgugaccugguuccacgccaucuccggcaccaauggcaccaagagauucgacaaccccgugcugcccuucaacgacgggguguacuuugccagcaccgagaaguccaacaucaucagaggcuggaucuucggcaccacacuggacagcaagacccagagccugcugaucgugaacaacgccaccaacguggucaucaaagugugcgaguuccaguucugcaacgaccccuuccugggcgucuacuaccacaagaacaacaagagcuggauggaaagcgaguuccggguguacagcagcgccaacaacugcaccuucgaguacgugucccagccuuuccugauggaccuggaaggcaagcagggcaacuucaagaaccugcgcgaguucguguuuaagaacaucgacggcuacuucaagaucuacagcaagcacaccccuaucaaccucgugcgggaucugccucagggcuucucugcucuggaaccccugguggaucugcccaucggcaucaacaucacccgguuucagacacugcuggcccugcacagaagcuaccugacaccuggcgauagcagcagcggauggacagcuggugccgccgcuuacuaugugggcuaccugcagccuagaaccuuccugcugaaguacaacgagaacggcaccaucaccgacgccguggauugugcucuggauccucugagcgagacaaagugcacccugaaguccuucaccguggaaaagggcaucuaccagaccagcaacuuccgggugcagcccaccgaauccaucgugcgguuccccaauaucaccaaucugugccccuucggcgagguguucaaugccaccagauucgccucuguguacgccuggaaccggaagcggaucagcaauugcguggccgacuacuccgugcuguacaacuccgccagcuucagcaccuucaagugcuacggcguguccccuaccaagcugaacgaccugugcuucacaaacguguacgccgacagcuucgugauccggggagaugaagugcggcagauugccccuggacagacaggcaagaucgccgacuacaacuacaagcugcccgacgacuucaccggcugugugauugccuggaacagcaacaaccuggacuccaaagucggcggcaacuacaauuaccuguuccggcuguuccggaaguccaaucugaagcccuucgagcgggacaucuccaccgagaucuaucaggccggcagcaccccuuguaacggcguggaaggcuucaacugcuacuucccacugcaguccuacggcuuucagcccacaaauggcgugggcuaucagcccuacagagugguggugcugagcuucgaacugcugcaugccccugccacagugugcggcccuaagaaaagcaccaaucucgugaagaacaaaugcgugaacuucaacuucaacggccugaccggcaccggcgugcugacagagagcaacaagaaguuccugccauuccagcaguuuggccgggauaucgccgauaccacagacgccguuagagauccccagacacuggaaauccuggacaucaccccuugcagcuucggcggagugucugugaucaccccuggcaccaacaccagcaaucagguggcagugcuguaccagggcgugaacuguaccgaagugcccguggccauucacgccgaucagcugacaccuacauggcggguguacuccaccggcagcaauguguuucagaccagagccggcugucugaucggagccgagcacgugaacaauagcuacgagugcgacauccccaucggcgcuggaaucugcgccagcuaccagacacagacaaacagcccucggagagccagaagcguggccagccagagcgugauugccuacacaaugucucugggcgccgagaacagcguggccuacuccaacaacucuaucgcuauccccaccaacuucaccaucagcgugaccacagagauccugccuguguccaugaccaagaccagcguggacugcaccauguacaucugcggcgauuccaccgagugcuccaaccugcugcugcaguacggcagcuucugcacccagcugaauagagcccugacagggaucgccguggaacaggacaagaacacccaagagguguucgcccaagugaagcagaucuacaagaccccuccuaucaaggacuucggcggcuucaauuucagccagauucugcccgauccuagcaagcccagcaagcggagcuucaucgaggaccugcuguucaacaaagugacacuggccgacgccggcuucaucaagcaguauggcgauugucugggcgacauugccgccagggaucugauuugcgcccagaaguuuaacggacugacagugcugccuccucugcugaccgaugagaugaucgcccaguacacaucugcccugcuggccggcacaaucacaagcggcuggacauuuggagcaggcgccgcucugcagauccccuuugcuaugcagauggccuaccgguucaacggcaucggagugacccagaaugugcuguacgagaaccagaagcugaucgccaaccaguucaacagcgccaucggcaagauccaggacagccugagcagcacagcaagcgcccugggaaagcugcaggacguggucaaccagaaugcccaggcacugaacacccuggucaagcagcuguccuccaacuucggcgccaucagcucugugcugaacgauauccugagcagacuggacaaggucgaggccgaggugcagaucgacagacugaucacaggcagacugcagagccuccagacauacgugacccagcagcugaucagagccgccgagauuagagccucugccaaucuggccgccaccaagaugucugagugugugcugggccagagcaagagaguggacuuuugcggcaagggcuaccaccugaugagcuucccucagucugccccucacggcgugguguuucugcacgugacauaugugcccgcucaagagaagaauuucaccaccgcuccagccaucugccacgacggcaaagcccacuuuccuagagaaggcguguucguguccaacggcacccauugguucgugacacagcggaacuucuacgagccccagaucaucaccaccgacaacaccuucgugucuggcaacugcgacgucgugaucggcauugugaacaauaccguguacgacccucugcagcccgagcuggacagcuucaaagaggaacuggacaaguacuuuaagaaccacacaagccccgacguggaccugggcgauaucagcggaaucaaugccagcgucgugaacauccagaaagagaucgaccggcugaacgagguggccaagaaucugaacgagagccugaucgaccugcaagaacuggggaaguacgagcaguacaucaaguggcccugguacaucuggcugggcuuuaucgccggacugauugccaucgugaucgucacaaucaugcuguguugcaugaccagcugcuguagcugccugaagggcuguuguagcuguggcagcugcugcaaguucgacgaggacgauucugagcccgugcugaagggcgugaaacugcacuacacaugaugacucgagcugguacugcaugcacgcaaugcuagcugccccuuucccguccuggguaccccgagucucccccgaccucgggucccagguaugcucccaccuccaccugccccacucaccaccucugcuaguuccagacaccucccaagcacgcagcaaugcagcucaaaacgcuuagccuagccacacccccacgggaaacagcagugauuaaccuuuagcaauaaacgaaaguuuaacuaagcuauacuaaccccaggguuggucaauuucgugccagccacacccuggagcuagcaaaaaaaaaaaaaaaaaaaaaaaaaaaaaagcauaugacuaaaaaaaaaaaaaaaaaaaaaaaaaaaaaaaaaaaaaaaaaaaaaaaaaaaaaaaaaaaaaaaaaaaaaa

SEQ ID NO: 26811 - RNA, 4274 nt, Artificial Sequence
  SARS-CoV-2/Wuhan/WIV05/2019__EPI_ISL_402128 spike protein mRNA gc mod (1-1273)(H69del_V70del_Y144del_N501Y_A570D_D614G_P681H_T716I_S982 A_D1118H)
agaauaaacuaguauucuucugguccccacagacucagagagaacccgccaccauguucguguuccuggugcugcugccucugguguccagccagugugugaaccugaccaccagaacacagcugccuccagccuacaccaacagcuuuaccagaggcguguacuaccccgacaagguguucagauccagcgugcugcacucuacccaggaccuguuccugccuuucuucagcaacgugaccugguuccacgccaucuccggcaccaauggcaccaagagauucgacaaccccgugcugcccuucaacgacgggguguacuuugccagcaccgagaaguccaacaucaucagaggcuggaucuucggcaccacacuggacagcaagacccagagccugcugaucgugaacaacgccaccaacguggucaucaaagugugcgaguuccaguucugcaacgaccccuuccugggcgucuaccacaagaacaacaagagcuggauggaaagcgaguuccggguguacagcagcgccaacaacugcaccuucgaguacgugucccagccuuuccugauggaccuggaaggcaagcagggcaacuucaagaaccugcgcgaguucguguuuaagaacaucgacggcuacuucaagaucuacagcaagcacaccccuaucaaccucgugcgggaucugccucagggcuucucugcucuggaaccccugguggaucugcccaucggcaucaacaucacccgguuucagacacugcuggcccugcacagaagcuaccugacaccuggcgauagcagcagcggauggacagcuggugccgccgcuuacuaugugggcuaccugcagccuagaaccuuccugcugaaguacaacgagaacggcaccaucaccgacgccguggauugugcucuggauccucugagcgagacaaagugcacccugaaguccuucaccguggaaaagggcaucuaccagaccagcaacuuccgggugcagcccaccgaauccaucgugcgguuccccaauaucaccaaucugugccccuucggcgagguguucaaugccaccagauucgccucuguguacgccuggaaccggaagcggaucagcaauugcguggccgacuacuccgugcuguacaacuccgccagcuucagcaccuucaagugcuacggcguguccccuaccaagcugaacgaccugugcuucacaaacguguacgccgacagcuucgugauccggggagaugaagugcggcagauugccccuggacagacaggcaagaucgccgacuacaacuacaagcugcccgacgacuucaccggcugugugauugccuggaacagcaacaaccuggacuccaaagucggcggcaacuacaauuaccuguaccggcuguuccggaaguccaaucugaagcccuucgagcgggacaucuccaccgagaucuaucaggccggcagcaccccuuguaacggcguggaaggcuucaacugcuacuucccacugcaguccuacggcuuucagcccacauacggcgugggcuaucagcccuacagagugguggugcugagcuucgaacugcugcaugccccugccacagugugcggcccuaagaaaagcaccaaucucgugaagaacaaaugcgugaacuucaacuucaacggccugaccggcaccggcgugcugacagagagcaacaagaaguuccugccauuccagcaguuuggccgggauaucgacgauaccacagacgccguuagagauccccagacacuggaaauccuggacaucaccccuugcagcuucggcggagugucugugaucaccccuggcaccaacaccagcaaucagguggcagugcuguaccagggcgugaacuguaccgaagugcccguggccauucacgccgaucagcugacaccuacauggcggguguacuccaccggcagcaauguguuucagaccagagccggcugucugaucggagccgagcacgugaacaauagcuacgagugcgacauccccaucggcgcuggaaucugcgccagcuaccagacacagacaaacagccaccggagagccagaagcguggccagccagagcaucauugccuacacaaugucucugggcgccgagaacagcguggccuacuccaacaacucuaucgcuauccccaucaacuucaccaucagcgugaccacagagauccugccuguguccaugaccaagaccagcguggacugcaccauguacaucugcggcgauuccaccgagugcuccaaccugcugcugcaguacggcagcuucugcacccagcugaauagagcccugacagggaucgccguggaacaggacaagaacacccaagagguguucgcccaagugaagcagaucuacaagaccccuccuaucaaggacuucggcggcuucaauuucagccagauucugcccgauccuagcaagcccagcaagcggagcuucaucgaggaccugcuguucaacaaagugacacuggccgacgccggcuucaucaagcaguauggcgauugucugggcgacauugccgccagggaucugauuugcgcccagaaguuuaacggacugacagugcugccuccucugcugaccgaugagaugaucgcccaguacacaucugcccugcuggccggcacaaucacaagcggcuggacauuuggagcaggcgccgcucugcagauccccuuugcuaugcagauggccuaccgguucaacggcaucggagugacccagaaugugcuguacgagaaccagaagcugaucgccaaccaguucaacagcgccaucggcaagauccaggacagccugagcagcacagcaagcgcccugggaaagcugcaggacguggucaaccagaaugcccaggcacugaacacccuggucaagcagcuguccuccaacuucggcgccaucagcucugugcugaacgauauccuggccagacuggacaaggucgaggccgaggugcagaucgacagacugaucacaggcagacugcagagccuccagacauacgugacccagcagcugaucagagccgccgagauuagagccucugccaaucuggccgccaccaagaugucugagugugugcugggccagagcaagagaguggacuuuugcggcaagggcuaccaccugaugagcuucccucagucugccccucacggcgugguguuucugcacgugacauaugugcccgcucaagagaagaauuucaccaccgcuccagccaucugccacgacggcaaagcccacuuuccuagagaaggcguguucguguccaacggcacccauugguucgugacacagcggaacuucuacgagccccagaucaucaccacccacaacaccuucgugucuggcaacugcgacgucgugaucggcauugugaacaauaccguguacgacccucugcagcccgagcuggacagcuucaaagaggaacuggacaaguacuuuaagaaccacacaagccccgacguggaccugggcgauaucagcggaaucaaugccagcgucgugaacauccagaaagagaucgaccggcugaacgagguggccaagaaucugaacgagagccugaucgaccugcaagaacuggggaaguacgagcaguacaucaaguggcccugguacaucuggcugggcuuuaucgccggacugauugccaucgugauggucacaaucaugcuguguugcaugaccagcugcuguagcugccugaagggcuguuguagcuguggcagcugcugcaaguucgacgaggacgauucugagcccgugcugaagggcgugaaacugcacuacacaugaugacucgagcugguacugcaugcacgcaaugcuagcugccccuuucccguccuggguaccccgagucucccccgaccucgggucccagguaugcucccaccuccaccugccccacucaccaccucugcuaguuccagacaccucccaagcacgcagcaaugcagcucaaaacgcuuagccuagccacacccccacgggaaacagcagugauuaaccuuuagcaauaaacgaaaguuuaacuaagcuauacuaaccccaggguuggucaauuucgugccagccacacccuggagcuagcaaaaaaaaaaaaaaaaaaaaaaaaaaaaaagcauaugacuaaaaaaaaaaaaaaaaaaaaaaaaaaaaaaaaaaaaaaaaaaaaaaaaaaaaaaaaaaaaaaaaaaaaaa

SEQ ID NO: 26812 - RNA, 4283 nt, Artificial Sequence
  SARS-CoV-2/Wuhan/WIV05/2019__EPI_ISL_402128 spike protein mRNA gc mod (1-1273)(K417N_E484K_N501Y_D614G)
agaauaaacuaguauucuucugguccccacagacucagagagaacccgccaccauguucguguuccuggugcugcugccucugguguccagccagugugugaaccugaccaccagaacacagcugccuccagccuacaccaacagcuuuaccagaggcguguacuaccccgacaagguguucagauccagcgugcugcacucuacccaggaccuguuccugccuuucuucagcaacgugaccugguuccacgccauccacguguccggcaccaauggcaccaagagauucgacaaccccgugcugcccuucaacgacgggguguacuuugccagcaccgagaaguccaacaucaucagaggcuggaucuucggcaccacacuggacagcaagacccagagccugcugaucgugaacaacgccaccaacguggucaucaaagugugcgaguuccaguucugcaacgaccccuuccugggcgucuacuaccacaagaacaacaagagcuggauggaaagcgaguuccggguguacagcagcgccaacaacugcaccuucgaguacgugucccagccuuuccugauggaccuggaaggcaagcagggcaacuucaagaaccugcgcgaguucguguuuaagaacaucgacggcuacuucaagaucuacagcaagcacaccccuaucaaccucgugcgggaucugccucagggcuucucugcucuggaaccccugguggaucugcccaucggcaucaacaucacccgguuucagacacugcuggcccugcacagaagcuaccugacaccuggcgauagcagcagcggauggacagcuggugccgccgcuuacuaugugggcuaccugcagccuagaaccuuccugcugaaguacaacgagaacggcaccaucaccgacgccguggauugugcucuggauccucugagcgagacaaagugcacccugaaguccuucaccguggaaaagggcaucuaccagaccagcaacuuccgggugcagcccaccgaauccaucgugcgguuccccaauaucaccaaucugugccccuucggcgagguguucaaugccaccagauucgccucuguguacgccuggaaccggaagcggaucagcaauugcguggccgacuacuccgugcuguacaacuccgccagcuucagcaccuucaagugcuacggcguguccccuaccaagcugaacgaccugugcuucacaaacguguacgccgacagcuucgugauccggggagaugaagugcggcagauugccccuggacagacaggcaacaucgccgacuacaacuacaagcugcccgacgacuucaccggcugugugauugccuggaacagcaacaaccuggacuccaaagucggcggcaacuacaauuaccuguaccggcuguuccggaaguccaaucugaagcccuucgagcgggacaucuccaccgagaucuaucaggccggcagcaccccuuguaacggcgugaagggcuucaacugcuacuucccacugcaguccuacggcuuucagcccacauacggcgugggcuaucagcccuacagagugguggugcugagcuucgaacugcugcaugccccugccacagugugcggcccuaagaaaagcaccaaucucgugaagaacaaaugcgugaacuucaacuucaacggccugaccggcaccggcgugcugacagagagcaacaagaaguuccugccauuccagcaguuuggccgggauaucgccgauaccacagacgccguuagagauccccagacacuggaaauccuggacaucaccccuugcagcuucggcggagugucugugaucaccccuggcaccaacaccagcaaucagguggcagugcuguaccagggcgugaacuguaccgaagugcccguggccauucacgccgaucagcugacaccuacauggcggguguacuccaccggcagcaauguguuucagaccagagccggcugucugaucggagccgagcacgugaacaauagcuacgagugcgacauccccaucggcgcuggaaucugcgccagcuaccagacacagacaaacagcccucggagagccagaagcguggccagccagagcaucauugccuacacaaugucucugggcgccgagaacagcguggccuacuccaacaacucuaucgcuauccccaccaacuucaccaucagcgugaccacagagauccugccuguguccaugaccaagaccagcguggacugcaccauguacaucugcggcgauuccaccgagugcuccaaccugcugcugcaguacggcagcuucugcacccagcugaauagagcccugacagggaucgccguggaacaggacaagaacacccaagagguguucgcccaagugaagcagaucuacaagaccccuccuaucaaggacuucggcggcuucaauuucagccagauucugcccgauccuagcaagcccagcaagcggagcuucaucgaggaccugcuguucaacaaagugacacuggccgacgccggcuucaucaagcaguauggcgauugucugggcgacauugccgccagggaucugauuugcgcccagaaguuuaacggacugacagugcugccuccucugcugaccgaugagaugaucgcccaguacacaucugcccugcuggccggcacaaucacaagcggcuggacauuuggagcaggcgccgcucugcagauccccuuugcuaugcagauggccuaccgguucaacggcaucggagugacccagaaugugcuguacgagaaccagaagcugaucgccaaccaguucaacagcgccaucggcaagauccaggacagccugagcagcacagcaagcgcccugggaaagcugcaggacguggucaaccagaaugcccaggcacugaacacccuggucaagcagcuguccuccaacuucggcgccaucagcucugugcugaacgauauccugagcagacuggacaaggucgaggccgaggugcagaucgacagacugaucacaggcagacugcagagccuccagacauacgugacccagcagcugaucagagccgccgagauuagagccucugccaaucuggccgccaccaagaugucugagugugugcugggccagagcaagagaguggacuuuugcggcaagggcuaccaccugaugagcuucccucagucugccccucacggcgugguguuucugcacgugacauaugugcccgcucaagagaagaauuucaccaccgcuccagccaucugccacgacggcaaagcccacuuuccuagagaaggcguguucguguccaacggcacccauugguucgugacacagcggaacuucuacgagccccagaucaucaccaccgacaacaccuucgugucuggcaacugcgacgucgugaucggcauugugaacaauaccguguacgacccucugcagcccgagcuggacagcuucaaagaggaacuggacaaguacuuuaagaaccacacaagccccgacguggaccugggcgauaucagcggaaucaaugccagcgucgugaacauccagaaagagaucgaccggcugaacgagguggccaagaaucugaacgagagccugaucgaccugcaagaacuggggaaguacgagcaguacaucaaguggcccugguacaucuggcugggcuuuaucgccggacugauugccaucgugauggucacaaucaugcuguguugcaugaccagcugcuguagcugccugaagggcuguuguagcuguggcagcugcugcaaguucgacgaggacgauucugagcccgugcugaagggcgugaaacugcacuacacaugaugacucgagcugguacugcaugcacgcaaugcuagcugccccuuucccguccuggguaccccgagucucccccgaccucgggucccagguaugcucccaccuccaccugccccacucaccaccucugcuaguuccagacaccucccaagcacgcagcaaugcagcucaaaacgcuuagccuagccacacccccacgggaaacagcagugauuaaccuuuagcaauaaacgaaaguuuaacuaagcuauacuaaccccaggguuggucaauuucgugccagccacacccuggagcuagcaaaaaaaaaaaaaaaaaaaaaaaaaaaaaagcauaugacuaaaaaaaaaaaaaaaaaaaaaaaaaaaaaaaaaaaaaaaaaaaaaaaaaaaaaaaaaaaaaaaaaaaaaa

SEQ ID NO: 26813 - RNA, 4274 nt, Artificial Sequence
  SARS-CoV-2/Wuhan/WIV05/2019__EPI_ISL_402128 spike protein mRNA gc mod (1-1273)(L18F_D80A_D215G_L242del_A243del_L244del_R246I_K417N_E484 K_N501Y_D614G_A701V)
agaauaaacuaguauucuucugguccccacagacucagagagaacccgccaccauguucguguuccuggugcugcugccucugguguccagccagugugugaacuucaccaccagaacacagcugccuccagccuacaccaacagcuuuaccagaggcguguacuaccccgacaagguguucagauccagcgugcugcacucuacccaggaccuguuccugccuuucuucagcaacgugaccugguuccacgccauccacguguccggcaccaauggcaccaagagauucgccaaccccgugcugcccuucaacgacgggguguacuuugccagcaccgagaaguccaacaucaucagaggcuggaucuucggcaccacacuggacagcaagacccagagccugcugaucgugaacaacgccaccaacguggucaucaaagugugcgaguuccaguucugcaacgaccccuuccugggcgucuacuaccacaagaacaacaagagcuggauggaaagcgaguuccggguguacagcagcgccaacaacugcaccuucgaguacgugucccagccuuuccugauggaccuggaaggcaagcagggcaacuucaagaaccugcgcgaguucguguuuaagaacaucgacggcuacuucaagaucuacagcaagcacaccccuaucaaccucgugcggggccugccucagggcuucucugcucuggaaccccugguggaucugcccaucggcaucaacaucacccgguuucagacacugcacaucagcuaccugacaccuggcgauagcagcagcggauggacagcuggugccgccgcuuacuaugugggcuaccugcagccuagaaccuuccugcugaaguacaacgagaacggcaccaucaccgacgccguggauugugcucuggauccucugagcgagacaaagugcacccugaaguccuucaccguggaaaagggcaucuaccagaccagcaacuuccgggugcagcccaccgaauccaucgugcgguuccccaauaucaccaaucugugccccuucggcgagguguucaaugccaccagauucgccucuguguacgccuggaaccggaagcggaucagcaauugcguggccgacuacuccgugcuguacaacuccgccagcuucagcaccuucaagugcuacggcguguccccuaccaagcugaacgaccugugcuucacaaacguguacgccgacagcuucgugauccggggagaugaagugcggcagauugccccuggacagacaggcaacaucgccgacuacaacuacaagcugcccgacgacuucaccggcugugugauugccuggaacagcaacaaccuggacuccaaagucggcggcaacuacaauuaccuguaccggcuguuccggaaguccaaucugaagcccuucgagcgggacaucuccaccgagaucuaucaggccggcagcaccccuuguaacggcgugaagggcuucaacugcuacuucccacugcaguccuacggcuuucagcccacauacggcgugggcuaucagcccuacagagugguggugcugagcuucgaacugcugcaugccccugccacagugugcggcccuaagaaaagcaccaaucucgugaagaacaaaugcgugaacuucaacuucaacggccugaccggcaccggcgugcugacagagagcaacaagaaguuccugccauuccagcaguuuggccgggauaucgccgauaccacagacgccguuagagauccccagacacuggaaauccuggacaucaccccuugcagcuucggcggagugucugugaucaccccuggcaccaacaccagcaaucagguggcagugcuguaccagggcgugaacuguaccgaagugcccguggccauucacgccgaucagcugacaccuacauggcggguguacuccaccggcagcaauguguuucagaccagagccggcugucugaucggagccgagcacgugaacaauagcuacgagugcgacauccccaucggcgcuggaaucugcgccagcuaccagacacagacaaacagcccucggagagccagaagcguggccagccagagcaucauugccuacacaaugucucugggcguggagaacagcguggccuacuccaacaacucuaucgcuauccccaccaacuucaccaucagcgugaccacagagauccugccuguguccaugaccaagaccagcguggacugcaccauguacaucugcggcgauuccaccgagugcuccaaccugcugcugcaguacggcagcuucugcacccagcugaauagagcccugacagggaucgccguggaacaggacaagaacacccaagagguguucgcccaagugaagcagaucuacaagaccccuccuaucaaggacuucggcggcuucaauuucagccagauucugcccgauccuagcaagcccagcaagcggagcuucaucgaggaccugcuguucaacaaagugacacuggccgacgccggcuucaucaagcaguauggcgauugucugggcgacauugccgccagggaucugauuugcgcccagaaguuuaacggacugacagugcugccuccucugcugaccgaugagaugaucgcccaguacacaucugcccugcuggccggcacaaucacaagcggcuggacauuuggagcaggcgccgcucugcagauccccuuugcuaugcagauggccuaccgguucaacggcaucggagugacccagaaugugcuguacgagaaccagaagcugaucgccaaccaguucaacagcgccaucggcaagauccaggacagccugagcagcacagcaagcgcccugggaaagcugcaggacguggucaaccagaaugcccaggcacugaacacccuggucaagcagcuguccuccaacuucggcgccaucagcucugugcugaacgauauccugagcagacuggacaaggucgaggccgaggugcagaucgacagacugaucacaggcagacugcagagccuccagacauacgugacccagcagcugaucagagccgccgagauuagagccucugccaaucuggccgccaccaagaugucugagugugugcugggccagagcaagagaguggacuuuugcggcaagggcuaccaccugaugagcuucccucagucugccccucacggcgugguguuucugcacgugacauaugugcccgcucaagagaagaauuucaccaccgcuccagccaucugccacgacggcaaagcccacuuuccuagagaaggcguguucguguccaacggcacccauugguucgugacacagcggaacuucuacgagccccagaucaucaccaccgacaacaccuucgugucuggcaacugcgacgucgugaucggcauugugaacaauaccguguacgacccucugcagcccgagcuggacagcuucaaagaggaacuggacaaguacuuuaagaaccacacaagccccgacguggaccugggcgauaucagcggaaucaaugccagcgucgugaacauccagaaagagaucgaccggcugaacgagguggccaagaaucugaacgagagccugaucgaccugcaagaacuggggaaguacgagcaguacaucaaguggcccugguacaucuggcugggcuuuaucgccggacugauugccaucgugauggucacaaucaugcuguguugcaugaccagcugcuguagcugccugaagggcuguuguagcuguggcagcugcugcaaguucgacgaggacgauucugagcccgugcugaagggcgugaaacugcacuacacaugaugacucgagcugguacugcaugcacgcaaugcuagcugccccuuucccguccuggguaccccgagucucccccgaccucgggucccagguaugcucccaccuccaccugccccacucaccaccucugcuaguuccagacaccucccaagcacgcagcaaugcagcucaaaacgcuuagccuagccacacccccacgggaaacagcagugauuaaccuuuagcaauaaacgaaaguuuaacuaagcuauacuaaccccaggguuggucaauuucgugccagccacacccuggagcuagcaaaaaaaaaaaaaaaaaaaaaaaaaaaaaagcauaugacuaaaaaaaaaaaaaaaaaaaaaaaaaaaaaaaaaaaaaaaaaaaaaaaaaaaaaaaaaaaaaaaaaaaaaa

SEQ ID NO: 26814 - RNA, 4283 nt, Artificial Sequence
  SARS-CoV-2/Wuhan/WIV05/2019__EPI_ISL_402128 spike protein mRNA gc mod (1-1273)(E484K_D614G)
agaauaaacuaguauucuucugguccccacagacucagagagaacccgccaccauguucguguuccuggugcugcugccucugguguccagccagugugugaaccugaccaccagaacacagcugccuccagccuacaccaacagcuuuaccagaggcguguacuaccccgacaagguguucagauccagcgugcugcacucuacccaggaccuguuccugccuuucuucagcaacgugaccugguuccacgccauccacguguccggcaccaauggcaccaagagauucgacaaccccgugcugcccuucaacgacgggguguacuuugccagcaccgagaaguccaacaucaucagaggcuggaucuucggcaccacacuggacagcaagacccagagccugcugaucgugaacaacgccaccaacguggucaucaaagugugcgaguuccaguucugcaacgaccccuuccugggcgucuacuaccacaagaacaacaagagcuggauggaaagcgaguuccggguguacagcagcgccaacaacugcaccuucgaguacgugucccagccuuuccugauggaccuggaaggcaagcagggcaacuucaagaaccugcgcgaguucguguuuaagaacaucgacggcuacuucaagaucuacagcaagcacaccccuaucaaccucgugcgggaucugccucagggcuucucugcucuggaaccccugguggaucugcccaucggcaucaacaucacccgguuucagacacugcuggcccugcacagaagcuaccugacaccuggcgauagcagcagcggauggacagcuggugccgccgcuuacuaugugggcuaccugcagccuagaaccuuccugcugaaguacaacgagaacggcaccaucaccgacgccguggauugugcucuggauccucugagcgagacaaagugcacccugaaguccuucaccguggaaaagggcaucuaccagaccagcaacuuccgggugcagcccaccgaauccaucgugcgguuccccaauaucaccaaucugugccccuucggcgagguguucaaugccaccagauucgccucuguguacgccuggaaccggaagcggaucagcaauugcguggccgacuacuccgugcuguacaacuccgccagcuucagcaccuucaagugcuacggcguguccccuaccaagcugaacgaccugugcuucacaaacguguacgccgacagcuucgugauccggggagaugaagugcggcagauugccccuggacagacaggcaagaucgccgacuacaacuacaagcugcccgacgacuucaccggcugugugauugccuggaacagcaacaaccuggacuccaaagucggcggcaacuacaauuaccuguaccggcuguuccggaaguccaaucugaagcccuucgagcgggacaucuccaccgagaucuaucaggccggcagcaccccuuguaacggcgugaagggcuucaacugcuacuucccacugcaguccuacggcuuucagcccacaaauggcgugggcuaucagcccuacagagugguggugcugagcuucgaacugcugcaugccccugccacagugugcggcccuaagaaaagcaccaaucucgugaagaacaaaugcgugaacuucaacuucaacggccugaccggcaccggcgugcugacagagagcaacaagaaguuccugccauuccagcaguuuggccgggauaucgccgauaccacagacgccguuagagauccccagacacuggaaauccuggacaucaccccuugcagcuucggcggagugucugugaucaccccuggcaccaacaccagcaaucagguggcagugcuguaccagggcgugaacuguaccgaagugcccguggccauucacgccgaucagcugacaccuacauggcggguguacuccaccggcagcaauguguuucagaccagagccggcugucugaucggagccgagcacgugaacaauagcuacgagugcgacauccccaucggcgcuggaaucugcgccagcuaccagacacagacaaacagcccucggagagccagaagcguggccagccagagcaucauugccuacacaaugucucugggcgccgagaacagcguggccuacuccaacaacucuaucgcuauccccaccaacuucaccaucagcgugaccacagagauccugccuguguccaugaccaagaccagcguggacugcaccauguacaucugcggcgauuccaccgagugcuccaaccugcugcugcaguacggcagcuucugcacccagcugaauagagcccugacagggaucgccguggaacaggacaagaacacccaagagguguucgcccaagugaagcagaucuacaagaccccuccuaucaaggacuucggcggcuucaauuucagccagauucugcccgauccuagcaagcccagcaagcggagcuucaucgaggaccugcuguucaacaaagugacacuggccgacgccggcuucaucaagcaguauggcgauugucugggcgacauugccgccagggaucugauuugcgcccagaaguuuaacggacugacagugcugccuccucugcugaccgaugagaugaucgcccaguacacaucugcccugcuggccggcacaaucacaagcggcuggacauuuggagcaggcgccgcucugcagauccccuuugcuaugcagauggccuaccgguucaacggcaucggagugacccagaaugugcuguacgagaaccagaagcugaucgccaaccaguucaacagcgccaucggcaagauccaggacagccugagcagcacagcaagcgcccugggaaagcugcaggacguggucaaccagaaugcccaggcacugaacacccuggucaagcagcuguccuccaacuucggcgccaucagcucugugcugaacgauauccugagcagacuggacaaggucgaggccgaggugcagaucgacagacugaucacaggcagacugcagagccuccagacauacgugacccagcagcugaucagagccgccgagauuagagccucugccaaucuggccgccaccaagaugucugagugugugcugggccagagcaagagaguggacuuuugcggcaagggcuaccaccugaugagcuucccucagucugccccucacggcgugguguuucugcacgugacauaugugcccgcucaagagaagaauuucaccaccgcuccagccaucugccacgacggcaaagcccacuuuccuagagaaggcguguucguguccaacggcacccauugguucgugacacagcggaacuucuacgagccccagaucaucaccaccgacaacaccuucgugucuggcaacugcgacgucgugaucggcauugugaacaauaccguguacgacccucugcagcccgagcuggacagcuucaaagaggaacuggacaaguacuuuaagaaccacacaagccccgacguggaccugggcgauaucagcggaaucaaugccagcgucgugaacauccagaaagagaucgaccggcugaacgagguggccaagaaucugaacgagagccugaucgaccugcaagaacuggggaaguacgagcaguacaucaaguggcccugguacaucuggcugggcuuuaucgccggacugauugccaucgugauggucacaaucaugcuguguugcaugaccagcugcuguagcugccugaagggcuguuguagcuguggcagcugcugcaaguucgacgaggacgauucugagcccgugcugaagggcgugaaacugcacuacacaugaugacucgagcugguacugcaugcacgcaaugcuagcugccccuuucccguccuggguaccccgagucucccccgaccucgggucccagguaugcucccaccuccaccugccccacucaccaccucugcuaguuccagacaccucccaagcacgcagcaaugcagcucaaaacgcuuagccuagccacacccccacgggaaacagcagugauuaaccuuuagcaauaaacgaaaguuuaacuaagcuauacuaaccccaggguuggucaauuucgugccagccacacccuggagcuagcaaaaaaaaaaaaaaaaaaaaaaaaaaaaaagcauaugacuaaaaaaaaaaaaaaaaaaaaaaaaaaaaaaaaaaaaaaaaaaaaaaaaaaaaaaaaaaaaaaaaaaaaaa

SEQ ID NO: 26815 - RNA, 4283 nt, Artificial Sequence
  SARS-CoV-2/Wuhan/WIV05/2019__EPI_ISL_402128 spike protein mRNA gc mod (1-1273)(L18F_T20N_P26S_D138Y_R190S_K417T_E484K_N501Y_D614G_H655Y _T1027I)
agaauaaacuaguauucuucugguccccacagacucagagagaacccgccaccauguucguguuccuggugcugcugccucugguguccagccagugugugaacuucaccaacagaacacagcugccuagcgccuacaccaacagcuuuaccagaggcguguacuaccccgacaagguguucagauccagcgugcugcacucuacccaggaccuguuccugccuuucuucagcaacgugaccugguuccacgccauccacguguccggcaccaauggcaccaagagauucgacaaccccgugcugcccuucaacgacgggguguacuuugccagcaccgagaaguccaacaucaucagaggcuggaucuucggcaccacacuggacagcaagacccagagccugcugaucgugaacaacgccaccaacguggucaucaaagugugcgaguuccaguucugcaacuaccccuuccugggcgucuacuaccacaagaacaacaagagcuggauggaaagcgaguuccggguguacagcagcgccaacaacugcaccuucgaguacgugucccagccuuuccugauggaccuggaaggcaagcagggcaacuucaagaaccugagcgaguucguguuuaagaacaucgacggcuacuucaagaucuacagcaagcacaccccuaucaaccucgugcgggaucugccucagggcuucucugcucuggaaccccugguggaucugcccaucggcaucaacaucacccgguuucagacacugcuggcccugcacagaagcuaccugacaccuggcgauagcagcagcggauggacagcuggugccgccgcuuacuaugugggcuaccugcagccuagaaccuuccugcugaaguacaacgagaacggcaccaucaccgacgccguggauugugcucuggauccucugagcgagacaaagugcacccugaaguccuucaccguggaaaagggcaucuaccagaccagcaacuuccgggugcagcccaccgaauccaucgugcgguuccccaauaucaccaaucugugccccuucggcgagguguucaaugccaccagauucgccucuguguacgccuggaaccggaagcggaucagcaauugcguggccgacuacuccgugcuguacaacuccgccagcuucagcaccuucaagugcuacggcguguccccuaccaagcugaacgaccugugcuucacaaacguguacgccgacagcuucgugauccggggagaugaagugcggcagauugccccuggacagacaggcaccaucgccgacuacaacuacaagcugcccgacgacuucaccggcugugugauugccuggaacagcaacaaccuggacuccaaagucggcggcaacuacaauuaccuguaccggcuguuccggaaguccaaucugaagcccuucgagcgggacaucuccaccgagaucuaucaggccggcagcaccccuuguaacggcgugaagggcuucaacugcuacuucccacugcaguccuacggcuuucagcccacauacggcgugggcuaucagcccuacagagugguggugcugagcuucgaacugcugcaugccccugccacagugugcggcccuaagaaaagcaccaaucucgugaagaacaaaugcgugaacuucaacuucaacggccugaccggcaccggcgugcugacagagagcaacaagaaguuccugccauuccagcaguuuggccgggauaucgccgauaccacagacgccguuagagauccccagacacuggaaauccuggacaucaccccuugcagcuucggcggagugucugugaucaccccuggcaccaacaccagcaaucagguggcagugcuguaccagggcgugaacuguaccgaagugcccguggccauucacgccgaucagcugacaccuacauggcggguguacuccaccggcagcaauguguuucagaccagagccggcugucugaucggagccgaguacgugaacaauagcuacgagugcgacauccccaucggcgcuggaaucugcgccagcuaccagacacagacaaacagcccucggagagccagaagcguggccagccagagcaucauugccuacacaaugucucugggcgccgagaacagcguggccuacuccaacaacucuaucgcuauccccaccaacuucaccaucagcgugaccacagagauccugccuguguccaugaccaagaccagcguggacugcaccauguacaucugcggcgauuccaccgagugcuccaaccugcugcugcaguacggcagcuucugcacccagcugaauagagcccugacagggaucgccguggaacaggacaagaacacccaagagguguucgcccaagugaagcagaucuacaagaccccuccuaucaaggacuucggcggcuucaauuucagccagauucugcccgauccuagcaagcccagcaagcggagcuucaucgaggaccugcuguucaacaaagugacacuggccgacgccggcuucaucaagcaguauggcgauugucugggcgacauugccgccagggaucugauuugcgcccagaaguuuaacggacugacagugcugccuccucugcugaccgaugagaugaucgcccaguacacaucugcccugcuggccggcacaaucacaagcggcuggacauuuggagcaggcgccgcucugcagauccccuuugcuaugcagauggccuaccgguucaacggcaucggagugacccagaaugugcuguacgagaaccagaagcugaucgccaaccaguucaacagcgccaucggcaagauccaggacagccugagcagcacagcaagcgcccugggaaagcugcaggacguggucaaccagaaugcccaggcacugaacacccuggucaagcagcuguccuccaacuucggcgccaucagcucugugcugaacgauauccugagcagacuggacaaggucgaggccgaggugcagaucgacagacugaucacaggcagacugcagagccuccagacauacgugacccagcagcugaucagagccgccgagauuagagccucugccaaucuggccgccaucaagaugucugagugugugcugggccagagcaagagaguggacuuuugcggcaagggcuaccaccugaugagcuucccucagucugccccucacggcgugguguuucugcacgugacauaugugcccgcucaagagaagaauuucaccaccgcuccagccaucugccacgacggcaaagcccacuuuccuagagaaggcguguucguguccaacggcacccauugguucgugacacagcggaacuucuacgagccccagaucaucaccaccgacaacaccuucgugucuggcaacugcgacgucgugaucggcauugugaacaauaccguguacgacccucugcagcccgagcuggacagcuucaaagaggaacuggacaaguacuuuaagaaccacacaagccccgacguggaccugggcgauaucagcggaaucaaugccagcgucgugaacauccagaaagagaucgaccggcugaacgagguggccaagaaucugaacgagagccugaucgaccugcaagaacuggggaaguacgagcaguacaucaaguggcccugguacaucuggcugggcuuuaucgccggacugauugccaucgugauggucacaaucaugcuguguugcaugaccagcugcuguagcugccugaagggcuguuguagcuguggcagcugcugcaaguucgacgaggacgauucugagcccgugcugaagggcgugaaacugcacuacacaugaugacucgagcugguacugcaugcacgcaaugcuagcugccccuuucccguccuggguaccccgagucucccccgaccucgggucccagguaugcucccaccuccaccugccccacucaccaccucugcuaguuccagacaccucccaagcacgcagcaaugcagcucaaaacgcuuagccuagccacacccccacgggaaacagcagugauuaaccuuuagcaauaaacgaaaguuuaacuaagcuauacuaaccccaggguuggucaauuucgugccagccacacccuggagcuagcaaaaaaaaaaaaaaaaaaaaaaaaaaaaaagcauaugacuaaaaaaaaaaaaaaaaaaaaaaaaaaaaaaaaaaaaaaaaaaaaaaaaaaaaaaaaaaaaaaaaaaaaaa

SEQ ID NO: 26816 - RNA, 4283 nt, Artificial Sequence
  SARS-CoV-2/Wuhan/WIV05/2019__EPI_ISL_402128 spike protein mRNA gc mod (1-1273)(S13I_W152C_L452R_D614G)
agaauaaacuaguauucuucugguccccacagacucagagagaacccgccaccauguucguguuccuggugcugcugccucugguguccauccagugugugaaccugaccaccagaacacagcugccuccagccuacaccaacagcuuuaccagaggcguguacuaccccgacaagguguucagauccagcgugcugcacucuacccaggaccuguuccugccuuucuucagcaacgugaccugguuccacgccauccacguguccggcaccaauggcaccaagagauucgacaaccccgugcugcccuucaacgacgggguguacuuugccagcaccgagaaguccaacaucaucagaggcuggaucuucggcaccacacuggacagcaagacccagagccugcugaucgugaacaacgccaccaacguggucaucaaagugugcgaguuccaguucugcaacgaccccuuccugggcgucuacuaccacaagaacaacaagagcugcauggaaagcgaguuccggguguacagcagcgccaacaacugcaccuucgaguacgugucccagccuuuccugauggaccuggaaggcaagcagggcaacuucaagaaccugcgcgaguucguguuuaagaacaucgacggcuacuucaagaucuacagcaagcacaccccuaucaaccucgugcgggaucugccucagggcuucucugcucuggaaccccugguggaucugcccaucggcaucaacaucacccgguuucagacacugcuggcccugcacagaagcuaccugacaccuggcgauagcagcagcggauggacagcuggugccgccgcuuacuaugugggcuaccugcagccuagaaccuuccugcugaaguacaacgagaacggcaccaucaccgacgccguggauugugcucuggauccucugagcgagacaaagugcacccugaaguccuucaccguggaaaagggcaucuaccagaccagcaacuuccgggugcagcccaccgaauccaucgugcgguuccccaauaucaccaaucugugccccuucggcgagguguucaaugccaccagauucgccucuguguacgccuggaaccggaagcggaucagcaauugcguggccgacuacuccgugcuguacaacuccgccagcuucagcaccuucaagugcuacggcguguccccuaccaagcugaacgaccugugcuucacaaacguguacgccgacagcuucgugauccggggagaugaagugcggcagauugccccuggacagacaggcaagaucgccgacuacaacuacaagcugcccgacgacuucaccggcugugugauugccuggaacagcaacaaccuggacuccaaagucggcggcaacuacaauuaccgcuaccggcuguuccggaaguccaaucugaagcccuucgagcgggacaucuccaccgagaucuaucaggccggcagcaccccuuguaacggcguggaaggcuucaacugcuacuucccacugcaguccuacggcuuucagcccacaaauggcgugggcuaucagcccuacagagugguggugcugagcuucgaacugcugcaugccccugccacagugugcggcccuaagaaaagcaccaaucucgugaagaacaaaugcgugaacuucaacuucaacggccugaccggcaccggcgugcugacagagagcaacaagaaguuccugccauuccagcaguuuggccgggauaucgccgauaccacagacgccguuagagauccccagacacuggaaauccuggacaucaccccuugcagcuucggcggagugucugugaucaccccuggcaccaacaccagcaaucagguggcagugcuguaccagggcgugaacuguaccgaagugcccguggccauucacgccgaucagcugacaccuacauggcggguguacuccaccggcagcaauguguuucagaccagagccggcugucugaucggagccgagcacgugaacaauagcuacgagugcgacauccccaucggcgcuggaaucugcgccagcuaccagacacagacaaacagcccucggagagccagaagcguggccagccagagcaucauugccuacacaaugucucugggcgccgagaacagcguggccuacuccaacaacucuaucgcuauccccaccaacuucaccaucagcgugaccacagagauccugccuguguccaugaccaagaccagcguggacugcaccauguacaucugcggcgauuccaccgagugcuccaaccugcugcugcaguacggcagcuucugcacccagcugaauagagcccugacagggaucgccguggaacaggacaagaacacccaagagguguucgcccaagugaagcagaucuacaagaccccuccuaucaaggacuucggcggcuucaauuucagccagauucugcccgauccuagcaagcccagcaagcggagcuucaucgaggaccugcuguucaacaaagugacacuggccgacgccggcuucaucaagcaguauggcgauugucugggcgacauugccgccagggaucugauuugcgcccagaaguuuaacggacugacagugcugccuccucugcugaccgaugagaugaucgcccaguacacaucugcccugcuggccggcacaaucacaagcggcuggacauuuggagcaggcgccgcucugcagauccccuuugcuaugcagauggccuaccgguucaacggcaucggagugacccagaaugugcuguacgagaaccagaagcugaucgccaaccaguucaacagcgccaucggcaagauccaggacagccugagcagcacagcaagcgcccugggaaagcugcaggacguggucaaccagaaugcccaggcacugaacacccuggucaagcagcuguccuccaacuucggcgccaucagcucugugcugaacgauauccugagcagacuggacaaggucgaggccgaggugcagaucgacagacugaucacaggcagacugcagagccuccagacauacgugacccagcagcugaucagagccgccgagauuagagccucugccaaucuggccgccaccaagaugucugagugugugcugggccagagcaagagaguggacuuuugcggcaagggcuaccaccugaugagcuucccucagucugccccucacggcgugguguuucugcacgugacauaugugcccgcucaagagaagaauuucaccaccgcuccagccaucugccacgacggcaaagcccacuuuccuagagaaggcguguucguguccaacggcacccauugguucgugacacagcggaacuucuacgagccccagaucaucaccaccgacaacaccuucgugucuggcaacugcgacgucgugaucggcauugugaacaauaccguguacgacccucugcagcccgagcuggacagcuucaaagaggaacuggacaaguacuuuaagaaccacacaagccccgacguggaccugggcgauaucagcggaaucaaugccagcgucgugaacauccagaaagagaucgaccggcugaacgagguggccaagaaucugaacgagagccugaucgaccugcaagaacuggggaaguacgagcaguacaucaaguggcccugguacaucuggcugggcuuuaucgccggacugauugccaucgugauggucacaaucaugcuguguugcaugaccagcugcuguagcugccugaagggcuguuguagcuguggcagcugcugcaaguucgacgaggacgauucugagcccgugcugaagggcgugaaacugcacuacacaugaugacucgagcugguacugcaugcacgcaaugcuagcugccccuuucccguccuggguaccccgagucucccccgaccucgggucccagguaugcucccaccuccaccugccccacucaccaccucugcuaguuccagacaccucccaagcacgcagcaaugcagcucaaaacgcuuagccuagccacacccccacgggaaacagcagugauuaaccuuuagcaauaaacgaaaguuuaacuaagcuauacuaaccccaggguuggucaauuucgugccagccacacccuggagcuagcaaaaaaaaaaaaaaaaaaaaaaaaaaaaaagcauaugacuaaaaaaaaaaaaaaaaaaaaaaaaaaaaaaaaaaaaaaaaaaaaaaaaaaaaaaaaaaaaaaaaaaaaaa

SEQ ID NO: 26817 - RNA, 4283 nt, Artificial Sequence
  SARS-CoV-2/Wuhan/WIV05/2019__EPI_ISL_402128 spike protein mRNA gc (1-1273)(K986P_V987P)
agaauaaacuaguauucuucugguccccacagacucagagagaacccgccaccauguucguguuccugguccuccugccccuggugagcucccagugcgugaaccucaccacccgcacgcagcugccgcccgccuacaccaacagcuucacccggggcgucuacuaccccgacaagguguuccgcuccagcgugcugcacuccacccaggaccucuuccugcccuucuucagcaacgucacgugguuccacgccauccacguguccgggaccaacggcaccaagcgguucgacaacccggugcugcccuucaacgacggggucuacuucgcgagcaccgagaaguccaacaucauccgcggcuggaucuucgggacgacccucgacagcaagacccagucccugcugaucgugaacaacgccaccaacguggucaucaaggugugcgaguuccaguucugcaacgaccccuuccucggcguguacuaccacaagaacaacaagagcuggauggaguccgaguuccgggucuacagcuccgccaacaacugcacguucgaguacgugagccagcccuuccugauggaccuggagggcaagcaggggaacuucaagaaccuccgcgaguucguguucaagaacaucgacggcuacuucaagaucuacuccaagcacaccccgaucaaccugguccgggaccugccccagggguucagcgcccucgagccccugguggaccugcccaucggcaucaacaucacccgcuuccagacccuccuggcccugcaccgguccuaccucacgccgggggacagcagcuccggcuggaccgcgggcgccgccgccuacuacgugggguaccugcagccccgcaccuuccugcucaaguacaacgagaacggcaccaucacggacgcggucgacugcgcccuggacccccugagcgagaccaagugcacccucaaguccuucaccguggagaaggggaucuaccagacgagcaacuuccgggugcagcccaccgaguccaucguccgcuucccgaacaucaccaaccugugccccuucggcgagguguucaacgccacccgguucgccagcgucuacgccuggaaccgcaagcggaucuccaacugcguggcggacuacagcgugcuguacaacuccgccagcuucuccacguucaagugcuacggcgucagccccaccaagcucaacgaccugugcuucaccaacguguacgccgacuccuucgugauccgcggggacgagguccggcagaucgcccccggccagaccgggaagaucgccgacuacaacuacaagcugccggacgacuucacgggcugcgugaucgcguggaacagcaacaaccucgacuccaaggucgggggcaacuacaacuaccuguaccgccuguuccgcaagagcaaccucaagcccuucgagcgggacaucuccaccgagaucuaccaggccggcagcacccccugcaacgggguggagggcuucaacugcuacuucccccugcaguccuacggguuccagccgaccaacggcgugggguaccagcccuaccggguggucgugcugagcuucgagcuccugcacgcccccgccacggugugcggccccaagaaguccaccaaccuggucaagaacaagugcgugaacuucaacuucaacggccucaccgggaccggcgugcugaccgagagcaacaagaaguuccugccguuccagcaguucgggcgcgacaucgccgacacgaccgacgcgguccgcgacccccagacccuggagauccucgacaucacccccugcagcuucggcgggguguccgugaucacgccgggcaccaacaccagcaaccaggucgccgugcuguaccaggacgugaacugcaccgagguccccguggccauccacgccgaccagcugacgcccaccuggcggguguacuccaccggcagcaacgucuuccagacccgcgccgggugccucaucggcgcggagcacgugaacaacuccuacgagugcgacauccccaucggggccggcaucugcgccagcuaccagacgcagaccaacuccccgcggcgcgcccggagcguggcgucccagagcaucaucgccuacaccaugucccugggcgccgagaacagcgucgccuacuccaacaacagcaucgccauccccaccaacuucacgaucuccgugaccaccgagauccugcccgugagcaugaccaagacgagcgucgacugcaccauguacaucugcggggacuccaccgagugcagcaaccuccugcugcaguacggcuccuucugcacccagcucaaccgcgcgcugacggggaucgccguggagcaggacaagaacacccaggagguguucgcccaggucaagcagaucuacaagacgcccccgaucaaggacuucggcggguucaacuucagccagauccugcccgaccccuccaagcccagcaagcgguccuucaucgaggaccuccuguucaacaaggugacccuggccgacgccggcuucaucaagcaguacggcgacugccucggggacaucgcggcccgcgaccugaucugcgcccagaaguucaacggccugaccgugcucccgccccugcugaccgacgagaugaucgcccaguacaccagcgcccuccuggcggggaccaucacguccggcuggaccuucggggccggcgccgcccugcagauccccuucgcgaugcagauggccuaccgguucaacggcaucggggucacccagaacgugcucuacgagaaccagaagcugaucgccaaccaguucaacagcgccaucggcaagauccaggacucccugagcuccaccgccagcgcgcucgggaagcugcaggacguggucaaccagaacgcccaggcccugaacacgcucgugaagcagcuguccagcaacuucggcgccaucuccagcgugcugaacgacauccucucccgccuggacccgcccgaggccgaggugcagaucgaccggcugaucaccgggcgccuccagagccugcagaccuacgugacccagcagcugauccgggcggccgagauccgcgccagcgccaaccucgccgcgaccaagauguccgagugcguccugggccagagcaagcggguggacuucugcggcaagggguaccaccugauguccuucccccagagcgccccgcacggcguggucuuccuccacgugacguacguccccgcccaggagaagaacuucaccaccgcccccgcgaucugccacgacgggaaggcccacuucccccgcgagggcguguucguguccaacgggacccacugguucgucacgcagcggaacuucuacgagccgcagaucaucaccaccgacaacaccuucgugagcggcaacugcgacguggucaucggcaucgugaacaacacgguguacgacccccugcagcccgagcuggacuccuucaaggaggagcucgacaaguacuucaagaaccacaccagccccgacgucgaccugggggacaucuccggcaucaacgccagcguggugaacauccagaaggagaucgaccgccugaacgaggucgccaagaaccucaacgagucccugaucgaccugcaggagcucgggaaguacgagcaguacaucaaguggccgugguacaucuggcugggcuucaucgccggccugaucgcgaucgugauggugaccaucaugcucugcugcaugaccagcugcugcuccugccugaaggggugcugcagcugcggcuccugcugcaaguucgacgaggacgacagcgagcccguccugaagggggugaagcuccacuacacgugaugacucgagcugguacugcaugcacgcaaugcuagcugccccuuucccguccuggguaccccgagucucccccgaccucgggucccagguaugcucccaccuccaccugccccacucaccaccucugcuaguuccagacaccucccaagcacgcagcaaugcagcucaaaacgcuuagccuagccacacccccacgggaaacagcagugauuaaccuuuagcaauaaacgaaaguuuaacuaagcuauacuaaccccaggguuggucaauuucgugccagccacacccuggagcuagcaaaaaaaaaaaaaaaaaaaaaaaaaaaaaagcauaugacuaaaaaaaaaaaaaaaaaaaaaaaaaaaaaaaaaaaaaaaaaaaaaaaaaaaaaaaaaaaaaaaaaaaaaa

SEQ ID NO: 26818 - RNA, 4283 nt, Artificial Sequence
  SARS-CoV-2/Wuhan/WIV05/2019__EPI_ISL_402128 spike protein mRNA gc (1-1273)(K986P_V987P_ D614G)
agaauaaacuaguauucuucugguccccacagacucagagagaacccgccaccauguucguguuccugguccuccugccccuggugagcucccagugcgugaaccucaccacccgcacgcagcugccgcccgccuacaccaacagcuucacccggggcgucuacuaccccgacaagguguuccgcuccagcgugcugcacuccacccaggaccucuuccugcccuucuucagcaacgucacgugguuccacgccauccacguguccgggaccaacggcaccaagcgguucgacaacccggugcugcccuucaacgacggggucuacuucgcgagcaccgagaaguccaacaucauccgcggcuggaucuucgggacgacccucgacagcaagacccagucccugcugaucgugaacaacgccaccaacguggucaucaaggugugcgaguuccaguucugcaacgaccccuuccucggcguguacuaccacaagaacaacaagagcuggauggaguccgaguuccgggucuacagcuccgccaacaacugcacguucgaguacgugagccagcccuuccugauggaccuggagggcaagcaggggaacuucaagaaccuccgcgaguucguguucaagaacaucgacggcuacuucaagaucuacuccaagcacaccccgaucaaccugguccgggaccugccccagggguucagcgcccucgagccccugguggaccugcccaucggcaucaacaucacccgcuuccagacccuccuggcccugcaccgguccuaccucacgccgggggacagcagcuccggcuggaccgcgggcgccgccgccuacuacgugggguaccugcagccccgcaccuuccugcucaaguacaacgagaacggcaccaucacggacgcggucgacugcgcccuggacccccugagcgagaccaagugcacccucaaguccuucaccguggagaaggggaucuaccagacgagcaacuuccgggugcagcccaccgaguccaucguccgcuucccgaacaucaccaaccugugccccuucggcgagguguucaacgccacccgguucgccagcgucuacgccuggaaccgcaagcggaucuccaacugcguggcggacuacagcgugcuguacaacuccgccagcuucuccacguucaagugcuacggcgucagccccaccaagcucaacgaccugugcuucaccaacguguacgccgacuccuucgugauccgcggggacgagguccggcagaucgcccccggccagaccgggaagaucgccgacuacaacuacaagcugccggacgacuucacgggcugcgugaucgcguggaacagcaacaaccucgacuccaaggucgggggcaacuacaacuaccuguaccgccuguuccgcaagagcaaccucaagcccuucgagcgggacaucuccaccgagaucuaccaggccggcagcacccccugcaacgggguggagggcuucaacugcuacuucccccugcaguccuacggguuccagccgaccaacggcgugggguaccagcccuaccggguggucgugcugagcuucgagcuccugcacgcccccgccacggugugcggccccaagaaguccaccaaccuggucaagaacaagugcgugaacuucaacuucaacggccucaccgggaccggcgugcugaccgagagcaacaagaaguuccugccguuccagcaguucgggcgcgacaucgccgacacgaccgacgcgguccgcgacccccagacccuggagauccucgacaucacccccugcagcuucggcgggguguccgugaucacgccgggcaccaacaccagcaaccaggucgccgugcuguaccagggcgugaacugcaccgagguccccguggccauccacgccgaccagcugacgcccaccuggcggguguacuccaccggcagcaacgucuuccagacccgcgccgggugccucaucggcgcggagcacgugaacaacuccuacgagugcgacauccccaucggggccggcaucugcgccagcuaccagacgcagaccaacuccccgcggcgcgcccggagcguggcgucccagagcaucaucgccuacaccaugucccugggcgccgagaacagcgucgccuacuccaacaacagcaucgccauccccaccaacuucacgaucuccgugaccaccgagauccugcccgugagcaugaccaagacgagcgucgacugcaccauguacaucugcggggacuccaccgagugcagcaaccuccugcugcaguacggcuccuucugcacccagcucaaccgcgcgcugacggggaucgccguggagcaggacaagaacacccaggagguguucgcccaggucaagcagaucuacaagacgcccccgaucaaggacuucggcggguucaacuucagccagauccugcccgaccccuccaagcccagcaagcgguccuucaucgaggaccuccuguucaacaaggugacccuggccgacgccggcuucaucaagcaguacggcgacugccucggggacaucgcggcccgcgaccugaucugcgcccagaaguucaacggccugaccgugcucccgccccugcugaccgacgagaugaucgcccaguacaccagcgcccuccuggcggggaccaucacguccggcuggaccuucggggccggcgccgcccugcagauccccuucgcgaugcagauggccuaccgguucaacggcaucggggucacccagaacgugcucuacgagaaccagaagcugaucgccaaccaguucaacagcgccaucggcaagauccaggacucccugagcuccaccgccagcgcgcucgggaagcugcaggacguggucaaccagaacgcccaggcccugaacacgcucgugaagcagcuguccagcaacuucggcgccaucuccagcgugcugaacgacauccucucccgccuggacccgcccgaggccgaggugcagaucgaccggcugaucaccgggcgccuccagagccugcagaccuacgugacccagcagcugauccgggcggccgagauccgcgccagcgccaaccucgccgcgaccaagauguccgagugcguccugggccagagcaagcggguggacuucugcggcaagggguaccaccugauguccuucccccagagcgccccgcacggcguggucuuccuccacgugacguacguccccgcccaggagaagaacuucaccaccgcccccgcgaucugccacgacgggaaggcccacuucccccgcgagggcguguucguguccaacgggacccacugguucgucacgcagcggaacuucuacgagccgcagaucaucaccaccgacaacaccuucgugagcggcaacugcgacguggucaucggcaucgugaacaacacgguguacgacccccugcagcccgagcuggacuccuucaaggaggagcucgacaaguacuucaagaaccacaccagccccgacgucgaccugggggacaucuccggcaucaacgccagcguggugaacauccagaaggagaucgaccgccugaacgaggucgccaagaaccucaacgagucccugaucgaccugcaggagcucgggaaguacgagcaguacaucaaguggccgugguacaucuggcugggcuucaucgccggccugaucgcgaucgugauggugaccaucaugcucugcugcaugaccagcugcugcuccugccugaaggggugcugcagcugcggcuccugcugcaaguucgacgaggacgacagcgagcccguccugaagggggugaagcuccacuacacgugaugacucgagcugguacugcaugcacgcaaugcuagcugccccuuucccguccuggguaccccgagucucccccgaccucgggucccagguaugcucccaccuccaccugccccacucaccaccucugcuaguuccagacaccucccaagcacgcagcaaugcagcucaaaacgcuuagccuagccacacccccacgggaaacagcagugauuaaccuuuagcaauaaacgaaaguuuaacuaagcuauacuaaccccaggguuggucaauuucgugccagccacacccuggagcuagcaaaaaaaaaaaaaaaaaaaaaaaaaaaaaagcauaugacuaaaaaaaaaaaaaaaaaaaaaaaaaaaaaaaaaaaaaaaaaaaaaaaaaaaaaaaaaaaaaaaaaaaaaa

SEQ ID NO: 26819 - RNA, 4283 nt, Artificial Sequence
  SARS-CoV-2/Wuhan/WIV05/2019__EPI_ISL_402128 spike protein mRNA gc (1-1273)(K986P_V987P_A222V_D614G)
agaauaaacuaguauucuucugguccccacagacucagagagaacccgccaccauguucguguuccugguccuccugccccuggugagcucccagugcgugaaccucaccacccgcacgcagcugccgcccgccuacaccaacagcuucacccggggcgucuacuaccccgacaagguguuccgcuccagcgugcugcacuccacccaggaccucuuccugcccuucuucagcaacgucacgugguuccacgccauccacguguccgggaccaacggcaccaagcgguucgacaacccggugcugcccuucaacgacggggucuacuucgcgagcaccgagaaguccaacaucauccgcggcuggaucuucgggacgacccucgacagcaagacccagucccugcugaucgugaacaacgccaccaacguggucaucaaggugugcgaguuccaguucugcaacgaccccuuccucggcguguacuaccacaagaacaacaagagcuggauggaguccgaguuccgggucuacagcuccgccaacaacugcacguucgaguacgugagccagcccuuccugauggaccuggagggcaagcaggggaacuucaagaaccuccgcgaguucguguucaagaacaucgacggcuacuucaagaucuacuccaagcacaccccgaucaaccugguccgggaccugccccagggguucagcguccucgagccccugguggaccugcccaucggcaucaacaucacccgcuuccagacccuccuggcccugcaccgguccuaccucacgccgggggacagcagcuccggcuggaccgcgggcgccgccgccuacuacgugggguaccugcagccccgcaccuuccugcucaaguacaacgagaacggcaccaucacggacgcggucgacugcgcccuggacccccugagcgagaccaagugcacccucaaguccuucaccguggagaaggggaucuaccagacgagcaacuuccgggugcagcccaccgaguccaucguccgcuucccgaacaucaccaaccugugccccuucggcgagguguucaacgccacccgguucgccagcgucuacgccuggaaccgcaagcggaucuccaacugcguggcggacuacagcgugcuguacaacuccgccagcuucuccacguucaagugcuacggcgucagccccaccaagcucaacgaccugugcuucaccaacguguacgccgacuccuucgugauccgcggggacgagguccggcagaucgcccccggccagaccgggaagaucgccgacuacaacuacaagcugccggacgacuucacgggcugcgugaucgcguggaacagcaacaaccucgacuccaaggucgggggcaacuacaacuaccuguaccgccuguuccgcaagagcaaccucaagcccuucgagcgggacaucuccaccgagaucuaccaggccggcagcacccccugcaacgggguggagggcuucaacugcuacuucccccugcaguccuacggguuccagccgaccaacggcgugggguaccagcccuaccggguggucgugcugagcuucgagcuccugcacgcccccgccacggugugcggccccaagaaguccaccaaccuggucaagaacaagugcgugaacuucaacuucaacggccucaccgggaccggcgugcugaccgagagcaacaagaaguuccugccguuccagcaguucgggcgcgacaucgccgacacgaccgacgcgguccgcgacccccagacccuggagauccucgacaucacccccugcagcuucggcgggguguccgugaucacgccgggcaccaacaccagcaaccaggucgccgugcuguaccagggcgugaacugcaccgagguccccguggccauccacgccgaccagcugacgcccaccuggcggguguacuccaccggcagcaacgucuuccagacccgcgccgggugccucaucggcgcggagcacgugaacaacuccuacgagugcgacauccccaucggggccggcaucugcgccagcuaccagacgcagaccaacuccccgcggcgcgcccggagcguggcgucccagagcaucaucgccuacaccaugucccugggcgccgagaacagcgucgccuacuccaacaacagcaucgccauccccaccaacuucacgaucuccgugaccaccgagauccugcccgugagcaugaccaagacgagcgucgacugcaccauguacaucugcggggacuccaccgagugcagcaaccuccugcugcaguacggcuccuucugcacccagcucaaccgcgcgcugacggggaucgccguggagcaggacaagaacacccaggagguguucgcccaggucaagcagaucuacaagacgcccccgaucaaggacuucggcggguucaacuucagccagauccugcccgaccccuccaagcccagcaagcgguccuucaucgaggaccuccuguucaacaaggugacccuggccgacgccggcuucaucaagcaguacggcgacugccucggggacaucgcggcccgcgaccugaucugcgcccagaaguucaacggccugaccgugcucccgccccugcugaccgacgagaugaucgcccaguacaccagcgcccuccuggcggggaccaucacguccggcuggaccuucggggccggcgccgcccugcagauccccuucgcgaugcagauggccuaccgguucaacggcaucggggucacccagaacgugcucuacgagaaccagaagcugaucgccaaccaguucaacagcgccaucggcaagauccaggacucccugagcuccaccgccagcgcgcucgggaagcugcaggacguggucaaccagaacgcccaggcccugaacacgcucgugaagcagcuguccagcaacuucggcgccaucuccagcgugcugaacgacauccucucccgccuggacccgcccgaggccgaggugcagaucgaccggcugaucaccgggcgccuccagagccugcagaccuacgugacccagcagcugauccgggcggccgagauccgcgccagcgccaaccucgccgcgaccaagauguccgagugcguccugggccagagcaagcggguggacuucugcggcaagggguaccaccugauguccuucccccagagcgccccgcacggcguggucuuccuccacgugacguacguccccgcccaggagaagaacuucaccaccgcccccgcgaucugccacgacgggaaggcccacuucccccgcgagggcguguucguguccaacgggacccacugguucgucacgcagcggaacuucuacgagccgcagaucaucaccaccgacaacaccuucgugagcggcaacugcgacguggucaucggcaucgugaacaacacgguguacgacccccugcagcccgagcuggacuccuucaaggaggagcucgacaaguacuucaagaaccacaccagccccgacgucgaccugggggacaucuccggcaucaacgccagcguggugaacauccagaaggagaucgaccgccugaacgaggucgccaagaaccucaacgagucccugaucgaccugcaggagcucgggaaguacgagcaguacaucaaguggccgugguacaucuggcugggcuucaucgccggccugaucgcgaucgugauggugaccaucaugcucugcugcaugaccagcugcugcuccugccugaaggggugcugcagcugcggcuccugcugcaaguucgacgaggacgacagcgagcccguccugaagggggugaagcuccacuacacgugaugacucgagcugguacugcaugcacgcaaugcuagcugccccuuucccguccuggguaccccgagucucccccgaccucgggucccagguaugcucccaccuccaccugccccacucaccaccucugcuaguuccagacaccucccaagcacgcagcaaugcagcucaaaacgcuuagccuagccacacccccacgggaaacagcagugauuaaccuuuagcaauaaacgaaaguuuaacuaagcuauacuaaccccaggguuggucaauuucgugccagccacacccuggagcuagcaaaaaaaaaaaaaaaaaaaaaaaaaaaaaagcauaugacuaaaaaaaaaaaaaaaaaaaaaaaaaaaaaaaaaaaaaaaaaaaaaaaaaaaaaaaaaaaaaaaaaaaaaa

SEQ ID NO: 26820 - RNA, 4283 nt, Artificial Sequence
  SARS-CoV-2/Wuhan/WIV05/2019__EPI_ISL_402128 spike protein mRNA gc (1-1273)(K986P_V987P_N439K_D614G)
agaauaaacuaguauucuucugguccccacagacucagagagaacccgccaccauguucguguuccugguccuccugccccuggugagcucccagugcgugaaccucaccacccgcacgcagcugccgcccgccuacaccaacagcuucacccggggcgucuacuaccccgacaagguguuccgcuccagcgugcugcacuccacccaggaccucuuccugcccuucuucagcaacgucacgugguuccacgccauccacguguccgggaccaacggcaccaagcgguucgacaacccggugcugcccuucaacgacggggucuacuucgcgagcaccgagaaguccaacaucauccgcggcuggaucuucgggacgacccucgacagcaagacccagucccugcugaucgugaacaacgccaccaacguggucaucaaggugugcgaguuccaguucugcaacgaccccuuccucggcguguacuaccacaagaacaacaagagcuggauggaguccgaguuccgggucuacagcuccgccaacaacugcacguucgaguacgugagccagcccuuccugauggaccuggagggcaagcaggggaacuucaagaaccuccgcgaguucguguucaagaacaucgacggcuacuucaagaucuacuccaagcacaccccgaucaaccugguccgggaccugccccagggguucagcgcccucgagccccugguggaccugcccaucggcaucaacaucacccgcuuccagacccuccuggcccugcaccgguccuaccucacgccgggggacagcagcuccggcuggaccgcgggcgccgccgccuacuacgugggguaccugcagccccgcaccuuccugcucaaguacaacgagaacggcaccaucacggacgcggucgacugcgcccuggacccccugagcgagaccaagugcacccucaaguccuucaccguggagaaggggaucuaccagacgagcaacuuccgggugcagcccaccgaguccaucguccgcuucccgaacaucaccaaccugugccccuucggcgagguguucaacgccacccgguucgccagcgucuacgccuggaaccgcaagcggaucuccaacugcguggcggacuacagcgugcuguacaacuccgccagcuucuccacguucaagugcuacggcgucagccccaccaagcucaacgaccugugcuucaccaacguguacgccgacuccuucgugauccgcggggacgagguccggcagaucgcccccggccagaccgggaagaucgccgacuacaacuacaagcugccggacgacuucacgggcugcgugaucgcguggaacagcaagaaccucgacuccaaggucgggggcaacuacaacuaccuguaccgccuguuccgcaagagcaaccucaagcccuucgagcgggacaucuccaccgagaucuaccaggccggcagcacccccugcaacgggguggagggcuucaacugcuacuucccccugcaguccuacggguuccagccgaccaacggcgugggguaccagcccuaccggguggucgugcugagcuucgagcuccugcacgcccccgccacggugugcggccccaagaaguccaccaaccuggucaagaacaagugcgugaacuucaacuucaacggccucaccgggaccggcgugcugaccgagagcaacaagaaguuccugccguuccagcaguucgggcgcgacaucgccgacacgaccgacgcgguccgcgacccccagacccuggagauccucgacaucacccccugcagcuucggcgggguguccgugaucacgccgggcaccaacaccagcaaccaggucgccgugcuguaccagggcgugaacugcaccgagguccccguggccauccacgccgaccagcugacgcccaccuggcggguguacuccaccggcagcaacgucuuccagacccgcgccgggugccucaucggcgcggagcacgugaacaacuccuacgagugcgacauccccaucggggccggcaucugcgccagcuaccagacgcagaccaacuccccgcggcgcgcccggagcguggcgucccagagcaucaucgccuacaccaugucccugggcgccgagaacagcgucgccuacuccaacaacagcaucgccauccccaccaacuucacgaucuccgugaccaccgagauccugcccgugagcaugaccaagacgagcgucgacugcaccauguacaucugcggggacuccaccgagugcagcaaccuccugcugcaguacggcuccuucugcacccagcucaaccgcgcgcugacggggaucgccguggagcaggacaagaacacccaggagguguucgcccaggucaagcagaucuacaagacgcccccgaucaaggacuucggcggguucaacuucagccagauccugcccgaccccuccaagcccagcaagcgguccuucaucgaggaccuccuguucaacaaggugacccuggccgacgccggcuucaucaagcaguacggcgacugccucggggacaucgcggcccgcgaccugaucugcgcccagaaguucaacggccugaccgugcucccgccccugcugaccgacgagaugaucgcccaguacaccagcgcccuccuggcggggaccaucacguccggcuggaccuucggggccggcgccgcccugcagauccccuucgcgaugcagauggccuaccgguucaacggcaucggggucacccagaacgugcucuacgagaaccagaagcugaucgccaaccaguucaacagcgccaucggcaagauccaggacucccugagcuccaccgccagcgcgcucgggaagcugcaggacguggucaaccagaacgcccaggcccugaacacgcucgugaagcagcuguccagcaacuucggcgccaucuccagcgugcugaacgacauccucucccgccuggacccgcccgaggccgaggugcagaucgaccggcugaucaccgggcgccuccagagccugcagaccuacgugacccagcagcugauccgggcggccgagauccgcgccagcgccaaccucgccgcgaccaagauguccgagugcguccugggccagagcaagcggguggacuucugcggcaagggguaccaccugauguccuucccccagagcgccccgcacggcguggucuuccuccacgugacguacguccccgcccaggagaagaacuucaccaccgcccccgcgaucugccacgacgggaaggcccacuucccccgcgagggcguguucguguccaacgggacccacugguucgucacgcagcggaacuucuacgagccgcagaucaucaccaccgacaacaccuucgugagcggcaacugcgacguggucaucggcaucgugaacaacacgguguacgacccccugcagcccgagcuggacuccuucaaggaggagcucgacaaguacuucaagaaccacaccagccccgacgucgaccugggggacaucuccggcaucaacgccagcguggugaacauccagaaggagaucgaccgccugaacgaggucgccaagaaccucaacgagucccugaucgaccugcaggagcucgggaaguacgagcaguacaucaaguggccgugguacaucuggcugggcuucaucgccggccugaucgcgaucgugauggugaccaucaugcucugcugcaugaccagcugcugcuccugccugaaggggugcugcagcugcggcuccugcugcaaguucgacgaggacgacagcgagcccguccugaagggggugaagcuccacuacacgugaugacucgagcugguacugcaugcacgcaaugcuagcugccccuuucccguccuggguaccccgagucucccccgaccucgggucccagguaugcucccaccuccaccugccccacucaccaccucugcuaguuccagacaccucccaagcacgcagcaaugcagcucaaaacgcuuagccuagccacacccccacgggaaacagcagugauuaaccuuuagcaauaaacgaaaguuuaacuaagcuauacuaaccccaggguuggucaauuucgugccagccacacccuggagcuagcaaaaaaaaaaaaaaaaaaaaaaaaaaaaaagcauaugacuaaaaaaaaaaaaaaaaaaaaaaaaaaaaaaaaaaaaaaaaaaaaaaaaaaaaaaaaaaaaaaaaaaaaaa

SEQ ID NO: 26821 - RNA, 4283 nt, Artificial Sequence
  SARS-CoV-2/Wuhan/WIV05/2019__EPI_ISL_402128 spike protein mRNA gc (1-1273)(K986P_V987P_S477N_D614G)
agaauaaacuaguauucuucugguccccacagacucagagagaacccgccaccauguucguguuccugguccuccugccccuggugagcucccagugcgugaaccucaccacccgcacgcagcugccgcccgccuacaccaacagcuucacccggggcgucuacuaccccgacaagguguuccgcuccagcgugcugcacuccacccaggaccucuuccugcccuucuucagcaacgucacgugguuccacgccauccacguguccgggaccaacggcaccaagcgguucgacaacccggugcugcccuucaacgacggggucuacuucgcgagcaccgagaaguccaacaucauccgcggcuggaucuucgggacgacccucgacagcaagacccagucccugcugaucgugaacaacgccaccaacguggucaucaaggugugcgaguuccaguucugcaacgaccccuuccucggcguguacuaccacaagaacaacaagagcuggauggaguccgaguuccgggucuacagcuccgccaacaacugcacguucgaguacgugagccagcccuuccugauggaccuggagggcaagcaggggaacuucaagaaccuccgcgaguucguguucaagaacaucgacggcuacuucaagaucuacuccaagcacaccccgaucaaccugguccgggaccugccccagggguucagcgcccucgagccccugguggaccugcccaucggcaucaacaucacccgcuuccagacccuccuggcccugcaccgguccuaccucacgccgggggacagcagcuccggcuggaccgcgggcgccgccgccuacuacgugggguaccugcagccccgcaccuuccugcucaaguacaacgagaacggcaccaucacggacgcggucgacugcgcccuggacccccugagcgagaccaagugcacccucaaguccuucaccguggagaaggggaucuaccagacgagcaacuuccgggugcagcccaccgaguccaucguccgcuucccgaacaucaccaaccugugccccuucggcgagguguucaacgccacccgguucgccagcgucuacgccuggaaccgcaagcggaucuccaacugcguggcggacuacagcgugcuguacaacuccgccagcuucuccacguucaagugcuacggcgucagccccaccaagcucaacgaccugugcuucaccaacguguacgccgacuccuucgugauccgcggggacgagguccggcagaucgcccccggccagaccgggaagaucgccgacuacaacuacaagcugccggacgacuucacgggcugcgugaucgcguggaacagcaacaaccucgacuccaaggucgggggcaacuacaacuaccuguaccgccuguuccgcaagagcaaccucaagcccuucgagcgggacaucuccaccgagaucuaccaggccggcaacacccccugcaacgggguggagggcuucaacugcuacuucccccugcaguccuacggguuccagccgaccaacggcgugggguaccagcccuaccggguggucgugcugagcuucgagcuccugcacgcccccgccacggugugcggccccaagaaguccaccaaccuggucaagaacaagugcgugaacuucaacuucaacggccucaccgggaccggcgugcugaccgagagcaacaagaaguuccugccguuccagcaguucgggcgcgacaucgccgacacgaccgacgcgguccgcgacccccagacccuggagauccucgacaucacccccugcagcuucggcgggguguccgugaucacgccgggcaccaacaccagcaaccaggucgccgugcuguaccagggcgugaacugcaccgagguccccguggccauccacgccgaccagcugacgcccaccuggcggguguacuccaccggcagcaacgucuuccagacccgcgccgggugccucaucggcgcggagcacgugaacaacuccuacgagugcgacauccccaucggggccggcaucugcgccagcuaccagacgcagaccaacuccccgcggcgcgcccggagcguggcgucccagagcaucaucgccuacaccaugucccugggcgccgagaacagcgucgccuacuccaacaacagcaucgccauccccaccaacuucacgaucuccgugaccaccgagauccugcccgugagcaugaccaagacgagcgucgacugcaccauguacaucugcggggacuccaccgagugcagcaaccuccugcugcaguacggcuccuucugcacccagcucaaccgcgcgcugacggggaucgccguggagcaggacaagaacacccaggagguguucgcccaggucaagcagaucuacaagacgcccccgaucaaggacuucggcggguucaacuucagccagauccugcccgaccccuccaagcccagcaagcgguccuucaucgaggaccuccuguucaacaaggugacccuggccgacgccggcuucaucaagcaguacggcgacugccucggggacaucgcggcccgcgaccugaucugcgcccagaaguucaacggccugaccgugcucccgccccugcugaccgacgagaugaucgcccaguacaccagcgcccuccuggcggggaccaucacguccggcuggaccuucggggccggcgccgcccugcagauccccuucgcgaugcagauggccuaccgguucaacggcaucggggucacccagaacgugcucuacgagaaccagaagcugaucgccaaccaguucaacagcgccaucggcaagauccaggacucccugagcuccaccgccagcgcgcucgggaagcugcaggacguggucaaccagaacgcccaggcccugaacacgcucgugaagcagcuguccagcaacuucggcgccaucuccagcgugcugaacgacauccucucccgccuggacccgcccgaggccgaggugcagaucgaccggcugaucaccgggcgccuccagagccugcagaccuacgugacccagcagcugauccgggcggccgagauccgcgccagcgccaaccucgccgcgaccaagauguccgagugcguccugggccagagcaagcggguggacuucugcggcaagggguaccaccugauguccuucccccagagcgccccgcacggcguggucuuccuccacgugacguacguccccgcccaggagaagaacuucaccaccgcccccgcgaucugccacgacgggaaggcccacuucccccgcgagggcguguucguguccaacgggacccacugguucgucacgcagcggaacuucuacgagccgcagaucaucaccaccgacaacaccuucgugagcggcaacugcgacguggucaucggcaucgugaacaacacgguguacgacccccugcagcccgagcuggacuccuucaaggaggagcucgacaaguacuucaagaaccacaccagccccgacgucgaccugggggacaucuccggcaucaacgccagcguggugaacauccagaaggagaucgaccgccugaacgaggucgccaagaaccucaacgagucccugaucgaccugcaggagcucgggaaguacgagcaguacaucaaguggccgugguacaucuggcugggcuucaucgccggccugaucgcgaucgugauggugaccaucaugcucugcugcaugaccagcugcugcuccugccugaaggggugcugcagcugcggcuccugcugcaaguucgacgaggacgacagcgagcccguccugaagggggugaagcuccacuacacgugaugacucgagcugguacugcaugcacgcaaugcuagcugccccuuucccguccuggguaccccgagucucccccgaccucgggucccagguaugcucccaccuccaccugccccacucaccaccucugcuaguuccagacaccucccaagcacgcagcaaugcagcucaaaacgcuuagccuagccacacccccacgggaaacagcagugauuaaccuuuagcaauaaacgaaaguuuaacuaagcuauacuaaccccaggguuggucaauuucgugccagccacacccuggagcuagcaaaaaaaaaaaaaaaaaaaaaaaaaaaaaagcauaugacuaaaaaaaaaaaaaaaaaaaaaaaaaaaaaaaaaaaaaaaaaaaaaaaaaaaaaaaaaaaaaaaaaaaaaa

SEQ ID NO: 26822 - RNA, 4283 nt, Artificial Sequence
  SARS-CoV-2/Wuhan/WIV05/2019__EPI_ISL_402128 spike protein mRNA gc (1-1273)(K986P_V987P_N501Y_D614G)
agaauaaacuaguauucuucugguccccacagacucagagagaacccgccaccauguucguguuccugguccuccugccccuggugagcucccagugcgugaaccucaccacccgcacgcagcugccgcccgccuacaccaacagcuucacccggggcgucuacuaccccgacaagguguuccgcuccagcgugcugcacuccacccaggaccucuuccugcccuucuucagcaacgucacgugguuccacgccauccacguguccgggaccaacggcaccaagcgguucgacaacccggugcugcccuucaacgacggggucuacuucgcgagcaccgagaaguccaacaucauccgcggcuggaucuucgggacgacccucgacagcaagacccagucccugcugaucgugaacaacgccaccaacguggucaucaaggugugcgaguuccaguucugcaacgaccccuuccucggcguguacuaccacaagaacaacaagagcuggauggaguccgaguuccgggucuacagcuccgccaacaacugcacguucgaguacgugagccagcccuuccugauggaccuggagggcaagcaggggaacuucaagaaccuccgcgaguucguguucaagaacaucgacggcuacuucaagaucuacuccaagcacaccccgaucaaccugguccgggaccugccccagggguucagcgcccucgagccccugguggaccugcccaucggcaucaacaucacccgcuuccagacccuccuggcccugcaccgguccuaccucacgccgggggacagcagcuccggcuggaccgcgggcgccgccgccuacuacgugggguaccugcagccccgcaccuuccugcucaaguacaacgagaacggcaccaucacggacgcggucgacugcgcccuggacccccugagcgagaccaagugcacccucaaguccuucaccguggagaaggggaucuaccagacgagcaacuuccgggugcagcccaccgaguccaucguccgcuucccgaacaucaccaaccugugccccuucggcgagguguucaacgccacccgguucgccagcgucuacgccuggaaccgcaagcggaucuccaacugcguggcggacuacagcgugcuguacaacuccgccagcuucuccacguucaagugcuacggcgucagccccaccaagcucaacgaccugugcuucaccaacguguacgccgacuccuucgugauccgcggggacgagguccggcagaucgcccccggccagaccgggaagaucgccgacuacaacuacaagcugccggacgacuucacgggcugcgugaucgcguggaacagcaacaaccucgacuccaaggucgggggcaacuacaacuaccuguaccgccuguuccgcaagagcaaccucaagcccuucgagcgggacaucuccaccgagaucuaccaggccggcagcacccccugcaacgggguggagggcuucaacugcuacuucccccugcaguccuacggguuccagccgaccuacggcgugggguaccagcccuaccggguggucgugcugagcuucgagcuccugcacgcccccgccacggugugcggccccaagaaguccaccaaccuggucaagaacaagugcgugaacuucaacuucaacggccucaccgggaccggcgugcugaccgagagcaacaagaaguuccugccguuccagcaguucgggcgcgacaucgccgacacgaccgacgcgguccgcgacccccagacccuggagauccucgacaucacccccugcagcuucggcgggguguccgugaucacgccgggcaccaacaccagcaaccaggucgccgugcuguaccagggcgugaacugcaccgagguccccguggccauccacgccgaccagcugacgcccaccuggcggguguacuccaccggcagcaacgucuuccagacccgcgccgggugccucaucggcgcggagcacgugaacaacuccuacgagugcgacauccccaucggggccggcaucugcgccagcuaccagacgcagaccaacuccccgcggcgcgcccggagcguggcgucccagagcaucaucgccuacaccaugucccugggcgccgagaacagcgucgccuacuccaacaacagcaucgccauccccaccaacuucacgaucuccgugaccaccgagauccugcccgugagcaugaccaagacgagcgucgacugcaccauguacaucugcggggacuccaccgagugcagcaaccuccugcugcaguacggcuccuucugcacccagcucaaccgcgcgcugacggggaucgccguggagcaggacaagaacacccaggagguguucgcccaggucaagcagaucuacaagacgcccccgaucaaggacuucggcggguucaacuucagccagauccugcccgaccccuccaagcccagcaagcgguccuucaucgaggaccuccuguucaacaaggugacccuggccgacgccggcuucaucaagcaguacggcgacugccucggggacaucgcggcccgcgaccugaucugcgcccagaaguucaacggccugaccgugcucccgccccugcugaccgacgagaugaucgcccaguacaccagcgcccuccuggcggggaccaucacguccggcuggaccuucggggccggcgccgcccugcagauccccuucgcgaugcagauggccuaccgguucaacggcaucggggucacccagaacgugcucuacgagaaccagaagcugaucgccaaccaguucaacagcgccaucggcaagauccaggacucccugagcuccaccgccagcgcgcucgggaagcugcaggacguggucaaccagaacgcccaggcccugaacacgcucgugaagcagcuguccagcaacuucggcgccaucuccagcgugcugaacgacauccucucccgccuggacccgcccgaggccgaggugcagaucgaccggcugaucaccgggcgccuccagagccugcagaccuacgugacccagcagcugauccgggcggccgagauccgcgccagcgccaaccucgccgcgaccaagauguccgagugcguccugggccagagcaagcggguggacuucugcggcaagggguaccaccugauguccuucccccagagcgccccgcacggcguggucuuccuccacgugacguacguccccgcccaggagaagaacuucaccaccgcccccgcgaucugccacgacgggaaggcccacuucccccgcgagggcguguucguguccaacgggacccacugguucgucacgcagcggaacuucuacgagccgcagaucaucaccaccgacaacaccuucgugagcggcaacugcgacguggucaucggcaucgugaacaacacgguguacgacccccugcagcccgagcuggacuccuucaaggaggagcucgacaaguacuucaagaaccacaccagccccgacgucgaccugggggacaucuccggcaucaacgccagcguggugaacauccagaaggagaucgaccgccugaacgaggucgccaagaaccucaacgagucccugaucgaccugcaggagcucgggaaguacgagcaguacaucaaguggccgugguacaucuggcugggcuucaucgccggccugaucgcgaucgugauggugaccaucaugcucugcugcaugaccagcugcugcuccugccugaaggggugcugcagcugcggcuccugcugcaaguucgacgaggacgacagcgagcccguccugaagggggugaagcuccacuacacgugaugacucgagcugguacugcaugcacgcaaugcuagcugccccuuucccguccuggguaccccgagucucccccgaccucgggucccagguaugcucccaccuccaccugccccacucaccaccucugcuaguuccagacaccucccaagcacgcagcaaugcagcucaaaacgcuuagccuagccacacccccacgggaaacagcagugauuaaccuuuagcaauaaacgaaaguuuaacuaagcuauacuaaccccaggguuggucaauuucgugccagccacacccuggagcuagcaaaaaaaaaaaaaaaaaaaaaaaaaaaaaagcauaugacuaaaaaaaaaaaaaaaaaaaaaaaaaaaaaaaaaaaaaaaaaaaaaaaaaaaaaaaaaaaaaaaaaaaaaa

SEQ ID NO: 26823 - RNA, 4277 nt, Artificial Sequence
  SARS-CoV-2/Wuhan/WIV05/2019__EPI_ISL_402128 spike protein mRNA gc (1-1273)(K986P_V987P_H69del_V70del_D614G)
agaauaaacuaguauucuucugguccccacagacucagagagaacccgccaccauguucguguuccugguccuccugccccuggugagcucccagugcgugaaccucaccacccgcacgcagcugccgcccgccuacaccaacagcuucacccggggcgucuacuaccccgacaagguguuccgcuccagcgugcugcacuccacccaggaccucuuccugcccuucuucagcaacgucacgugguuccacgccaucuccgggaccaacggcaccaagcgguucgacaacccggugcugcccuucaacgacggggucuacuucgcgagcaccgagaaguccaacaucauccgcggcuggaucuucgggacgacccucgacagcaagacccagucccugcugaucgugaacaacgccaccaacguggucaucaaggugugcgaguuccaguucugcaacgaccccuuccucggcguguacuaccacaagaacaacaagagcuggauggaguccgaguuccgggucuacagcuccgccaacaacugcacguucgaguacgugagccagcccuuccugauggaccuggagggcaagcaggggaacuucaagaaccuccgcgaguucguguucaagaacaucgacggcuacuucaagaucuacuccaagcacaccccgaucaaccugguccgggaccugccccagggguucagcgcccucgagccccugguggaccugcccaucggcaucaacaucacccgcuuccagacccuccuggcccugcaccgguccuaccucacgccgggggacagcagcuccggcuggaccgcgggcgccgccgccuacuacgugggguaccugcagccccgcaccuuccugcucaaguacaacgagaacggcaccaucacggacgcggucgacugcgcccuggacccccugagcgagaccaagugcacccucaaguccuucaccguggagaaggggaucuaccagacgagcaacuuccgggugcagcccaccgaguccaucguccgcuucccgaacaucaccaaccugugccccuucggcgagguguucaacgccacccgguucgccagcgucuacgccuggaaccgcaagcggaucuccaacugcguggcggacuacagcgugcuguacaacuccgccagcuucuccacguucaagugcuacggcgucagccccaccaagcucaacgaccugugcuucaccaacguguacgccgacuccuucgugauccgcggggacgagguccggcagaucgcccccggccagaccgggaagaucgccgacuacaacuacaagcugccggacgacuucacgggcugcgugaucgcguggaacagcaacaaccucgacuccaaggucgggggcaacuacaacuaccuguaccgccuguuccgcaagagcaaccucaagcccuucgagcgggacaucuccaccgagaucuaccaggccggcagcacccccugcaacgggguggagggcuucaacugcuacuucccccugcaguccuacggguuccagccgaccaacggcgugggguaccagcccuaccggguggucgugcugagcuucgagcuccugcacgcccccgccacggugugcggccccaagaaguccaccaaccuggucaagaacaagugcgugaacuucaacuucaacggccucaccgggaccggcgugcugaccgagagcaacaagaaguuccugccguuccagcaguucgggcgcgacaucgccgacacgaccgacgcgguccgcgacccccagacccuggagauccucgacaucacccccugcagcuucggcgggguguccgugaucacgccgggcaccaacaccagcaaccaggucgccgugcuguaccagggcgugaacugcaccgagguccccguggccauccacgccgaccagcugacgcccaccuggcggguguacuccaccggcagcaacgucuuccagacccgcgccgggugccucaucggcgcggagcacgugaacaacuccuacgagugcgacauccccaucggggccggcaucugcgccagcuaccagacgcagaccaacuccccgcggcgcgcccggagcguggcgucccagagcaucaucgccuacaccaugucccugggcgccgagaacagcgucgccuacuccaacaacagcaucgccauccccaccaacuucacgaucuccgugaccaccgagauccugcccgugagcaugaccaagacgagcgucgacugcaccauguacaucugcggggacuccaccgagugcagcaaccuccugcugcaguacggcuccuucugcacccagcucaaccgcgcgcugacggggaucgccguggagcaggacaagaacacccaggagguguucgcccaggucaagcagaucuacaagacgcccccgaucaaggacuucggcggguucaacuucagccagauccugcccgaccccuccaagcccagcaagcgguccuucaucgaggaccuccuguucaacaaggugacccuggccgacgccggcuucaucaagcaguacggcgacugccucggggacaucgcggcccgcgaccugaucugcgcccagaaguucaacggccugaccgugcucccgccccugcugaccgacgagaugaucgcccaguacaccagcgcccuccuggcggggaccaucacguccggcuggaccuucggggccggcgccgcccugcagauccccuucgcgaugcagauggccuaccgguucaacggcaucggggucacccagaacgugcucuacgagaaccagaagcugaucgccaaccaguucaacagcgccaucggcaagauccaggacucccugagcuccaccgccagcgcgcucgggaagcugcaggacguggucaaccagaacgcccaggcccugaacacgcucgugaagcagcuguccagcaacuucggcgccaucuccagcgugcugaacgacauccucucccgccuggacccgcccgaggccgaggugcagaucgaccggcugaucaccgggcgccuccagagccugcagaccuacgugacccagcagcugauccgggcggccgagauccgcgccagcgccaaccucgccgcgaccaagauguccgagugcguccugggccagagcaagcggguggacuucugcggcaagggguaccaccugauguccuucccccagagcgccccgcacggcguggucuuccuccacgugacguacguccccgcccaggagaagaacuucaccaccgcccccgcgaucugccacgacgggaaggcccacuucccccgcgagggcguguucguguccaacgggacccacugguucgucacgcagcggaacuucuacgagccgcagaucaucaccaccgacaacaccuucgugagcggcaacugcgacguggucaucggcaucgugaacaacacgguguacgacccccugcagcccgagcuggacuccuucaaggaggagcucgacaaguacuucaagaaccacaccagccccgacgucgaccugggggacaucuccggcaucaacgccagcguggugaacauccagaaggagaucgaccgccugaacgaggucgccaagaaccucaacgagucccugaucgaccugcaggagcucgggaaguacgagcaguacaucaaguggccgugguacaucuggcugggcuucaucgccggccugaucgcgaucgugauggugaccaucaugcucugcugcaugaccagcugcugcuccugccugaaggggugcugcagcugcggcuccugcugcaaguucgacgaggacgacagcgagcccguccugaagggggugaagcuccacuacacgugaugacucgagcugguacugcaugcacgcaaugcuagcugccccuuucccguccuggguaccccgagucucccccgaccucgggucccagguaugcucccaccuccaccugccccacucaccaccucugcuaguuccagacaccucccaagcacgcagcaaugcagcucaaaacgcuuagccuagccacacccccacgggaaacagcagugauuaaccuuuagcaauaaacgaaaguuuaacuaagcuauacuaaccccaggguuggucaauuucgugccagccacacccuggagcuagcaaaaaaaaaaaaaaaaaaaaaaaaaaaaaagcauaugacuaaaaaaaaaaaaaaaaaaaaaaaaaaaaaaaaaaaaaaaaaaaaaaaaaaaaaaaaaaaaaaaaaaaaaa

SEQ ID NO: 26824 - RNA, 4283 nt, Artificial Sequence
  SARS-CoV-2/Wuhan/WIV05/2019__EPI_ISL_402128 spike protein mRNA gc (1-1273)(K986P_V987P_Y453F_D614G)
agaauaaacuaguauucuucugguccccacagacucagagagaacccgccaccauguucguguuccugguccuccugccccuggugagcucccagugcgugaaccucaccacccgcacgcagcugccgcccgccuacaccaacagcuucacccggggcgucuacuaccccgacaagguguuccgcuccagcgugcugcacuccacccaggaccucuuccugcccuucuucagcaacgucacgugguuccacgccauccacguguccgggaccaacggcaccaagcgguucgacaacccggugcugcccuucaacgacggggucuacuucgcgagcaccgagaaguccaacaucauccgcggcuggaucuucgggacgacccucgacagcaagacccagucccugcugaucgugaacaacgccaccaacguggucaucaaggugugcgaguuccaguucugcaacgaccccuuccucggcguguacuaccacaagaacaacaagagcuggauggaguccgaguuccgggucuacagcuccgccaacaacugcacguucgaguacgugagccagcccuuccugauggaccuggagggcaagcaggggaacuucaagaaccuccgcgaguucguguucaagaacaucgacggcuacuucaagaucuacuccaagcacaccccgaucaaccugguccgggaccugccccagggguucagcgcccucgagccccugguggaccugcccaucggcaucaacaucacccgcuuccagacccuccuggcccugcaccgguccuaccucacgccgggggacagcagcuccggcuggaccgcgggcgccgccgccuacuacgugggguaccugcagccccgcaccuuccugcucaaguacaacgagaacggcaccaucacggacgcggucgacugcgcccuggacccccugagcgagaccaagugcacccucaaguccuucaccguggagaaggggaucuaccagacgagcaacuuccgggugcagcccaccgaguccaucguccgcuucccgaacaucaccaaccugugccccuucggcgagguguucaacgccacccgguucgccagcgucuacgccuggaaccgcaagcggaucuccaacugcguggcggacuacagcgugcuguacaacuccgccagcuucuccacguucaagugcuacggcgucagccccaccaagcucaacgaccugugcuucaccaacguguacgccgacuccuucgugauccgcggggacgagguccggcagaucgcccccggccagaccgggaagaucgccgacuacaacuacaagcugccggacgacuucacgggcugcgugaucgcguggaacagcaacaaccucgacuccaaggucgggggcaacuacaacuaccuguuccgccuguuccgcaagagcaaccucaagcccuucgagcgggacaucuccaccgagaucuaccaggccggcagcacccccugcaacgggguggagggcuucaacugcuacuucccccugcaguccuacggguuccagccgaccaacggcgugggguaccagcccuaccggguggucgugcugagcuucgagcuccugcacgcccccgccacggugugcggccccaagaaguccaccaaccuggucaagaacaagugcgugaacuucaacuucaacggccucaccgggaccggcgugcugaccgagagcaacaagaaguuccugccguuccagcaguucgggcgcgacaucgccgacacgaccgacgcgguccgcgacccccagacccuggagauccucgacaucacccccugcagcuucggcgggguguccgugaucacgccgggcaccaacaccagcaaccaggucgccgugcuguaccagggcgugaacugcaccgagguccccguggccauccacgccgaccagcugacgcccaccuggcggguguacuccaccggcagcaacgucuuccagacccgcgccgggugccucaucggcgcggagcacgugaacaacuccuacgagugcgacauccccaucggggccggcaucugcgccagcuaccagacgcagaccaacuccccgcggcgcgcccggagcguggcgucccagagcaucaucgccuacaccaugucccugggcgccgagaacagcgucgccuacuccaacaacagcaucgccauccccaccaacuucacgaucuccgugaccaccgagauccugcccgugagcaugaccaagacgagcgucgacugcaccauguacaucugcggggacuccaccgagugcagcaaccuccugcugcaguacggcuccuucugcacccagcucaaccgcgcgcugacggggaucgccguggagcaggacaagaacacccaggagguguucgcccaggucaagcagaucuacaagacgcccccgaucaaggacuucggcggguucaacuucagccagauccugcccgaccccuccaagcccagcaagcgguccuucaucgaggaccuccuguucaacaaggugacccuggccgacgccggcuucaucaagcaguacggcgacugccucggggacaucgcggcccgcgaccugaucugcgcccagaaguucaacggccugaccgugcucccgccccugcugaccgacgagaugaucgcccaguacaccagcgcccuccuggcggggaccaucacguccggcuggaccuucggggccggcgccgcccugcagauccccuucgcgaugcagauggccuaccgguucaacggcaucggggucacccagaacgugcucuacgagaaccagaagcugaucgccaaccaguucaacagcgccaucggcaagauccaggacucccugagcuccaccgccagcgcgcucgggaagcugcaggacguggucaaccagaacgcccaggcccugaacacgcucgugaagcagcuguccagcaacuucggcgccaucuccagcgugcugaacgacauccucucccgccuggacccgcccgaggccgaggugcagaucgaccggcugaucaccgggcgccuccagagccugcagaccuacgugacccagcagcugauccgggcggccgagauccgcgccagcgccaaccucgccgcgaccaagauguccgagugcguccugggccagagcaagcggguggacuucugcggcaagggguaccaccugauguccuucccccagagcgccccgcacggcguggucuuccuccacgugacguacguccccgcccaggagaagaacuucaccaccgcccccgcgaucugccacgacgggaaggcccacuucccccgcgagggcguguucguguccaacgggacccacugguucgucacgcagcggaacuucuacgagccgcagaucaucaccaccgacaacaccuucgugagcggcaacugcgacguggucaucggcaucgugaacaacacgguguacgacccccugcagcccgagcuggacuccuucaaggaggagcucgacaaguacuucaagaaccacaccagccccgacgucgaccugggggacaucuccggcaucaacgccagcguggugaacauccagaaggagaucgaccgccugaacgaggucgccaagaaccucaacgagucccugaucgaccugcaggagcucgggaaguacgagcaguacaucaaguggccgugguacaucuggcugggcuucaucgccggccugaucgcgaucgugauggugaccaucaugcucugcugcaugaccagcugcugcuccugccugaaggggugcugcagcugcggcuccugcugcaaguucgacgaggacgacagcgagcccguccugaagggggugaagcuccacuacacgugaugacucgagcugguacugcaugcacgcaaugcuagcugccccuuucccguccuggguaccccgagucucccccgaccucgggucccagguaugcucccaccuccaccugccccacucaccaccucugcuaguuccagacaccucccaagcacgcagcaaugcagcucaaaacgcuuagccuagccacacccccacgggaaacagcagugauuaaccuuuagcaauaaacgaaaguuuaacuaagcuauacuaaccccaggguuggucaauuucgugccagccacacccuggagcuagcaaaaaaaaaaaaaaaaaaaaaaaaaaaaaagcauaugacuaaaaaaaaaaaaaaaaaaaaaaaaaaaaaaaaaaaaaaaaaaaaaaaaaaaaaaaaaaaaaaaaaaaaaa

SEQ ID NO: 26825 - RNA, 4283 nt, Artificial Sequence
  SARS-CoV-2/Wuhan/WIV05/2019__EPI_ISL_402128 spike protein mRNA gc (1-1273)(K986P_V987P_D614G_I692V)
agaauaaacuaguauucuucugguccccacagacucagagagaacccgccaccauguucguguuccugguccuccugccccuggugagcucccagugcgugaaccucaccacccgcacgcagcugccgcccgccuacaccaacagcuucacccggggcgucuacuaccccgacaagguguuccgcuccagcgugcugcacuccacccaggaccucuuccugcccuucuucagcaacgucacgugguuccacgccauccacguguccgggaccaacggcaccaagcgguucgacaacccggugcugcccuucaacgacggggucuacuucgcgagcaccgagaaguccaacaucauccgcggcuggaucuucgggacgacccucgacagcaagacccagucccugcugaucgugaacaacgccaccaacguggucaucaaggugugcgaguuccaguucugcaacgaccccuuccucggcguguacuaccacaagaacaacaagagcuggauggaguccgaguuccgggucuacagcuccgccaacaacugcacguucgaguacgugagccagcccuuccugauggaccuggagggcaagcaggggaacuucaagaaccuccgcgaguucguguucaagaacaucgacggcuacuucaagaucuacuccaagcacaccccgaucaaccugguccgggaccugccccagggguucagcgcccucgagccccugguggaccugcccaucggcaucaacaucacccgcuuccagacccuccuggcccugcaccgguccuaccucacgccgggggacagcagcuccggcuggaccgcgggcgccgccgccuacuacgugggguaccugcagccccgcaccuuccugcucaaguacaacgagaacggcaccaucacggacgcggucgacugcgcccuggacccccugagcgagaccaagugcacccucaaguccuucaccguggagaaggggaucuaccagacgagcaacuuccgggugcagcccaccgaguccaucguccgcuucccgaacaucaccaaccugugccccuucggcgagguguucaacgccacccgguucgccagcgucuacgccuggaaccgcaagcggaucuccaacugcguggcggacuacagcgugcuguacaacuccgccagcuucuccacguucaagugcuacggcgucagccccaccaagcucaacgaccugugcuucaccaacguguacgccgacuccuucgugauccgcggggacgagguccggcagaucgcccccggccagaccgggaagaucgccgacuacaacuacaagcugccggacgacuucacgggcugcgugaucgcguggaacagcaacaaccucgacuccaaggucgggggcaacuacaacuaccuguaccgccuguuccgcaagagcaaccucaagcccuucgagcgggacaucuccaccgagaucuaccaggccggcagcacccccugcaacgggguggagggcuucaacugcuacuucccccugcaguccuacggguuccagccgaccaacggcgugggguaccagcccuaccggguggucgugcugagcuucgagcuccugcacgcccccgccacggugugcggccccaagaaguccaccaaccuggucaagaacaagugcgugaacuucaacuucaacggccucaccgggaccggcgugcugaccgagagcaacaagaaguuccugccguuccagcaguucgggcgcgacaucgccgacacgaccgacgcgguccgcgacccccagacccuggagauccucgacaucacccccugcagcuucggcgggguguccgugaucacgccgggcaccaacaccagcaaccaggucgccgugcuguaccagggcgugaacugcaccgagguccccguggccauccacgccgaccagcugacgcccaccuggcggguguacuccaccggcagcaacgucuuccagacccgcgccgggugccucaucggcgcggagcacgugaacaacuccuacgagugcgacauccccaucggggccggcaucugcgccagcuaccagacgcagaccaacuccccgcggcgcgcccggagcguggcgucccagagcgucaucgccuacaccaugucccugggcgccgagaacagcgucgccuacuccaacaacagcaucgccauccccaccaacuucacgaucuccgugaccaccgagauccugcccgugagcaugaccaagacgagcgucgacugcaccauguacaucugcggggacuccaccgagugcagcaaccuccugcugcaguacggcuccuucugcacccagcucaaccgcgcgcugacggggaucgccguggagcaggacaagaacacccaggagguguucgcccaggucaagcagaucuacaagacgcccccgaucaaggacuucggcggguucaacuucagccagauccugcccgaccccuccaagcccagcaagcgguccuucaucgaggaccuccuguucaacaaggugacccuggccgacgccggcuucaucaagcaguacggcgacugccucggggacaucgcggcccgcgaccugaucugcgcccagaaguucaacggccugaccgugcucccgccccugcugaccgacgagaugaucgcccaguacaccagcgcccuccuggcggggaccaucacguccggcuggaccuucggggccggcgccgcccugcagauccccuucgcgaugcagauggccuaccgguucaacggcaucggggucacccagaacgugcucuacgagaaccagaagcugaucgccaaccaguucaacagcgccaucggcaagauccaggacucccugagcuccaccgccagcgcgcucgggaagcugcaggacguggucaaccagaacgcccaggcccugaacacgcucgugaagcagcuguccagcaacuucggcgccaucuccagcgugcugaacgacauccucucccgccuggacccgcccgaggccgaggugcagaucgaccggcugaucaccgggcgccuccagagccugcagaccuacgugacccagcagcugauccgggcggccgagauccgcgccagcgccaaccucgccgcgaccaagauguccgagugcguccugggccagagcaagcggguggacuucugcggcaagggguaccaccugauguccuucccccagagcgccccgcacggcguggucuuccuccacgugacguacguccccgcccaggagaagaacuucaccaccgcccccgcgaucugccacgacgggaaggcccacuucccccgcgagggcguguucguguccaacgggacccacugguucgucacgcagcggaacuucuacgagccgcagaucaucaccaccgacaacaccuucgugagcggcaacugcgacguggucaucggcaucgugaacaacacgguguacgacccccugcagcccgagcuggacuccuucaaggaggagcucgacaaguacuucaagaaccacaccagccccgacgucgaccugggggacaucuccggcaucaacgccagcguggugaacauccagaaggagaucgaccgccugaacgaggucgccaagaaccucaacgagucccugaucgaccugcaggagcucgggaaguacgagcaguacaucaaguggccgugguacaucuggcugggcuucaucgccggccugaucgcgaucgugauggugaccaucaugcucugcugcaugaccagcugcugcuccugccugaaggggugcugcagcugcggcuccugcugcaaguucgacgaggacgacagcgagcccguccugaagggggugaagcuccacuacacgugaugacucgagcugguacugcaugcacgcaaugcuagcugccccuuucccguccuggguaccccgagucucccccgaccucgggucccagguaugcucccaccuccaccugccccacucaccaccucugcuaguuccagacaccucccaagcacgcagcaaugcagcucaaaacgcuuagccuagccacacccccacgggaaacagcagugauuaaccuuuagcaauaaacgaaaguuuaacuaagcuauacuaaccccaggguuggucaauuucgugccagccacacccuggagcuagcaaaaaaaaaaaaaaaaaaaaaaaaaaaaaagcauaugacuaaaaaaaaaaaaaaaaaaaaaaaaaaaaaaaaaaaaaaaaaaaaaaaaaaaaaaaaaaaaaaaaaaaaaa

SEQ ID NO: 26826 - RNA, 4283 nt, Artificial Sequence
  SARS-CoV-2/Wuhan/WIV05/2019__EPI_ISL_402128 spike protein mRNA gc (1-1273)(K986P_V987P_D614G_M1229I)
agaauaaacuaguauucuucugguccccacagacucagagagaacccgccaccauguucguguuccugguccuccugccccuggugagcucccagugcgugaaccucaccacccgcacgcagcugccgcccgccuacaccaacagcuucacccggggcgucuacuaccccgacaagguguuccgcuccagcgugcugcacuccacccaggaccucuuccugcccuucuucagcaacgucacgugguuccacgccauccacguguccgggaccaacggcaccaagcgguucgacaacccggugcugcccuucaacgacggggucuacuucgcgagcaccgagaaguccaacaucauccgcggcuggaucuucgggacgacccucgacagcaagacccagucccugcugaucgugaacaacgccaccaacguggucaucaaggugugcgaguuccaguucugcaacgaccccuuccucggcguguacuaccacaagaacaacaagagcuggauggaguccgaguuccgggucuacagcuccgccaacaacugcacguucgaguacgugagccagcccuuccugauggaccuggagggcaagcaggggaacuucaagaaccuccgcgaguucguguucaagaacaucgacggcuacuucaagaucuacuccaagcacaccccgaucaaccugguccgggaccugccccagggguucagcgcccucgagccccugguggaccugcccaucggcaucaacaucacccgcuuccagacccuccuggcccugcaccgguccuaccucacgccgggggacagcagcuccggcuggaccgcgggcgccgccgccuacuacgugggguaccugcagccccgcaccuuccugcucaaguacaacgagaacggcaccaucacggacgcggucgacugcgcccuggacccccugagcgagaccaagugcacccucaaguccuucaccguggagaaggggaucuaccagacgagcaacuuccgggugcagcccaccgaguccaucguccgcuucccgaacaucaccaaccugugccccuucggcgagguguucaacgccacccgguucgccagcgucuacgccuggaaccgcaagcggaucuccaacugcguggcggacuacagcgugcuguacaacuccgccagcuucuccacguucaagugcuacggcgucagccccaccaagcucaacgaccugugcuucaccaacguguacgccgacuccuucgugauccgcggggacgagguccggcagaucgcccccggccagaccgggaagaucgccgacuacaacuacaagcugccggacgacuucacgggcugcgugaucgcguggaacagcaacaaccucgacuccaaggucgggggcaacuacaacuaccuguaccgccuguuccgcaagagcaaccucaagcccuucgagcgggacaucuccaccgagaucuaccaggccggcagcacccccugcaacgggguggagggcuucaacugcuacuucccccugcaguccuacggguuccagccgaccaacggcgugggguaccagcccuaccggguggucgugcugagcuucgagcuccugcacgcccccgccacggugugcggccccaagaaguccaccaaccuggucaagaacaagugcgugaacuucaacuucaacggccucaccgggaccggcgugcugaccgagagcaacaagaaguuccugccguuccagcaguucgggcgcgacaucgccgacacgaccgacgcgguccgcgacccccagacccuggagauccucgacaucacccccugcagcuucggcgggguguccgugaucacgccgggcaccaacaccagcaaccaggucgccgugcuguaccagggcgugaacugcaccgagguccccguggccauccacgccgaccagcugacgcccaccuggcggguguacuccaccggcagcaacgucuuccagacccgcgccgggugccucaucggcgcggagcacgugaacaacuccuacgagugcgacauccccaucggggccggcaucugcgccagcuaccagacgcagaccaacuccccgcggcgcgcccggagcguggcgucccagagcaucaucgccuacaccaugucccugggcgccgagaacagcgucgccuacuccaacaacagcaucgccauccccaccaacuucacgaucuccgugaccaccgagauccugcccgugagcaugaccaagacgagcgucgacugcaccauguacaucugcggggacuccaccgagugcagcaaccuccugcugcaguacggcuccuucugcacccagcucaaccgcgcgcugacggggaucgccguggagcaggacaagaacacccaggagguguucgcccaggucaagcagaucuacaagacgcccccgaucaaggacuucggcggguucaacuucagccagauccugcccgaccccuccaagcccagcaagcgguccuucaucgaggaccuccuguucaacaaggugacccuggccgacgccggcuucaucaagcaguacggcgacugccucggggacaucgcggcccgcgaccugaucugcgcccagaaguucaacggccugaccgugcucccgccccugcugaccgacgagaugaucgcccaguacaccagcgcccuccuggcggggaccaucacguccggcuggaccuucggggccggcgccgcccugcagauccccuucgcgaugcagauggccuaccgguucaacggcaucggggucacccagaacgugcucuacgagaaccagaagcugaucgccaaccaguucaacagcgccaucggcaagauccaggacucccugagcuccaccgccagcgcgcucgggaagcugcaggacguggucaaccagaacgcccaggcccugaacacgcucgugaagcagcuguccagcaacuucggcgccaucuccagcgugcugaacgacauccucucccgccuggacccgcccgaggccgaggugcagaucgaccggcugaucaccgggcgccuccagagccugcagaccuacgugacccagcagcugauccgggcggccgagauccgcgccagcgccaaccucgccgcgaccaagauguccgagugcguccugggccagagcaagcggguggacuucugcggcaagggguaccaccugauguccuucccccagagcgccccgcacggcguggucuuccuccacgugacguacguccccgcccaggagaagaacuucaccaccgcccccgcgaucugccacgacgggaaggcccacuucccccgcgagggcguguucguguccaacgggacccacugguucgucacgcagcggaacuucuacgagccgcagaucaucaccaccgacaacaccuucgugagcggcaacugcgacguggucaucggcaucgugaacaacacgguguacgacccccugcagcccgagcuggacuccuucaaggaggagcucgacaaguacuucaagaaccacaccagccccgacgucgaccugggggacaucuccggcaucaacgccagcguggugaacauccagaaggagaucgaccgccugaacgaggucgccaagaaccucaacgagucccugaucgaccugcaggagcucgggaaguacgagcaguacaucaaguggccgugguacaucuggcugggcuucaucgccggccugaucgcgaucgugaucgugaccaucaugcucugcugcaugaccagcugcugcuccugccugaaggggugcugcagcugcggcuccugcugcaaguucgacgaggacgacagcgagcccguccugaagggggugaagcuccacuacacgugaugacucgagcugguacugcaugcacgcaaugcuagcugccccuuucccguccuggguaccccgagucucccccgaccucgggucccagguaugcucccaccuccaccugccccacucaccaccucugcuaguuccagacaccucccaagcacgcagcaaugcagcucaaaacgcuuagccuagccacacccccacgggaaacagcagugauuaaccuuuagcaauaaacgaaaguuuaacuaagcuauacuaaccccaggguuggucaauuucgugccagccacacccuggagcuagcaaaaaaaaaaaaaaaaaaaaaaaaaaaaaagcauaugacuaaaaaaaaaaaaaaaaaaaaaaaaaaaaaaaaaaaaaaaaaaaaaaaaaaaaaaaaaaaaaaaaaaaaaa

SEQ ID NO: 26827 - RNA, 4277 nt, Artificial Sequence
  SARS-CoV-2/Wuhan/WIV05/2019__EPI_ISL_402128 spike protein mRNA gc (1-1273)(K986P_V987P_H69del_V70del_A222V_Y453F_S477N_D614G_I692V)
agaauaaacuaguauucuucugguccccacagacucagagagaacccgccaccauguucguguuccugguccuccugccccuggugagcucccagugcgugaaccucaccacccgcacgcagcugccgcccgccuacaccaacagcuucacccggggcgucuacuaccccgacaagguguuccgcuccagcgugcugcacuccacccaggaccucuuccugcccuucuucagcaacgucacgugguuccacgccaucuccgggaccaacggcaccaagcgguucgacaacccggugcugcccuucaacgacggggucuacuucgcgagcaccgagaaguccaacaucauccgcggcuggaucuucgggacgacccucgacagcaagacccagucccugcugaucgugaacaacgccaccaacguggucaucaaggugugcgaguuccaguucugcaacgaccccuuccucggcguguacuaccacaagaacaacaagagcuggauggaguccgaguuccgggucuacagcuccgccaacaacugcacguucgaguacgugagccagcccuuccugauggaccuggagggcaagcaggggaacuucaagaaccuccgcgaguucguguucaagaacaucgacggcuacuucaagaucuacuccaagcacaccccgaucaaccugguccgggaccugccccagggguucagcguccucgagccccugguggaccugcccaucggcaucaacaucacccgcuuccagacccuccuggcccugcaccgguccuaccucacgccgggggacagcagcuccggcuggaccgcgggcgccgccgccuacuacgugggguaccugcagccccgcaccuuccugcucaaguacaacgagaacggcaccaucacggacgcggucgacugcgcccuggacccccugagcgagaccaagugcacccucaaguccuucaccguggagaaggggaucuaccagacgagcaacuuccgggugcagcccaccgaguccaucguccgcuucccgaacaucaccaaccugugccccuucggcgagguguucaacgccacccgguucgccagcgucuacgccuggaaccgcaagcggaucuccaacugcguggcggacuacagcgugcuguacaacuccgccagcuucuccacguucaagugcuacggcgucagccccaccaagcucaacgaccugugcuucaccaacguguacgccgacuccuucgugauccgcggggacgagguccggcagaucgcccccggccagaccgggaagaucgccgacuacaacuacaagcugccggacgacuucacgggcugcgugaucgcguggaacagcaacaaccucgacuccaaggucgggggcaacuacaacuaccuguuccgccuguuccgcaagagcaaccucaagcccuucgagcgggacaucuccaccgagaucuaccaggccggcaacacccccugcaacgggguggagggcuucaacugcuacuucccccugcaguccuacggguuccagccgaccaacggcgugggguaccagcccuaccggguggucgugcugagcuucgagcuccugcacgcccccgccacggugugcggccccaagaaguccaccaaccuggucaagaacaagugcgugaacuucaacuucaacggccucaccgggaccggcgugcugaccgagagcaacaagaaguuccugccguuccagcaguucgggcgcgacaucgccgacacgaccgacgcgguccgcgacccccagacccuggagauccucgacaucacccccugcagcuucggcgggguguccgugaucacgccgggcaccaacaccagcaaccaggucgccgugcuguaccagggcgugaacugcaccgagguccccguggccauccacgccgaccagcugacgcccaccuggcggguguacuccaccggcagcaacgucuuccagacccgcgccgggugccucaucggcgcggagcacgugaacaacuccuacgagugcgacauccccaucggggccggcaucugcgccagcuaccagacgcagaccaacuccccgcggcgcgcccggagcguggcgucccagagcgucaucgccuacaccaugucccugggcgccgagaacagcgucgccuacuccaacaacagcaucgccauccccaccaacuucacgaucuccgugaccaccgagauccugcccgugagcaugaccaagacgagcgucgacugcaccauguacaucugcggggacuccaccgagugcagcaaccuccugcugcaguacggcuccuucugcacccagcucaaccgcgcgcugacggggaucgccguggagcaggacaagaacacccaggagguguucgcccaggucaagcagaucuacaagacgcccccgaucaaggacuucggcggguucaacuucagccagauccugcccgaccccuccaagcccagcaagcgguccuucaucgaggaccuccuguucaacaaggugacccuggccgacgccggcuucaucaagcaguacggcgacugccucggggacaucgcggcccgcgaccugaucugcgcccagaaguucaacggccugaccgugcucccgccccugcugaccgacgagaugaucgcccaguacaccagcgcccuccuggcggggaccaucacguccggcuggaccuucggggccggcgccgcccugcagauccccuucgcgaugcagauggccuaccgguucaacggcaucggggucacccagaacgugcucuacgagaaccagaagcugaucgccaaccaguucaacagcgccaucggcaagauccaggacucccugagcuccaccgccagcgcgcucgggaagcugcaggacguggucaaccagaacgcccaggcccugaacacgcucgugaagcagcuguccagcaacuucggcgccaucuccagcgugcugaacgacauccucucccgccuggacccgcccgaggccgaggugcagaucgaccggcugaucaccgggcgccuccagagccugcagaccuacgugacccagcagcugauccgggcggccgagauccgcgccagcgccaaccucgccgcgaccaagauguccgagugcguccugggccagagcaagcggguggacuucugcggcaagggguaccaccugauguccuucccccagagcgccccgcacggcguggucuuccuccacgugacguacguccccgcccaggagaagaacuucaccaccgcccccgcgaucugccacgacgggaaggcccacuucccccgcgagggcguguucguguccaacgggacccacugguucgucacgcagcggaacuucuacgagccgcagaucaucaccaccgacaacaccuucgugagcggcaacugcgacguggucaucggcaucgugaacaacacgguguacgacccccugcagcccgagcuggacuccuucaaggaggagcucgacaaguacuucaagaaccacaccagccccgacgucgaccugggggacaucuccggcaucaacgccagcguggugaacauccagaaggagaucgaccgccugaacgaggucgccaagaaccucaacgagucccugaucgaccugcaggagcucgggaaguacgagcaguacaucaaguggccgugguacaucuggcugggcuucaucgccggccugaucgcgaucgugauggugaccaucaugcucugcugcaugaccagcugcugcuccugccugaaggggugcugcagcugcggcuccugcugcaaguucgacgaggacgacagcgagcccguccugaagggggugaagcuccacuacacgugaugacucgagcugguacugcaugcacgcaaugcuagcugccccuuucccguccuggguaccccgagucucccccgaccucgggucccagguaugcucccaccuccaccugccccacucaccaccucugcuaguuccagacaccucccaagcacgcagcaaugcagcucaaaacgcuuagccuagccacacccccacgggaaacagcagugauuaaccuuuagcaauaaacgaaaguuuaacuaagcuauacuaaccccaggguuggucaauuucgugccagccacacccuggagcuagcaaaaaaaaaaaaaaaaaaaaaaaaaaaaaagcauaugacuaaaaaaaaaaaaaaaaaaaaaaaaaaaaaaaaaaaaaaaaaaaaaaaaaaaaaaaaaaaaaaaaaaaaaa

SEQ ID NO: 26828 - RNA, 4277 nt, Artificial Sequence
  SARS-CoV-2/Wuhan/WIV05/2019__EPI_ISL_402128 spike protein mRNA gc (1-1273)(K986P_V987P_H69del_V70del_Y453F_D614G_I692V_M1229I)
agaauaaacuaguauucuucugguccccacagacucagagagaacccgccaccauguucguguuccugguccuccugccccuggugagcucccagugcgugaaccucaccacccgcacgcagcugccgcccgccuacaccaacagcuucacccggggcgucuacuaccccgacaagguguuccgcuccagcgugcugcacuccacccaggaccucuuccugcccuucuucagcaacgucacgugguuccacgccaucuccgggaccaacggcaccaagcgguucgacaacccggugcugcccuucaacgacggggucuacuucgcgagcaccgagaaguccaacaucauccgcggcuggaucuucgggacgacccucgacagcaagacccagucccugcugaucgugaacaacgccaccaacguggucaucaaggugugcgaguuccaguucugcaacgaccccuuccucggcguguacuaccacaagaacaacaagagcuggauggaguccgaguuccgggucuacagcuccgccaacaacugcacguucgaguacgugagccagcccuuccugauggaccuggagggcaagcaggggaacuucaagaaccuccgcgaguucguguucaagaacaucgacggcuacuucaagaucuacuccaagcacaccccgaucaaccugguccgggaccugccccagggguucagcgcccucgagccccugguggaccugcccaucggcaucaacaucacccgcuuccagacccuccuggcccugcaccgguccuaccucacgccgggggacagcagcuccggcuggaccgcgggcgccgccgccuacuacgugggguaccugcagccccgcaccuuccugcucaaguacaacgagaacggcaccaucacggacgcggucgacugcgcccuggacccccugagcgagaccaagugcacccucaaguccuucaccguggagaaggggaucuaccagacgagcaacuuccgggugcagcccaccgaguccaucguccgcuucccgaacaucaccaaccugugccccuucggcgagguguucaacgccacccgguucgccagcgucuacgccuggaaccgcaagcggaucuccaacugcguggcggacuacagcgugcuguacaacuccgccagcuucuccacguucaagugcuacggcgucagccccaccaagcucaacgaccugugcuucaccaacguguacgccgacuccuucgugauccgcggggacgagguccggcagaucgcccccggccagaccgggaagaucgccgacuacaacuacaagcugccggacgacuucacgggcugcgugaucgcguggaacagcaacaaccucgacuccaaggucgggggcaacuacaacuaccuguuccgccuguuccgcaagagcaaccucaagcccuucgagcgggacaucuccaccgagaucuaccaggccggcagcacccccugcaacgggguggagggcuucaacugcuacuucccccugcaguccuacggguuccagccgaccaacggcgugggguaccagcccuaccggguggucgugcugagcuucgagcuccugcacgcccccgccacggugugcggccccaagaaguccaccaaccuggucaagaacaagugcgugaacuucaacuucaacggccucaccgggaccggcgugcugaccgagagcaacaagaaguuccugccguuccagcaguucgggcgcgacaucgccgacacgaccgacgcgguccgcgacccccagacccuggagauccucgacaucacccccugcagcuucggcgggguguccgugaucacgccgggcaccaacaccagcaaccaggucgccgugcuguaccagggcgugaacugcaccgagguccccguggccauccacgccgaccagcugacgcccaccuggcggguguacuccaccggcagcaacgucuuccagacccgcgccgggugccucaucggcgcggagcacgugaacaacuccuacgagugcgacauccccaucggggccggcaucugcgccagcuaccagacgcagaccaacuccccgcggcgcgcccggagcguggcgucccagagcgugaucgccuacaccaugucccugggcgccgagaacagcgucgccuacuccaacaacagcaucgccauccccaccaacuucacgaucuccgugaccaccgagauccugcccgugagcaugaccaagacgagcgucgacugcaccauguacaucugcggggacuccaccgagugcagcaaccuccugcugcaguacggcuccuucugcacccagcucaaccgcgcgcugacggggaucgccguggagcaggacaagaacacccaggagguguucgcccaggucaagcagaucuacaagacgcccccgaucaaggacuucggcggguucaacuucagccagauccugcccgaccccuccaagcccagcaagcgguccuucaucgaggaccuccuguucaacaaggugacccuggccgacgccggcuucaucaagcaguacggcgacugccucggggacaucgcggcccgcgaccugaucugcgcccagaaguucaacggccugaccgugcucccgccccugcugaccgacgagaugaucgcccaguacaccagcgcccuccuggcggggaccaucacguccggcuggaccuucggggccggcgccgcccugcagauccccuucgcgaugcagauggccuaccgguucaacggcaucggggucacccagaacgugcucuacgagaaccagaagcugaucgccaaccaguucaacagcgccaucggcaagauccaggacucccugagcuccaccgccagcgcgcucgggaagcugcaggacguggucaaccagaacgcccaggcccugaacacgcucgugaagcagcuguccagcaacuucggcgccaucuccagcgugcugaacgacauccucucccgccuggacccgcccgaggccgaggugcagaucgaccggcugaucaccgggcgccuccagagccugcagaccuacgugacccagcagcugauccgggcggccgagauccgcgccagcgccaaccucgccgcgaccaagauguccgagugcguccugggccagagcaagcggguggacuucugcggcaagggguaccaccugauguccuucccccagagcgccccgcacggcguggucuuccuccacgugacguacguccccgcccaggagaagaacuucaccaccgcccccgcgaucugccacgacgggaaggcccacuucccccgcgagggcguguucguguccaacgggacccacugguucgucacgcagcggaacuucuacgagccgcagaucaucaccaccgacaacaccuucgugagcggcaacugcgacguggucaucggcaucgugaacaacacgguguacgacccccugcagcccgagcuggacuccuucaaggaggagcucgacaaguacuucaagaaccacaccagccccgacgucgaccugggggacaucuccggcaucaacgccagcguggugaacauccagaaggagaucgaccgccugaacgaggucgccaagaaccucaacgagucccugaucgaccugcaggagcucgggaaguacgagcaguacaucaaguggccgugguacaucuggcugggcuucaucgccggccugaucgcgaucgugaucgugaccaucaugcucugcugcaugaccagcugcugcuccugccugaaggggugcugcagcugcggcuccugcugcaaguucgacgaggacgacagcgagcccguccugaagggggugaagcuccacuacacgugaugacucgagcugguacugcaugcacgcaaugcuagcugccccuuucccguccuggguaccccgagucucccccgaccucgggucccagguaugcucccaccuccaccugccccacucaccaccucugcuaguuccagacaccucccaagcacgcagcaaugcagcucaaaacgcuuagccuagccacacccccacgggaaacagcagugauuaaccuuuagcaauaaacgaaaguuuaacuaagcuauacuaaccccaggguuggucaauuucgugccagccacacccuggagcuagcaaaaaaaaaaaaaaaaaaaaaaaaaaaaaagcauaugacuaaaaaaaaaaaaaaaaaaaaaaaaaaaaaaaaaaaaaaaaaaaaaaaaaaaaaaaaaaaaaaaaaaaaaa

SEQ ID NO: 26829 - RNA, 4274 nt, Artificial Sequence
  SARS-CoV-2/Wuhan/WIV05/2019__EPI_ISL_402128 spike protein mRNA gc (1-1273)(K986P_V987P_K986P_V987P_H69del_V70del_Y144del_N501Y_A570 D_D614G_P681H_T716I_S982A_D1118H)
agaauaaacuaguauucuucugguccccacagacucagagagaacccgccaccauguucguguuccugguccuccugccccuggugagcucccagugcgugaaccucaccacccgcacgcagcugccgcccgccuacaccaacagcuucacccggggcgucuacuaccccgacaagguguuccgcuccagcgugcugcacuccacccaggaccucuuccugcccuucuucagcaacgucacgugguuccacgccaucuccgggaccaacggcaccaagcgguucgacaacccggugcugcccuucaacgacggggucuacuucgcgagcaccgagaaguccaacaucauccgcggcuggaucuucgggacgacccucgacagcaagacccagucccugcugaucgugaacaacgccaccaacguggucaucaaggugugcgaguuccaguucugcaacgaccccuuccucggcguguaccacaagaacaacaagagcuggauggaguccgaguuccgggucuacagcuccgccaacaacugcacguucgaguacgugagccagcccuuccugauggaccuggagggcaagcaggggaacuucaagaaccuccgcgaguucguguucaagaacaucgacggcuacuucaagaucuacuccaagcacaccccgaucaaccugguccgggaccugccccagggguucagcgcccucgagccccugguggaccugcccaucggcaucaacaucacccgcuuccagacccuccuggcccugcaccgguccuaccucacgccgggggacagcagcuccggcuggaccgcgggcgccgccgccuacuacgugggguaccugcagccccgcaccuuccugcucaaguacaacgagaacggcaccaucacggacgcggucgacugcgcccuggacccccugagcgagaccaagugcacccucaaguccuucaccguggagaaggggaucuaccagacgagcaacuuccgggugcagcccaccgaguccaucguccgcuucccgaacaucaccaaccugugccccuucggcgagguguucaacgccacccgguucgccagcgucuacgccuggaaccgcaagcggaucuccaacugcguggcggacuacagcgugcuguacaacuccgccagcuucuccacguucaagugcuacggcgucagccccaccaagcucaacgaccugugcuucaccaacguguacgccgacuccuucgugauccgcggggacgagguccggcagaucgcccccggccagaccgggaagaucgccgacuacaacuacaagcugccggacgacuucacgggcugcgugaucgcguggaacagcaacaaccucgacuccaaggucgggggcaacuacaacuaccuguaccgccuguuccgcaagagcaaccucaagcccuucgagcgggacaucuccaccgagaucuaccaggccggcagcacccccugcaacgggguggagggcuucaacugcuacuucccccugcaguccuacggguuccagccgaccuacggcgugggguaccagcccuaccggguggucgugcugagcuucgagcuccugcacgcccccgccacggugugcggccccaagaaguccaccaaccuggucaagaacaagugcgugaacuucaacuucaacggccucaccgggaccggcgugcugaccgagagcaacaagaaguuccugccguuccagcaguucgggcgcgacaucgacgacacgaccgacgcgguccgcgacccccagacccuggagauccucgacaucacccccugcagcuucggcgggguguccgugaucacgccgggcaccaacaccagcaaccaggucgccgugcuguaccagggcgugaacugcaccgagguccccguggccauccacgccgaccagcugacgcccaccuggcggguguacuccaccggcagcaacgucuuccagacccgcgccgggugccucaucggcgcggagcacgugaacaacuccuacgagugcgacauccccaucggggccggcaucugcgccagcuaccagacgcagaccaacucccaccggcgcgcccggagcguggcgucccagagcaucaucgccuacaccaugucccugggcgccgagaacagcgucgccuacuccaacaacagcaucgccauccccaucaacuucacgaucuccgugaccaccgagauccugcccgugagcaugaccaagacgagcgucgacugcaccauguacaucugcggggacuccaccgagugcagcaaccuccugcugcaguacggcuccuucugcacccagcucaaccgcgcgcugacggggaucgccguggagcaggacaagaacacccaggagguguucgcccaggucaagcagaucuacaagacgcccccgaucaaggacuucggcggguucaacuucagccagauccugcccgaccccuccaagcccagcaagcgguccuucaucgaggaccuccuguucaacaaggugacccuggccgacgccggcuucaucaagcaguacggcgacugccucggggacaucgcggcccgcgaccugaucugcgcccagaaguucaacggccugaccgugcucccgccccugcugaccgacgagaugaucgcccaguacaccagcgcccuccuggcggggaccaucacguccggcuggaccuucggggccggcgccgcccugcagauccccuucgcgaugcagauggccuaccgguucaacggcaucggggucacccagaacgugcucuacgagaaccagaagcugaucgccaaccaguucaacagcgccaucggcaagauccaggacucccugagcuccaccgccagcgcgcucgggaagcugcaggacguggucaaccagaacgcccaggcccugaacacgcucgugaagcagcuguccagcaacuucggcgccaucuccagcgugcugaacgacauccucgcccgccuggacccgcccgaggccgaggugcagaucgaccggcugaucaccgggcgccuccagagccugcagaccuacgugacccagcagcugauccgggcggccgagauccgcgccagcgccaaccucgccgcgaccaagauguccgagugcguccugggccagagcaagcggguggacuucugcggcaagggguaccaccugauguccuucccccagagcgccccgcacggcguggucuuccuccacgugacguacguccccgcccaggagaagaacuucaccaccgcccccgcgaucugccacgacgggaaggcccacuucccccgcgagggcguguucguguccaacgggacccacugguucgucacgcagcggaacuucuacgagccgcagaucaucaccacccacaacaccuucgugagcggcaacugcgacguggucaucggcaucgugaacaacacgguguacgacccccugcagcccgagcuggacuccuucaaggaggagcucgacaaguacuucaagaaccacaccagccccgacgucgaccugggggacaucuccggcaucaacgccagcguggugaacauccagaaggagaucgaccgccugaacgaggucgccaagaaccucaacgagucccugaucgaccugcaggagcucgggaaguacgagcaguacaucaaguggccgugguacaucuggcugggcuucaucgccggccugaucgcgaucgugauggugaccaucaugcucugcugcaugaccagcugcugcuccugccugaaggggugcugcagcugcggcuccugcugcaaguucgacgaggacgacagcgagcccguccugaagggggugaagcuccacuacacgugaugacucgagcugguacugcaugcacgcaaugcuagcugccccuuucccguccuggguaccccgagucucccccgaccucgggucccagguaugcucccaccuccaccugccccacucaccaccucugcuaguuccagacaccucccaagcacgcagcaaugcagcucaaaacgcuuagccuagccacacccccacgggaaacagcagugauuaaccuuuagcaauaaacgaaaguuuaacuaagcuauacuaaccccaggguuggucaauuucgugccagccacacccuggagcuagcaaaaaaaaaaaaaaaaaaaaaaaaaaaaaagcauaugacuaaaaaaaaaaaaaaaaaaaaaaaaaaaaaaaaaaaaaaaaaaaaaaaaaaaaaaaaaaaaaaaaaaaaaa

SEQ ID NO: 26830 - RNA, 4283 nt, Artificial Sequence
  SARS-CoV-2/Wuhan/WIV05/2019__EPI_ISL_402128 spike protein mRNA gc (1-1273)(K986P_V987P_K986P_V987P_K417N_E484K_N501Y_D614G)
agaauaaacuaguauucuucugguccccacagacucagagagaacccgccaccauguucguguuccugguccuccugccccuggugagcucccagugcgugaaccucaccacccgcacgcagcugccgcccgccuacaccaacagcuucacccggggcgucuacuaccccgacaagguguuccgcuccagcgugcugcacuccacccaggaccucuuccugcccuucuucagcaacgucacgugguuccacgccauccacguguccgggaccaacggcaccaagcgguucgacaacccggugcugcccuucaacgacggggucuacuucgcgagcaccgagaaguccaacaucauccgcggcuggaucuucgggacgacccucgacagcaagacccagucccugcugaucgugaacaacgccaccaacguggucaucaaggugugcgaguuccaguucugcaacgaccccuuccucggcguguacuaccacaagaacaacaagagcuggauggaguccgaguuccgggucuacagcuccgccaacaacugcacguucgaguacgugagccagcccuuccugauggaccuggagggcaagcaggggaacuucaagaaccuccgcgaguucguguucaagaacaucgacggcuacuucaagaucuacuccaagcacaccccgaucaaccugguccgggaccugccccagggguucagcgcccucgagccccugguggaccugcccaucggcaucaacaucacccgcuuccagacccuccuggcccugcaccgguccuaccucacgccgggggacagcagcuccggcuggaccgcgggcgccgccgccuacuacgugggguaccugcagccccgcaccuuccugcucaaguacaacgagaacggcaccaucacggacgcggucgacugcgcccuggacccccugagcgagaccaagugcacccucaaguccuucaccguggagaaggggaucuaccagacgagcaacuuccgggugcagcccaccgaguccaucguccgcuucccgaacaucaccaaccugugccccuucggcgagguguucaacgccacccgguucgccagcgucuacgccuggaaccgcaagcggaucuccaacugcguggcggacuacagcgugcuguacaacuccgccagcuucuccacguucaagugcuacggcgucagccccaccaagcucaacgaccugugcuucaccaacguguacgccgacuccuucgugauccgcggggacgagguccggcagaucgcccccggccagaccgggaacaucgccgacuacaacuacaagcugccggacgacuucacgggcugcgugaucgcguggaacagcaacaaccucgacuccaaggucgggggcaacuacaacuaccuguaccgccuguuccgcaagagcaaccucaagcccuucgagcgggacaucuccaccgagaucuaccaggccggcagcacccccugcaacggggugaagggcuucaacugcuacuucccccugcaguccuacggguuccagccgaccuacggcgugggguaccagcccuaccggguggucgugcugagcuucgagcuccugcacgcccccgccacggugugcggccccaagaaguccaccaaccuggucaagaacaagugcgugaacuucaacuucaacggccucaccgggaccggcgugcugaccgagagcaacaagaaguuccugccguuccagcaguucgggcgcgacaucgccgacacgaccgacgcgguccgcgacccccagacccuggagauccucgacaucacccccugcagcuucggcgggguguccgugaucacgccgggcaccaacaccagcaaccaggucgccgugcuguaccagggcgugaacugcaccgagguccccguggccauccacgccgaccagcugacgcccaccuggcggguguacuccaccggcagcaacgucuuccagacccgcgccgggugccucaucggcgcggagcacgugaacaacuccuacgagugcgacauccccaucggggccggcaucugcgccagcuaccagacgcagaccaacuccccgcggcgcgcccggagcguggcgucccagagcaucaucgccuacaccaugucccugggcgccgagaacagcgucgccuacuccaacaacagcaucgccauccccaccaacuucacgaucuccgugaccaccgagauccugcccgugagcaugaccaagacgagcgucgacugcaccauguacaucugcggggacuccaccgagugcagcaaccuccugcugcaguacggcuccuucugcacccagcucaaccgcgcgcugacggggaucgccguggagcaggacaagaacacccaggagguguucgcccaggucaagcagaucuacaagacgcccccgaucaaggacuucggcggguucaacuucagccagauccugcccgaccccuccaagcccagcaagcgguccuucaucgaggaccuccuguucaacaaggugacccuggccgacgccggcuucaucaagcaguacggcgacugccucggggacaucgcggcccgcgaccugaucugcgcccagaaguucaacggccugaccgugcucccgccccugcugaccgacgagaugaucgcccaguacaccagcgcccuccuggcggggaccaucacguccggcuggaccuucggggccggcgccgcccugcagauccccuucgcgaugcagauggccuaccgguucaacggcaucggggucacccagaacgugcucuacgagaaccagaagcugaucgccaaccaguucaacagcgccaucggcaagauccaggacucccugagcuccaccgccagcgcgcucgggaagcugcaggacguggucaaccagaacgcccaggcccugaacacgcucgugaagcagcuguccagcaacuucggcgccaucuccagcgugcugaacgacauccucucccgccuggacccgcccgaggccgaggugcagaucgaccggcugaucaccgggcgccuccagagccugcagaccuacgugacccagcagcugauccgggcggccgagauccgcgccagcgccaaccucgccgcgaccaagauguccgagugcguccugggccagagcaagcggguggacuucugcggcaagggguaccaccugauguccuucccccagagcgccccgcacggcguggucuuccuccacgugacguacguccccgcccaggagaagaacuucaccaccgcccccgcgaucugccacgacgggaaggcccacuucccccgcgagggcguguucguguccaacgggacccacugguucgucacgcagcggaacuucuacgagccgcagaucaucaccaccgacaacaccuucgugagcggcaacugcgacguggucaucggcaucgugaacaacacgguguacgacccccugcagcccgagcuggacuccuucaaggaggagcucgacaaguacuucaagaaccacaccagccccgacgucgaccugggggacaucuccggcaucaacgccagcguggugaacauccagaaggagaucgaccgccugaacgaggucgccaagaaccucaacgagucccugaucgaccugcaggagcucgggaaguacgagcaguacaucaaguggccgugguacaucuggcugggcuucaucgccggccugaucgcgaucgugauggugaccaucaugcucugcugcaugaccagcugcugcuccugccugaaggggugcugcagcugcggcuccugcugcaaguucgacgaggacgacagcgagcccguccugaagggggugaagcuccacuacacgugaugacucgagcugguacugcaugcacgcaaugcuagcugccccuuucccguccuggguaccccgagucucccccgaccucgggucccagguaugcucccaccuccaccugccccacucaccaccucugcuaguuccagacaccucccaagcacgcagcaaugcagcucaaaacgcuuagccuagccacacccccacgggaaacagcagugauuaaccuuuagcaauaaacgaaaguuuaacuaagcuauacuaaccccaggguuggucaauuucgugccagccacacccuggagcuagcaaaaaaaaaaaaaaaaaaaaaaaaaaaaaagcauaugacuaaaaaaaaaaaaaaaaaaaaaaaaaaaaaaaaaaaaaaaaaaaaaaaaaaaaaaaaaaaaaaaaaaaaaa

SEQ ID NO: 26831 - RNA, 4274 nt, Artificial Sequence
  SARS-CoV-2/Wuhan/WIV05/2019__EPI_ISL_402128 spike protein mRNA gc (1-1273)(K986P_V987P_K986P_V987P_L18F_D80A_D215G_L242del_A243del_ L244del_R246I_K417N_E484K_N501Y_D614G_A701V)
agaauaaacuaguauucuucugguccccacagacucagagagaacccgccaccauguucguguuccugguccuccugccccuggugagcucccagugcgugaacuucaccacccgcacgcagcugccgcccgccuacaccaacagcuucacccggggcgucuacuaccccgacaagguguuccgcuccagcgugcugcacuccacccaggaccucuuccugcccuucuucagcaacgucacgugguuccacgccauccacguguccgggaccaacggcaccaagcgguucgccaacccggugcugcccuucaacgacggggucuacuucgcgagcaccgagaaguccaacaucauccgcggcuggaucuucgggacgacccucgacagcaagacccagucccugcugaucgugaacaacgccaccaacguggucaucaaggugugcgaguuccaguucugcaacgaccccuuccucggcguguacuaccacaagaacaacaagagcuggauggaguccgaguuccgggucuacagcuccgccaacaacugcacguucgaguacgugagccagcccuuccugauggaccuggagggcaagcaggggaacuucaagaaccuccgcgaguucguguucaagaacaucgacggcuacuucaagaucuacuccaagcacaccccgaucaaccugguccggggccugccccagggguucagcgcccucgagccccugguggaccugcccaucggcaucaacaucacccgcuuccagacccuccacaucuccuaccucacgccgggggacagcagcuccggcuggaccgcgggcgccgccgccuacuacgugggguaccugcagccccgcaccuuccugcucaaguacaacgagaacggcaccaucacggacgcggucgacugcgcccuggacccccugagcgagaccaagugcacccucaaguccuucaccguggagaaggggaucuaccagacgagcaacuuccgggugcagcccaccgaguccaucguccgcuucccgaacaucaccaaccugugccccuucggcgagguguucaacgccacccgguucgccagcgucuacgccuggaaccgcaagcggaucuccaacugcguggcggacuacagcgugcuguacaacuccgccagcuucuccacguucaagugcuacggcgucagccccaccaagcucaacgaccugugcuucaccaacguguacgccgacuccuucgugauccgcggggacgagguccggcagaucgcccccggccagaccgggaacaucgccgacuacaacuacaagcugccggacgacuucacgggcugcgugaucgcguggaacagcaacaaccucgacuccaaggucgggggcaacuacaacuaccuguaccgccuguuccgcaagagcaaccucaagcccuucgagcgggacaucuccaccgagaucuaccaggccggcagcacccccugcaacggggugaagggcuucaacugcuacuucccccugcaguccuacggguuccagccgaccuacggcgugggguaccagcccuaccggguggucgugcugagcuucgagcuccugcacgcccccgccacggugugcggccccaagaaguccaccaaccuggucaagaacaagugcgugaacuucaacuucaacggccucaccgggaccggcgugcugaccgagagcaacaagaaguuccugccguuccagcaguucgggcgcgacaucgccgacacgaccgacgcgguccgcgacccccagacccuggagauccucgacaucacccccugcagcuucggcgggguguccgugaucacgccgggcaccaacaccagcaaccaggucgccgugcuguaccagggcgugaacugcaccgagguccccguggccauccacgccgaccagcugacgcccaccuggcggguguacuccaccggcagcaacgucuuccagacccgcgccgggugccucaucggcgcggagcacgugaacaacuccuacgagugcgacauccccaucggggccggcaucugcgccagcuaccagacgcagaccaacuccccgcggcgcgcccggagcguggcgucccagagcaucaucgccuacaccaugucccugggcguggagaacagcgucgccuacuccaacaacagcaucgccauccccaccaacuucacgaucuccgugaccaccgagauccugcccgugagcaugaccaagacgagcgucgacugcaccauguacaucugcggggacuccaccgagugcagcaaccuccugcugcaguacggcuccuucugcacccagcucaaccgcgcgcugacggggaucgccguggagcaggacaagaacacccaggagguguucgcccaggucaagcagaucuacaagacgcccccgaucaaggacuucggcggguucaacuucagccagauccugcccgaccccuccaagcccagcaagcgguccuucaucgaggaccuccuguucaacaaggugacccuggccgacgccggcuucaucaagcaguacggcgacugccucggggacaucgcggcccgcgaccugaucugcgcccagaaguucaacggccugaccgugcucccgccccugcugaccgacgagaugaucgcccaguacaccagcgcccuccuggcggggaccaucacguccggcuggaccuucggggccggcgccgcccugcagauccccuucgcgaugcagauggccuaccgguucaacggcaucggggucacccagaacgugcucuacgagaaccagaagcugaucgccaaccaguucaacagcgccaucggcaagauccaggacucccugagcuccaccgccagcgcgcucgggaagcugcaggacguggucaaccagaacgcccaggcccugaacacgcucgugaagcagcuguccagcaacuucggcgccaucuccagcgugcugaacgacauccucucccgccuggacccgcccgaggccgaggugcagaucgaccggcugaucaccgggcgccuccagagccugcagaccuacgugacccagcagcugauccgggcggccgagauccgcgccagcgccaaccucgccgcgaccaagauguccgagugcguccugggccagagcaagcggguggacuucugcggcaagggguaccaccugauguccuucccccagagcgccccgcacggcguggucuuccuccacgugacguacguccccgcccaggagaagaacuucaccaccgcccccgcgaucugccacgacgggaaggcccacuucccccgcgagggcguguucguguccaacgggacccacugguucgucacgcagcggaacuucuacgagccgcagaucaucaccaccgacaacaccuucgugagcggcaacugcgacguggucaucggcaucgugaacaacacgguguacgacccccugcagcccgagcuggacuccuucaaggaggagcucgacaaguacuucaagaaccacaccagccccgacgucgaccugggggacaucuccggcaucaacgccagcguggugaacauccagaaggagaucgaccgccugaacgaggucgccaagaaccucaacgagucccugaucgaccugcaggagcucgggaaguacgagcaguacaucaaguggccgugguacaucuggcugggcuucaucgccggccugaucgcgaucgugauggugaccaucaugcucugcugcaugaccagcugcugcuccugccugaaggggugcugcagcugcggcuccugcugcaaguucgacgaggacgacagcgagcccguccugaagggggugaagcuccacuacacgugaugacucgagcugguacugcaugcacgcaaugcuagcugccccuuucccguccuggguaccccgagucucccccgaccucgggucccagguaugcucccaccuccaccugccccacucaccaccucugcuaguuccagacaccucccaagcacgcagcaaugcagcucaaaacgcuuagccuagccacacccccacgggaaacagcagugauuaaccuuuagcaauaaacgaaaguuuaacuaagcuauacuaaccccaggguuggucaauuucgugccagccacacccuggagcuagcaaaaaaaaaaaaaaaaaaaaaaaaaaaaaagcauaugacuaaaaaaaaaaaaaaaaaaaaaaaaaaaaaaaaaaaaaaaaaaaaaaaaaaaaaaaaaaaaaaaaaaaaaa

SEQ ID NO: 26832 - RNA, 4283 nt, Artificial Sequence
  SARS-CoV-2/Wuhan/WIV05/2019__EPI_ISL_402128 spike protein mRNA gc (1-1273)(K986P_V987P_K986P_V987P_E484K_D614G)
agaauaaacuaguauucuucugguccccacagacucagagagaacccgccaccauguucguguuccugguccuccugccccuggugagcucccagugcgugaaccucaccacccgcacgcagcugccgcccgccuacaccaacagcuucacccggggcgucuacuaccccgacaagguguuccgcuccagcgugcugcacuccacccaggaccucuuccugcccuucuucagcaacgucacgugguuccacgccauccacguguccgggaccaacggcaccaagcgguucgacaacccggugcugcccuucaacgacggggucuacuucgcgagcaccgagaaguccaacaucauccgcggcuggaucuucgggacgacccucgacagcaagacccagucccugcugaucgugaacaacgccaccaacguggucaucaaggugugcgaguuccaguucugcaacgaccccuuccucggcguguacuaccacaagaacaacaagagcuggauggaguccgaguuccgggucuacagcuccgccaacaacugcacguucgaguacgugagccagcccuuccugauggaccuggagggcaagcaggggaacuucaagaaccuccgcgaguucguguucaagaacaucgacggcuacuucaagaucuacuccaagcacaccccgaucaaccugguccgggaccugccccagggguucagcgcccucgagccccugguggaccugcccaucggcaucaacaucacccgcuuccagacccuccuggcccugcaccgguccuaccucacgccgggggacagcagcuccggcuggaccgcgggcgccgccgccuacuacgugggguaccugcagccccgcaccuuccugcucaaguacaacgagaacggcaccaucacggacgcggucgacugcgcccuggacccccugagcgagaccaagugcacccucaaguccuucaccguggagaaggggaucuaccagacgagcaacuuccgggugcagcccaccgaguccaucguccgcuucccgaacaucaccaaccugugccccuucggcgagguguucaacgccacccgguucgccagcgucuacgccuggaaccgcaagcggaucuccaacugcguggcggacuacagcgugcuguacaacuccgccagcuucuccacguucaagugcuacggcgucagccccaccaagcucaacgaccugugcuucaccaacguguacgccgacuccuucgugauccgcggggacgagguccggcagaucgcccccggccagaccgggaagaucgccgacuacaacuacaagcugccggacgacuucacgggcugcgugaucgcguggaacagcaacaaccucgacuccaaggucgggggcaacuacaacuaccuguaccgccuguuccgcaagagcaaccucaagcccuucgagcgggacaucuccaccgagaucuaccaggccggcagcacccccugcaacggggugaagggcuucaacugcuacuucccccugcaguccuacggguuccagccgaccaacggcgugggguaccagcccuaccggguggucgugcugagcuucgagcuccugcacgcccccgccacggugugcggccccaagaaguccaccaaccuggucaagaacaagugcgugaacuucaacuucaacggccucaccgggaccggcgugcugaccgagagcaacaagaaguuccugccguuccagcaguucgggcgcgacaucgccgacacgaccgacgcgguccgcgacccccagacccuggagauccucgacaucacccccugcagcuucggcgggguguccgugaucacgccgggcaccaacaccagcaaccaggucgccgugcuguaccagggcgugaacugcaccgagguccccguggccauccacgccgaccagcugacgcccaccuggcggguguacuccaccggcagcaacgucuuccagacccgcgccgggugccucaucggcgcggagcacgugaacaacuccuacgagugcgacauccccaucggggccggcaucugcgccagcuaccagacgcagaccaacuccccgcggcgcgcccggagcguggcgucccagagcaucaucgccuacaccaugucccugggcgccgagaacagcgucgccuacuccaacaacagcaucgccauccccaccaacuucacgaucuccgugaccaccgagauccugcccgugagcaugaccaagacgagcgucgacugcaccauguacaucugcggggacuccaccgagugcagcaaccuccugcugcaguacggcuccuucugcacccagcucaaccgcgcgcugacggggaucgccguggagcaggacaagaacacccaggagguguucgcccaggucaagcagaucuacaagacgcccccgaucaaggacuucggcggguucaacuucagccagauccugcccgaccccuccaagcccagcaagcgguccuucaucgaggaccuccuguucaacaaggugacccuggccgacgccggcuucaucaagcaguacggcgacugccucggggacaucgcggcccgcgaccugaucugcgcccagaaguucaacggccugaccgugcucccgccccugcugaccgacgagaugaucgcccaguacaccagcgcccuccuggcggggaccaucacguccggcuggaccuucggggccggcgccgcccugcagauccccuucgcgaugcagauggccuaccgguucaacggcaucggggucacccagaacgugcucuacgagaaccagaagcugaucgccaaccaguucaacagcgccaucggcaagauccaggacucccugagcuccaccgccagcgcgcucgggaagcugcaggacguggucaaccagaacgcccaggcccugaacacgcucgugaagcagcuguccagcaacuucggcgccaucuccagcgugcugaacgacauccucucccgccuggacccgcccgaggccgaggugcagaucgaccggcugaucaccgggcgccuccagagccugcagaccuacgugacccagcagcugauccgggcggccgagauccgcgccagcgccaaccucgccgcgaccaagauguccgagugcguccugggccagagcaagcggguggacuucugcggcaagggguaccaccugauguccuucccccagagcgccccgcacggcguggucuuccuccacgugacguacguccccgcccaggagaagaacuucaccaccgcccccgcgaucugccacgacgggaaggcccacuucccccgcgagggcguguucguguccaacgggacccacugguucgucacgcagcggaacuucuacgagccgcagaucaucaccaccgacaacaccuucgugagcggcaacugcgacguggucaucggcaucgugaacaacacgguguacgacccccugcagcccgagcuggacuccuucaaggaggagcucgacaaguacuucaagaaccacaccagccccgacgucgaccugggggacaucuccggcaucaacgccagcguggugaacauccagaaggagaucgaccgccugaacgaggucgccaagaaccucaacgagucccugaucgaccugcaggagcucgggaaguacgagcaguacaucaaguggccgugguacaucuggcugggcuucaucgccggccugaucgcgaucgugauggugaccaucaugcucugcugcaugaccagcugcugcuccugccugaaggggugcugcagcugcggcuccugcugcaaguucgacgaggacgacagcgagcccguccugaagggggugaagcuccacuacacgugaugacucgagcugguacugcaugcacgcaaugcuagcugccccuuucccguccuggguaccccgagucucccccgaccucgggucccagguaugcucccaccuccaccugccccacucaccaccucugcuaguuccagacaccucccaagcacgcagcaaugcagcucaaaacgcuuagccuagccacacccccacgggaaacagcagugauuaaccuuuagcaauaaacgaaaguuuaacuaagcuauacuaaccccaggguuggucaauuucgugccagccacacccuggagcuagcaaaaaaaaaaaaaaaaaaaaaaaaaaaaaagcauaugacuaaaaaaaaaaaaaaaaaaaaaaaaaaaaaaaaaaaaaaaaaaaaaaaaaaaaaaaaaaaaaaaaaaaaaa

SEQ ID NO: 26833 - RNA, 4283 nt, Artificial Sequence
  SARS-CoV-2/Wuhan/WIV05/2019__EPI_ISL_402128 spike protein mRNA gc (1-1273)(K986P_V987P_K986P_V987P_L18F_T20N_P26S_D138Y_R190S_K417T _E484K_N501Y_D614G_H655Y_T1027I)
agaauaaacuaguauucuucugguccccacagacucagagagaacccgccaccauguucguguuccugguccuccugccccuggugagcucccagugcgugaacuucaccaaccgcacgcagcugccgagcgccuacaccaacagcuucacccggggcgucuacuaccccgacaagguguuccgcuccagcgugcugcacuccacccaggaccucuuccugcccuucuucagcaacgucacgugguuccacgccauccacguguccgggaccaacggcaccaagcgguucgacaacccggugcugcccuucaacgacggggucuacuucgcgagcaccgagaaguccaacaucauccgcggcuggaucuucgggacgacccucgacagcaagacccagucccugcugaucgugaacaacgccaccaacguggucaucaaggugugcgaguuccaguucugcaacuaccccuuccucggcguguacuaccacaagaacaacaagagcuggauggaguccgaguuccgggucuacagcuccgccaacaacugcacguucgaguacgugagccagcccuuccugauggaccuggagggcaagcaggggaacuucaagaaccucagcgaguucguguucaagaacaucgacggcuacuucaagaucuacuccaagcacaccccgaucaaccugguccgggaccugccccagggguucagcgcccucgagccccugguggaccugcccaucggcaucaacaucacccgcuuccagacccuccuggcccugcaccgguccuaccucacgccgggggacagcagcuccggcuggaccgcgggcgccgccgccuacuacgugggguaccugcagccccgcaccuuccugcucaaguacaacgagaacggcaccaucacggacgcggucgacugcgcccuggacccccugagcgagaccaagugcacccucaaguccuucaccguggagaaggggaucuaccagacgagcaacuuccgggugcagcccaccgaguccaucguccgcuucccgaacaucaccaaccugugccccuucggcgagguguucaacgccacccgguucgccagcgucuacgccuggaaccgcaagcggaucuccaacugcguggcggacuacagcgugcuguacaacuccgccagcuucuccacguucaagugcuacggcgucagccccaccaagcucaacgaccugugcuucaccaacguguacgccgacuccuucgugauccgcggggacgagguccggcagaucgcccccggccagaccgggaccaucgccgacuacaacuacaagcugccggacgacuucacgggcugcgugaucgcguggaacagcaacaaccucgacuccaaggucgggggcaacuacaacuaccuguaccgccuguuccgcaagagcaaccucaagcccuucgagcgggacaucuccaccgagaucuaccaggccggcagcacccccugcaacggggugaagggcuucaacugcuacuucccccugcaguccuacggguuccagccgaccuacggcgugggguaccagcccuaccggguggucgugcugagcuucgagcuccugcacgcccccgccacggugugcggccccaagaaguccaccaaccuggucaagaacaagugcgugaacuucaacuucaacggccucaccgggaccggcgugcugaccgagagcaacaagaaguuccugccguuccagcaguucgggcgcgacaucgccgacacgaccgacgcgguccgcgacccccagacccuggagauccucgacaucacccccugcagcuucggcgggguguccgugaucacgccgggcaccaacaccagcaaccaggucgccgugcuguaccagggcgugaacugcaccgagguccccguggccauccacgccgaccagcugacgcccaccuggcggguguacuccaccggcagcaacgucuuccagacccgcgccgggugccucaucggcgcggaguacgugaacaacuccuacgagugcgacauccccaucggggccggcaucugcgccagcuaccagacgcagaccaacuccccgcggcgcgcccggagcguggcgucccagagcaucaucgccuacaccaugucccugggcgccgagaacagcgucgccuacuccaacaacagcaucgccauccccaccaacuucacgaucuccgugaccaccgagauccugcccgugagcaugaccaagacgagcgucgacugcaccauguacaucugcggggacuccaccgagugcagcaaccuccugcugcaguacggcuccuucugcacccagcucaaccgcgcgcugacggggaucgccguggagcaggacaagaacacccaggagguguucgcccaggucaagcagaucuacaagacgcccccgaucaaggacuucggcggguucaacuucagccagauccugcccgaccccuccaagcccagcaagcgguccuucaucgaggaccuccuguucaacaaggugacccuggccgacgccggcuucaucaagcaguacggcgacugccucggggacaucgcggcccgcgaccugaucugcgcccagaaguucaacggccugaccgugcucccgccccugcugaccgacgagaugaucgcccaguacaccagcgcccuccuggcggggaccaucacguccggcuggaccuucggggccggcgccgcccugcagauccccuucgcgaugcagauggccuaccgguucaacggcaucggggucacccagaacgugcucuacgagaaccagaagcugaucgccaaccaguucaacagcgccaucggcaagauccaggacucccugagcuccaccgccagcgcgcucgggaagcugcaggacguggucaaccagaacgcccaggcccugaacacgcucgugaagcagcuguccagcaacuucggcgccaucuccagcgugcugaacgacauccucucccgccuggacccgcccgaggccgaggugcagaucgaccggcugaucaccgggcgccuccagagccugcagaccuacgugacccagcagcugauccgggcggccgagauccgcgccagcgccaaccucgccgcgaucaagauguccgagugcguccugggccagagcaagcggguggacuucugcggcaagggguaccaccugauguccuucccccagagcgccccgcacggcguggucuuccuccacgugacguacguccccgcccaggagaagaacuucaccaccgcccccgcgaucugccacgacgggaaggcccacuucccccgcgagggcguguucguguccaacgggacccacugguucgucacgcagcggaacuucuacgagccgcagaucaucaccaccgacaacaccuucgugagcggcaacugcgacguggucaucggcaucgugaacaacacgguguacgacccccugcagcccgagcuggacuccuucaaggaggagcucgacaaguacuucaagaaccacaccagccccgacgucgaccugggggacaucuccggcaucaacgccagcguggugaacauccagaaggagaucgaccgccugaacgaggucgccaagaaccucaacgagucccugaucgaccugcaggagcucgggaaguacgagcaguacaucaaguggccgugguacaucuggcugggcuucaucgccggccugaucgcgaucgugauggugaccaucaugcucugcugcaugaccagcugcugcuccugccugaaggggugcugcagcugcggcuccugcugcaaguucgacgaggacgacagcgagcccguccugaagggggugaagcuccacuacacgugaugacucgagcugguacugcaugcacgcaaugcuagcugccccuuucccguccuggguaccccgagucucccccgaccucgggucccagguaugcucccaccuccaccugccccacucaccaccucugcuaguuccagacaccucccaagcacgcagcaaugcagcucaaaacgcuuagccuagccacacccccacgggaaacagcagugauuaaccuuuagcaauaaacgaaaguuuaacuaagcuauacuaaccccaggguuggucaauuucgugccagccacacccuggagcuagcaaaaaaaaaaaaaaaaaaaaaaaaaaaaaagcauaugacuaaaaaaaaaaaaaaaaaaaaaaaaaaaaaaaaaaaaaaaaaaaaaaaaaaaaaaaaaaaaaaaaaaaaaa

SEQ ID NO: 26834 - RNA, 4283 nt, Artificial Sequence
  SARS-CoV-2/Wuhan/WIV05/2019__EPI_ISL_402128 spike protein mRNA gc (1-1273)(K986P_V987P_K986P_V987P_S13I_W152C_L452R_D614G)
agaauaaacuaguauucuucugguccccacagacucagagagaacccgccaccauguucguguuccugguccuccugccccuggugagcauccagugcgugaaccucaccacccgcacgcagcugccgcccgccuacaccaacagcuucacccggggcgucuacuaccccgacaagguguuccgcuccagcgugcugcacuccacccaggaccucuuccugcccuucuucagcaacgucacgugguuccacgccauccacguguccgggaccaacggcaccaagcgguucgacaacccggugcugcccuucaacgacggggucuacuucgcgagcaccgagaaguccaacaucauccgcggcuggaucuucgggacgacccucgacagcaagacccagucccugcugaucgugaacaacgccaccaacguggucaucaaggugugcgaguuccaguucugcaacgaccccuuccucggcguguacuaccacaagaacaacaagagcugcauggaguccgaguuccgggucuacagcuccgccaacaacugcacguucgaguacgugagccagcccuuccugauggaccuggagggcaagcaggggaacuucaagaaccuccgcgaguucguguucaagaacaucgacggcuacuucaagaucuacuccaagcacaccccgaucaaccugguccgggaccugccccagggguucagcgcccucgagccccugguggaccugcccaucggcaucaacaucacccgcuuccagacccuccuggcccugcaccgguccuaccucacgccgggggacagcagcuccggcuggaccgcgggcgccgccgccuacuacgugggguaccugcagccccgcaccuuccugcucaaguacaacgagaacggcaccaucacggacgcggucgacugcgcccuggacccccugagcgagaccaagugcacccucaaguccuucaccguggagaaggggaucuaccagacgagcaacuuccgggugcagcccaccgaguccaucguccgcuucccgaacaucaccaaccugugccccuucggcgagguguucaacgccacccgguucgccagcgucuacgccuggaaccgcaagcggaucuccaacugcguggcggacuacagcgugcuguacaacuccgccagcuucuccacguucaagugcuacggcgucagccccaccaagcucaacgaccugugcuucaccaacguguacgccgacuccuucgugauccgcggggacgagguccggcagaucgcccccggccagaccgggaagaucgccgacuacaacuacaagcugccggacgacuucacgggcugcgugaucgcguggaacagcaacaaccucgacuccaaggucgggggcaacuacaacuaccgcuaccgccuguuccgcaagagcaaccucaagcccuucgagcgggacaucuccaccgagaucuaccaggccggcagcacccccugcaacgggguggagggcuucaacugcuacuucccccugcaguccuacggguuccagccgaccaacggcgugggguaccagcccuaccggguggucgugcugagcuucgagcuccugcacgcccccgccacggugugcggccccaagaaguccaccaaccuggucaagaacaagugcgugaacuucaacuucaacggccucaccgggaccggcgugcugaccgagagcaacaagaaguuccugccguuccagcaguucgggcgcgacaucgccgacacgaccgacgcgguccgcgacccccagacccuggagauccucgacaucacccccugcagcuucggcgggguguccgugaucacgccgggcaccaacaccagcaaccaggucgccgugcuguaccagggcgugaacugcaccgagguccccguggccauccacgccgaccagcugacgcccaccuggcggguguacuccaccggcagcaacgucuuccagacccgcgccgggugccucaucggcgcggagcacgugaacaacuccuacgagugcgacauccccaucggggccggcaucugcgccagcuaccagacgcagaccaacuccccgcggcgcgcccggagcguggcgucccagagcaucaucgccuacaccaugucccugggcgccgagaacagcgucgccuacuccaacaacagcaucgccauccccaccaacuucacgaucuccgugaccaccgagauccugcccgugagcaugaccaagacgagcgucgacugcaccauguacaucugcggggacuccaccgagugcagcaaccuccugcugcaguacggcuccuucugcacccagcucaaccgcgcgcugacggggaucgccguggagcaggacaagaacacccaggagguguucgcccaggucaagcagaucuacaagacgcccccgaucaaggacuucggcggguucaacuucagccagauccugcccgaccccuccaagcccagcaagcgguccuucaucgaggaccuccuguucaacaaggugacccuggccgacgccggcuucaucaagcaguacggcgacugccucggggacaucgcggcccgcgaccugaucugcgcccagaaguucaacggccugaccgugcucccgccccugcugaccgacgagaugaucgcccaguacaccagcgcccuccuggcggggaccaucacguccggcuggaccuucggggccggcgccgcccugcagauccccuucgcgaugcagauggccuaccgguucaacggcaucggggucacccagaacgugcucuacgagaaccagaagcugaucgccaaccaguucaacagcgccaucggcaagauccaggacucccugagcuccaccgccagcgcgcucgggaagcugcaggacguggucaaccagaacgcccaggcccugaacacgcucgugaagcagcuguccagcaacuucggcgccaucuccagcgugcugaacgacauccucucccgccuggacccgcccgaggccgaggugcagaucgaccggcugaucaccgggcgccuccagagccugcagaccuacgugacccagcagcugauccgggcggccgagauccgcgccagcgccaaccucgccgcgaccaagauguccgagugcguccugggccagagcaagcggguggacuucugcggcaagggguaccaccugauguccuucccccagagcgccccgcacggcguggucuuccuccacgugacguacguccccgcccaggagaagaacuucaccaccgcccccgcgaucugccacgacgggaaggcccacuucccccgcgagggcguguucguguccaacgggacccacugguucgucacgcagcggaacuucuacgagccgcagaucaucaccaccgacaacaccuucgugagcggcaacugcgacguggucaucggcaucgugaacaacacgguguacgacccccugcagcccgagcuggacuccuucaaggaggagcucgacaaguacuucaagaaccacaccagccccgacgucgaccugggggacaucuccggcaucaacgccagcguggugaacauccagaaggagaucgaccgccugaacgaggucgccaagaaccucaacgagucccugaucgaccugcaggagcucgggaaguacgagcaguacaucaaguggccgugguacaucuggcugggcuucaucgccggccugaucgcgaucgugauggugaccaucaugcucugcugcaugaccagcugcugcuccugccugaaggggugcugcagcugcggcuccugcugcaaguucgacgaggacgacagcgagcccguccugaagggggugaagcuccacuacacgugaugacucgagcugguacugcaugcacgcaaugcuagcugccccuuucccguccuggguaccccgagucucccccgaccucgggucccagguaugcucccaccuccaccugccccacucaccaccucugcuaguuccagacaccucccaagcacgcagcaaugcagcucaaaacgcuuagccuagccacacccccacgggaaacagcagugauuaaccuuuagcaauaaacgaaaguuuaacuaagcuauacuaaccccaggguuggucaauuucgugccagccacacccuggagcuagcaaaaaaaaaaaaaaaaaaaaaaaaaaaaaagcauaugacuaaaaaaaaaaaaaaaaaaaaaaaaaaaaaaaaaaaaaaaaaaaaaaaaaaaaaaaaaaaaaaaaaaaaaa

SEQ ID NO: 26835 - RNA, 4283 nt, Artificial Sequence
  SARS-CoV-2/Wuhan/WIV05/2019__EPI_ISL_402128 spike protein mRNA gc (1-1273)(K986P_V987P)
agaauaaacuaguauucuucugguccccacagacucagagagaacccgccaccauguucguguuccugguccuccugccccuggugagcucccagugcgugaaccucaccacccgcacgcagcugccgcccgccuacaccaacagcuucacccggggcgucuacuaccccgacaagguguuccgcuccagcgugcugcacuccacccaggaccucuuccugcccuucuucagcaacgucacgugguuccacgccauccacguguccgggaccaacggcaccaagcgguucgacaacccggugcugcccuucaacgacggggucuacuucgcgagcaccgagaaguccaacaucauccgcggcuggaucuucgggacgacccucgacagcaagacccagucccugcugaucgugaacaacgccaccaacguggucaucaaggugugcgaguuccaguucugcaacgaccccuuccucggcguguacuaccacaagaacaacaagagcuggauggaguccgaguuccgggucuacagcuccgccaacaacugcacguucgaguacgugagccagcccuuccugauggaccuggagggcaagcaggggaacuucaagaaccuccgcgaguucguguucaagaacaucgacggcuacuucaagaucuacuccaagcacaccccgaucaaccugguccgggaccugccccagggguucagcgcccucgagccccugguggaccugcccaucggcaucaacaucacccgcuuccagacccuccuggcccugcaccgguccuaccucacgccgggggacagcagcuccggcuggaccgcgggcgccgccgccuacuacgugggguaccugcagccccgcaccuuccugcucaaguacaacgagaacggcaccaucacggacgcggucgacugcgcccuggacccccugagcgagaccaagugcacccucaaguccuucaccguggagaaggggaucuaccagacgagcaacuuccgggugcagcccaccgaguccaucguccgcuucccgaacaucaccaaccugugccccuucggcgagguguucaacgccacccgguucgccagcgucuacgccuggaaccgcaagcggaucuccaacugcguggcggacuacagcgugcuguacaacuccgccagcuucuccacguucaagugcuacggcgucagccccaccaagcucaacgaccugugcuucaccaacguguacgccgacuccuucgugauccgcggggacgagguccggcagaucgcccccggccagaccgggaagaucgccgacuacaacuacaagcugccggacgacuucacgggcugcgugaucgcguggaacagcaacaaccucgacuccaaggucgggggcaacuacaacuaccuguaccgccuguuccgcaagagcaaccucaagcccuucgagcgggacaucuccaccgagaucuaccaggccggcagcacccccugcaacgggguggagggcuucaacugcuacuucccccugcaguccuacggguuccagccgaccaacggcgugggguaccagcccuaccggguggucgugcugagcuucgagcuccugcacgcccccgccacggugugcggccccaagaaguccaccaaccuggucaagaacaagugcgugaacuucaacuucaacggccucaccgggaccggcgugcugaccgagagcaacaagaaguuccugccguuccagcaguucgggcgcgacaucgccgacacgaccgacgcgguccgcgacccccagacccuggagauccucgacaucacccccugcagcuucggcgggguguccgugaucacgccgggcaccaacaccagcaaccaggucgccgugcuguaccaggacgugaacugcaccgagguccccguggccauccacgccgaccagcugacgcccaccuggcggguguacuccaccggcagcaacgucuuccagacccgcgccgggugccucaucggcgcggagcacgugaacaacuccuacgagugcgacauccccaucggggccggcaucugcgccagcuaccagacgcagaccaacuccccgcggcgcgcccggagcguggcgucccagagcaucaucgccuacaccaugucccugggcgccgagaacagcgucgccuacuccaacaacagcaucgccauccccaccaacuucacgaucuccgugaccaccgagauccugcccgugagcaugaccaagacgagcgucgacugcaccauguacaucugcggggacuccaccgagugcagcaaccuccugcugcaguacggcuccuucugcacccagcucaaccgcgcgcugacggggaucgccguggagcaggacaagaacacccaggagguguucgcccaggucaagcagaucuacaagacgcccccgaucaaggacuucggcggguucaacuucagccagauccugcccgaccccuccaagcccagcaagcgguccuucaucgaggaccuccuguucaacaaggugacccuggccgacgccggcuucaucaagcaguacggcgacugccucggggacaucgcggcccgcgaccugaucugcgcccagaaguucaacggccugaccgugcucccgccccugcugaccgacgagaugaucgcccaguacaccagcgcccuccuggcggggaccaucacguccggcuggaccuucggggccggcgccgcccugcagauccccuucgcgaugcagauggccuaccgguucaacggcaucggggucacccagaacgugcucuacgagaaccagaagcugaucgccaaccaguucaacagcgccaucggcaagauccaggacucccugagcuccaccgccagcgcgcucgggaagcugcaggacguggucaaccagaacgcccaggcccugaacacgcucgugaagcagcuguccagcaacuucggcgccaucuccagcgugcugaacgacauccucucccgccuggacccgcccgaggccgagguccagaucgaccggcugaucaccgggcgccuccagagccugcagaccuacgugacccagcagcugauccgggcggccgagauccgcgccagcgccaaccucgccgcgaccaagauguccgagugcgugcugggccagagcaagcgggucgacuucugcggcaagggguaccaccugauguccuucccccagagcgcgccccacggcgugguguuccuccacgucacguacgugcccgcccaggagaagaacuucaccaccgccccggccaucugccacgacgggaaggcccacuucccccgcgagggcgucuucguguccaacgggacccacugguucgugacgcagcggaacuucuacgagccccagaucaucaccaccgacaacaccuucgucagcggcaacugcgacguggugaucggcaucgucaacaacacgguguacgacccccugcagccggagcuggacuccuucaaggaggagcucgacaaguacuucaagaaccacaccagccccgacguggaccugggggacaucuccggcaucaacgccagcgucgugaacauccagaaggagaucgaccgccugaacgagguggccaagaaccucaacgagucccugaucgaccugcaggagcucgggaaguacgagcaguacaucaaguggcccugguacaucuggcugggcuucaucgccggccugaucgcgaucgucauggugaccaucaugcucugcugcaugaccagcugcugcuccugccugaaggggugcugcagcugcggcuccugcugcaaguucgacgaggacgacagcgagccggugcugaagggggucaagcuccacuacacgugaugacucgagcugguacugcaugcacgcaaugcuagcugccccuuucccguccuggguaccccgagucucccccgaccucgggucccagguaugcucccaccuccaccugccccacucaccaccucugcuaguuccagacaccucccaagcacgcagcaaugcagcucaaaacgcuuagccuagccacacccccacgggaaacagcagugauuaaccuuuagcaauaaacgaaaguuuaacuaagcuauacuaaccccaggguuggucaauuucgugccagccacacccuggagcuagcaaaaaaaaaaaaaaaaaaaaaaaaaaaaaagcauaugacuaaaaaaaaaaaaaaaaaaaaaaaaaaaaaaaaaaaaaaaaaaaaaaaaaaaaaaaaaaaaaaaaaaaaaa

SEQ ID NO: 26836 - RNA, 4283 nt, Artificial Sequence
  SARS-CoV-2/Wuhan/WIV05/2019__EPI_ISL_402128 spike protein mRNA gc (1-1273)(K986P_V987P_ D614G)
agaauaaacuaguauucuucugguccccacagacucagagagaacccgccaccauguucguguuccugguccuccugccccuggugagcucccagugcgugaaccucaccacccgcacgcagcugccgcccgccuacaccaacagcuucacccggggcgucuacuaccccgacaagguguuccgcuccagcgugcugcacuccacccaggaccucuuccugcccuucuucagcaacgucacgugguuccacgccauccacguguccgggaccaacggcaccaagcgguucgacaacccggugcugcccuucaacgacggggucuacuucgcgagcaccgagaaguccaacaucauccgcggcuggaucuucgggacgacccucgacagcaagacccagucccugcugaucgugaacaacgccaccaacguggucaucaaggugugcgaguuccaguucugcaacgaccccuuccucggcguguacuaccacaagaacaacaagagcuggauggaguccgaguuccgggucuacagcuccgccaacaacugcacguucgaguacgugagccagcccuuccugauggaccuggagggcaagcaggggaacuucaagaaccuccgcgaguucguguucaagaacaucgacggcuacuucaagaucuacuccaagcacaccccgaucaaccugguccgggaccugccccagggguucagcgcccucgagccccugguggaccugcccaucggcaucaacaucacccgcuuccagacccuccuggcccugcaccgguccuaccucacgccgggggacagcagcuccggcuggaccgcgggcgccgccgccuacuacgugggguaccugcagccccgcaccuuccugcucaaguacaacgagaacggcaccaucacggacgcggucgacugcgcccuggacccccugagcgagaccaagugcacccucaaguccuucaccguggagaaggggaucuaccagacgagcaacuuccgggugcagcccaccgaguccaucguccgcuucccgaacaucaccaaccugugccccuucggcgagguguucaacgccacccgguucgccagcgucuacgccuggaaccgcaagcggaucuccaacugcguggcggacuacagcgugcuguacaacuccgccagcuucuccacguucaagugcuacggcgucagccccaccaagcucaacgaccugugcuucaccaacguguacgccgacuccuucgugauccgcggggacgagguccggcagaucgcccccggccagaccgggaagaucgccgacuacaacuacaagcugccggacgacuucacgggcugcgugaucgcguggaacagcaacaaccucgacuccaaggucgggggcaacuacaacuaccuguaccgccuguuccgcaagagcaaccucaagcccuucgagcgggacaucuccaccgagaucuaccaggccggcagcacccccugcaacgggguggagggcuucaacugcuacuucccccugcaguccuacggguuccagccgaccaacggcgugggguaccagcccuaccggguggucgugcugagcuucgagcuccugcacgcccccgccacggugugcggccccaagaaguccaccaaccuggucaagaacaagugcgugaacuucaacuucaacggccucaccgggaccggcgugcugaccgagagcaacaagaaguuccugccguuccagcaguucgggcgcgacaucgccgacacgaccgacgcgguccgcgacccccagacccuggagauccucgacaucacccccugcagcuucggcgggguguccgugaucacgccgggcaccaacaccagcaaccaggucgccgugcuguaccagggcgugaacugcaccgagguccccguggccauccacgccgaccagcugacgcccaccuggcggguguacuccaccgggagcaacgucuuccagacccgcgccggcugccucaucggggcggagcacgugaacaacuccuacgagugcgacauccccaucggcgccggcaucugcgccagcuaccagacgcagaccaacuccccgcggcgcgcccggagcguggcgucccagagcaucaucgccuacaccaugucccugggggccgagaacagcgucgccuacuccaacaacagcaucgccauccccaccaacuucacgaucuccgugaccaccgagauccugcccgugagcaugaccaagacgagcgucgacugcaccauguacaucugcggcgacuccaccgagugcagcaaccuccugcugcaguacggguccuucugcacccagcucaaccgcgcgcugacgggcaucgccguggagcaggacaagaacacccaggagguguucgcccaggucaagcagaucuacaagacgcccccgaucaaggacuucgggggcuucaacuucagccagauccugcccgaccccuccaagcccagcaagcgguccuucaucgaggaccuccuguucaacaaggugacccuggccgacgccggcuucaucaagcaguacggggacugccucggcgacaucgcggcccgcgaccugaucugcgcccagaaguucaacgggcugaccgugcucccgccccugcugaccgacgagaugaucgcccaguacaccagcgcccuccuggcgggcaccaucacguccggguggaccuucggcgccggcgccgcccugcagauccccuucgcgaugcagauggccuaccgguucaacgggaucggcgucacccagaacgugcucuacgagaaccagaagcugaucgccaaccaguucaacagcgccaucgggaagauccaggacucccugagcuccaccgccagcgcgcucggcaagcugcaggacguggucaaccagaacgcccaggcccugaacacgcucgugaagcagcuguccagcaacuucggggccaucuccagcgugcugaacgacauccucucccgccuggacccgcccgaggccgagguccagaucgaccggcugaucaccggccgccuccagagccugcagaccuacgugacccagcagcugauccgggcggccgagauccgcgccagcgccaaccucgccgcgaccaagauguccgagugcgugcugggccagagcaagcgggucgacuucugcgggaagggcuaccaccugauguccuucccccagagcgcgccccacggggugguguuccuccacgucacguacgugcccgcccaggagaagaacuucaccaccgccccggccaucugccacgacggcaaggcccacuucccccgcgagggggucuucguguccaacggcacccacugguucgugacgcagcggaacuucuacgagccccagaucaucaccaccgacaacaccuucgucagcggcaacugcgacguggugaucgggaucgucaacaacacgguguacgacccccugcagccggagcuggacuccuucaaggaggagcucgacaaguacuucaagaaccacaccagccccgacguggaccugggcgacaucuccgggaucaacgccagcgucgugaacauccagaaggagaucgaccgccugaacgagguggccaagaaccucaacgagucccugaucgaccugcaggagcucggcaaguacgagcaguacaucaaguggcccugguacaucuggcugggcuucaucgccgggcugaucgcgaucgucauggugaccaucaugcucugcugcaugaccagcugcugcuccugccugaagggcugcugcagcugcggguccugcugcaaguucgacgaggacgacagcgagccggugcugaagggcgucaagcuccacuacacgugaugacucgagcugguacugcaugcacgcaaugcuagcugccccuuucccguccuggguaccccgagucucccccgaccucgggucccagguaugcucccaccuccaccugccccacucaccaccucugcuaguuccagacaccucccaagcacgcagcaaugcagcucaaaacgcuuagccuagccacacccccacgggaaacagcagugauuaaccuuuagcaauaaacgaaaguuuaacuaagcuauacuaaccccaggguuggucaauuucgugccagccacacccuggagcuagcaaaaaaaaaaaaaaaaaaaaaaaaaaaaaagcauaugacuaaaaaaaaaaaaaaaaaaaaaaaaaaaaaaaaaaaaaaaaaaaaaaaaaaaaaaaaaaaaaaaaaaaaaa

SEQ ID NO: 26837 - RNA, 4283 nt, Artificial Sequence
  SARS-CoV-2/Wuhan/WIV05/2019__EPI_ISL_402128 spike protein mRNA gc (1-1273)(K986P_V987P_A222V_D614G)
agaauaaacuaguauucuucugguccccacagacucagagagaacccgccaccauguucguguuccugguccuccugccccuggugagcucccagugcgugaaccucaccacccgcacgcagcugccgcccgccuacaccaacagcuucacccggggcgucuacuaccccgacaagguguuccgcuccagcgugcugcacuccacccaggaccucuuccugcccuucuucagcaacgucacgugguuccacgccauccacguguccgggaccaacggcaccaagcgguucgacaacccggugcugcccuucaacgacggggucuacuucgcgagcaccgagaaguccaacaucauccgcggcuggaucuucgggacgacccucgacagcaagacccagucccugcugaucgugaacaacgccaccaacguggucaucaaggugugcgaguuccaguucugcaacgaccccuuccucggcguguacuaccacaagaacaacaagagcuggauggaguccgaguuccgggucuacagcuccgccaacaacugcacguucgaguacgugagccagcccuuccugauggaccuggagggcaagcaggggaacuucaagaaccuccgcgaguucguguucaagaacaucgacggcuacuucaagaucuacuccaagcacaccccgaucaaccugguccgggaccugccccagggguucagcgugcucgagccccugguggaccugcccaucggcaucaacaucacccgcuuccagacccuccuggcccugcaccgguccuaccucacgccgggggacagcagcuccggcuggaccgccggcgcggccgccuacuacgucggguaccugcagccccgcaccuuccugcucaaguacaacgagaacggcaccaucacggacgccguggacugcgcgcuggacccccugagcgagaccaagugcacccucaaguccuucaccguggagaaggggaucuaccagacgagcaacuuccggguccagcccaccgaguccaucgugcgcuucccgaacaucaccaaccugugccccuucggcgaggucuucaacgccacccgguucgccagcguguacgccuggaaccgcaagcggaucuccaacugcguggccgacuacagcguccuguacaacuccgcgagcuucuccacguucaagugcuacggcgugagccccaccaagcucaacgaccugugcuucaccaacguguacgccgacuccuucgucauccgcggggacgaggugcggcagaucgcccccggccagaccgggaagaucgccgacuacaacuacaagcugccggacgacuucacgggcugcgugaucgccuggaacagcaacaaccucgacuccaaggucgggggcaacuacaacuaccuguaccgccuguuccgcaagagcaaccucaagcccuucgagcgggacaucuccaccgagaucuaccaggcgggcagcacccccugcaacgggguggagggcuucaacugcuacuucccccugcaguccuacggguuccagccgaccaacggcgugggguaccagcccuaccgggucguggugcugagcuucgagcuccugcacgcccccgccacggucugcggccccaagaaguccaccaaccuggugaagaacaagugcgugaacuucaacuucaacggccucaccgggaccggcguccugaccgagagcaacaagaaguuccugccguuccagcaguucgggcgcgacaucgccgacacgaccgacgccgugcgcgacccccagacccuggagauccucgacaucacccccugcagcuucggcgggguguccgucaucacgccgggcaccaacaccagcaaccagguggcggugcuguaccagggcgucaacugcaccgaggugcccguggccauccacgccgaccagcugacgcccaccuggcgggucuacuccaccgggagcaacguguuccagacccgcgccggcugccucaucggggccgagcacgugaacaacuccuacgagugcgacauccccaucggcgcgggcaucugcgccagcuaccagacgcagaccaacuccccgcggcgcgcccggagcgucgccucccagagcaucaucgcguacaccaugucccugggggccgagaacagcguggccuacuccaacaacagcaucgccauccccaccaacuucacgaucuccgugaccaccgagauccugcccgucagcaugaccaagacgagcguggacugcaccauguacaucugcggcgacuccaccgagugcagcaaccuccugcugcaguacggguccuucugcacccagcucaaccgcgcccugacgggcaucgcgguggagcaggacaagaacacccaggaggucuucgcccaggugaagcagaucuacaagacgcccccgaucaaggacuucgggggcuucaacuucagccagauccugcccgaccccuccaagcccagcaagcgguccuucaucgaggaccuccuguucaacaaggugacccuggccgacgccggcuucaucaagcaguacggggacugccucggcgacaucgccgcgcgcgaccugaucugcgcccagaaguucaacgggcugaccguccucccgccccugcugaccgacgagaugaucgcccaguacaccagcgcccuccuggccggcaccaucacguccggguggaccuucggcgcgggcgccgcccugcagauccccuucgccaugcagauggcguaccgguucaacgggaucggcgugacccagaacgugcucuacgagaaccagaagcugaucgccaaccaguucaacagcgccaucgggaagauccaggacucccugagcuccaccgccagcgcccucggcaagcugcaggacgucgugaaccagaacgcgcaggcccugaacacgcucgugaagcagcuguccagcaacuucggggccaucuccagcguccugaacgacauccucucccgccuggacccgcccgaggccgaggugcagaucgaccggcugaucaccggccgccuccagagccugcagaccuacgugacccagcagcugauccgggccgcggagauccgcgccagcgccaaccucgccgccaccaagauguccgagugcguccugggccagagcaagcggguggacuucugcgggaagggcuaccaccugauguccuucccccagagcgcgccccacgggguggucuuccuccacgugacguacguccccgcccaggagaagaacuucaccaccgccccggccaucugccacgacggcaaggcgcacuucccccgcgaggggguguucguguccaacggcacccacugguucgucacgcagcggaacuucuacgagccccagaucaucaccaccgacaacaccuucgugagcggcaacugcgacguggucaucgggaucgugaacaacacgguguacgacccccugcagccggagcuggacuccuucaaggaggagcucgacaaguacuucaagaaccacaccagccccgacgucgaccugggcgacaucuccgggaucaacgccagcguggugaacauccagaaggagaucgaccgccugaacgaggucgccaagaaccucaacgagucccugaucgaccugcaggagcucggcaaguacgagcaguacaucaaguggcccugguacaucuggcugggcuucaucgccgggcugaucgccaucgugauggugaccaucaugcucugcugcaugaccagcugcugcuccugccugaagggcugcugcagcugcggguccugcugcaaguucgacgaggacgacagcgagccgguccugaagggcgugaagcuccacuacacgugaugacucgagcugguacugcaugcacgcaaugcuagcugccccuuucccguccuggguaccccgagucucccccgaccucgggucccagguaugcucccaccuccaccugccccacucaccaccucugcuaguuccagacaccucccaagcacgcagcaaugcagcucaaaacgcuuagccuagccacacccccacgggaaacagcagugauuaaccuuuagcaauaaacgaaaguuuaacuaagcuauacuaaccccaggguuggucaauuucgugccagccacacccuggagcuagcaaaaaaaaaaaaaaaaaaaaaaaaaaaaaagcauaugacuaaaaaaaaaaaaaaaaaaaaaaaaaaaaaaaaaaaaaaaaaaaaaaaaaaaaaaaaaaaaaaaaaaaaaa

SEQ ID NO: 26838 - RNA, 4283 nt, Artificial Sequence
  SARS-CoV-2/Wuhan/WIV05/2019__EPI_ISL_402128 spike protein mRNA gc (1-1273)(K986P_V987P_N439K_D614G)
agaauaaacuaguauucuucugguccccacagacucagagagaacccgccaccauguucguguuccugguccuccugccccuggugagcucccagugcgugaaccucaccacccgcacgcagcugccgcccgccuacaccaacagcuucacccggggcgucuacuaccccgacaagguguuccgcuccagcgugcugcacuccacccaggaccucuuccugcccuucuucagcaacgucacgugguuccacgccauccacguguccgggaccaacggcaccaagcgguucgacaacccggugcugcccuucaacgacggggucuacuucgcgagcaccgagaaguccaacaucauccgcggcuggaucuucgggacgacccucgacagcaagacccagucccugcugaucgugaacaacgccaccaacguggucaucaaggugugcgaguuccaguucugcaacgaccccuuccucggcguguacuaccacaagaacaacaagagcuggauggaguccgaguuccgggucuacagcuccgccaacaacugcacguucgaguacgugagccagcccuuccugauggaccuggagggcaagcaggggaacuucaagaaccuccgcgaguucguguucaagaacaucgacggcuacuucaagaucuacuccaagcacaccccgaucaaccugguccgggaccugccccagggguucagcgcccucgagccccugguggaccugcccaucggcaucaacaucacccgcuuccagacccuccuggcccugcaccgguccuaccucacgccgggggacagcagcuccggcuggaccgcgggcgccgccgccuacuacgugggguaccugcagccccgcaccuuccugcucaaguacaacgagaacggcaccaucacggacgcggucgacugcgcccuggacccccugagcgagaccaagugcacccucaaguccuucaccguggagaaggggaucuaccagacgagcaacuuccgggugcagcccaccgaguccaucguccgcuucccgaacaucaccaaccugugccccuucggcgagguguucaacgccacccgguucgccagcgucuacgccuggaaccgcaagcggaucuccaacugcguggcggacuacagcgugcuguacaacuccgccagcuucuccacguucaagugcuacggcgucagccccaccaagcucaacgaccugugcuucaccaacguguacgccgacuccuucgugauccgcggggacgagguccggcagaucgcccccggccagaccgggaagaucgccgacuacaacuacaagcugccggacgacuucacgggcugcgugaucgcguggaacagcaagaaccucgacuccaaggucgggggcaacuacaacuaccuguaccgccuguuccgcaagagcaaccucaagcccuucgagcgggacaucuccaccgagaucuaccaggccggcagcacccccugcaacgggguggagggcuucaacugcuacuucccccugcaguccuacggguuccagccgaccaacggcgugggguaccagcccuaccggguggucgugcugagcuucgagcuccugcacgcccccgccacggugugcggccccaagaaguccaccaaccuggucaagaacaagugcgugaacuucaacuucaacggccucaccgggaccggcgugcugaccgagagcaacaagaaguuccugccguuccagcaguucgggcgcgacaucgccgacacgaccgacgcgguccgcgacccccagacccuggagauccucgacaucacccccugcagcuucggcgggguguccgugaucacgccgggcaccaacaccagcaaccaggucgccgugcuguaccagggcgugaacugcaccgagguccccguggccauccacgccgaccagcugacgcccaccuggcggguguacuccaccgggagcaacgucuuccagacccgcgccggcugccucaucggggcggagcacgugaacaacuccuacgagugcgacauccccaucggcgccggcaucugcgccagcuaccagacgcagaccaacuccccgcggcgcgcccggagcguggcgucccagagcaucaucgccuacaccaugucccugggggccgagaacagcgucgccuacuccaacaacagcaucgccauccccaccaacuucacgaucuccgugaccaccgagauccugcccgugagcaugaccaagacgagcgucgacugcaccauguacaucugcggcgacuccaccgagugcagcaaccuccugcugcaguacggguccuucugcacccagcucaaccgcgcgcugacgggcaucgccguggagcaggacaagaacacccaggagguguucgcccaggucaagcagaucuacaagacgcccccgaucaaggacuucgggggcuucaacuucagccagauccugcccgaccccuccaagcccagcaagcgguccuucaucgaggaccuccuguucaacaaggugacccuggccgacgccggcuucaucaagcaguacggggacugccucggcgacaucgcggcccgcgaccugaucugcgcccagaaguucaacgggcugaccgugcucccgccccugcugaccgacgagaugaucgcccaguacaccagcgcccuccuggcgggcaccaucacguccggguggaccuucggcgccggcgccgcccugcagauccccuucgcgaugcagauggccuaccgguucaacgggaucggcgucacccagaacgugcucuacgagaaccagaagcugaucgccaaccaguucaacagcgccaucgggaagauccaggacucccugagcuccaccgccagcgcgcucggcaagcugcaggacguggucaaccagaacgcccaggcccugaacacgcucgugaagcagcuguccagcaacuucggggccaucuccagcgugcugaacgacauccucucccgccuggacccgcccgaggccgagguccagaucgaccggcugaucaccggccgccuccagagccugcagaccuacgugacccagcagcugauccgggcggccgagauccgcgccagcgccaaccucgccgcgaccaagauguccgagugcgugcugggccagagcaagcgggucgacuucugcgggaagggcuaccaccugauguccuucccccagagcgcgccccacggggugguguuccuccacgucacguacgugcccgcccaggagaagaacuucaccaccgccccggccaucugccacgacggcaaggcccacuucccccgcgagggggucuucguguccaacggcacccacugguucgugacgcagcggaacuucuacgagccccagaucaucaccaccgacaacaccuucgucagcggcaacugcgacguggugaucgggaucgucaacaacacgguguacgacccccugcagccggagcuggacuccuucaaggaggagcucgacaaguacuucaagaaccacaccagccccgacguggaccugggcgacaucuccgggaucaacgccagcgucgugaacauccagaaggagaucgaccgccugaacgagguggccaagaaccucaacgagucccugaucgaccugcaggagcucggcaaguacgagcaguacaucaaguggcccugguacaucuggcugggcuucaucgccgggcugaucgcgaucgucauggugaccaucaugcucugcugcaugaccagcugcugcuccugccugaagggcugcugcagcugcggguccugcugcaaguucgacgaggacgacagcgagccggugcugaagggcgucaagcuccacuacacgugaugacucgagcugguacugcaugcacgcaaugcuagcugccccuuucccguccuggguaccccgagucucccccgaccucgggucccagguaugcucccaccuccaccugccccacucaccaccucugcuaguuccagacaccucccaagcacgcagcaaugcagcucaaaacgcuuagccuagccacacccccacgggaaacagcagugauuaaccuuuagcaauaaacgaaaguuuaacuaagcuauacuaaccccaggguuggucaauuucgugccagccacacccuggagcuagcaaaaaaaaaaaaaaaaaaaaaaaaaaaaaagcauaugacuaaaaaaaaaaaaaaaaaaaaaaaaaaaaaaaaaaaaaaaaaaaaaaaaaaaaaaaaaaaaaaaaaaaaaa

SEQ ID NO: 26839 - RNA, 4283 nt, Artificial Sequence
  SARS-CoV-2/Wuhan/WIV05/2019__EPI_ISL_402128 spike protein mRNA gc (1-1273)(K986P_V987P_S477N_D614G)
agaauaaacuaguauucuucugguccccacagacucagagagaacccgccaccauguucguguuccugguccuccugccccuggugagcucccagugcgugaaccucaccacccgcacgcagcugccgcccgccuacaccaacagcuucacccggggcgucuacuaccccgacaagguguuccgcuccagcgugcugcacuccacccaggaccucuuccugcccuucuucagcaacgucacgugguuccacgccauccacguguccgggaccaacggcaccaagcgguucgacaacccggugcugcccuucaacgacggggucuacuucgcgagcaccgagaaguccaacaucauccgcggcuggaucuucgggacgacccucgacagcaagacccagucccugcugaucgugaacaacgccaccaacguggucaucaaggugugcgaguuccaguucugcaacgaccccuuccucggcguguacuaccacaagaacaacaagagcuggauggaguccgaguuccgggucuacagcuccgccaacaacugcacguucgaguacgugagccagcccuuccugauggaccuggagggcaagcaggggaacuucaagaaccuccgcgaguucguguucaagaacaucgacggcuacuucaagaucuacuccaagcacaccccgaucaaccugguccgggaccugccccagggguucagcgcccucgagccccugguggaccugcccaucggcaucaacaucacccgcuuccagacccuccuggcccugcaccgguccuaccucacgccgggggacagcagcuccggcuggaccgcgggcgccgccgccuacuacgugggguaccugcagccccgcaccuuccugcucaaguacaacgagaacggcaccaucacggacgcggucgacugcgcccuggacccccugagcgagaccaagugcacccucaaguccuucaccguggagaaggggaucuaccagacgagcaacuuccgggugcagcccaccgaguccaucguccgcuucccgaacaucaccaaccugugccccuucggcgagguguucaacgccacccgguucgccagcgucuacgccuggaaccgcaagcggaucuccaacugcguggcggacuacagcgugcuguacaacuccgccagcuucuccacguucaagugcuacggcgucagccccaccaagcucaacgaccugugcuucaccaacguguacgccgacuccuucgugauccgcggggacgagguccggcagaucgcccccggccagaccgggaagaucgccgacuacaacuacaagcugccggacgacuucacgggcugcgugaucgcguggaacagcaacaaccucgacuccaaggucgggggcaacuacaacuaccuguaccgccuguuccgcaagagcaaccucaagcccuucgagcgggacaucuccaccgagaucuaccaggccggcaacacccccugcaacgggguggagggcuucaacugcuacuucccccugcagagcuacggguuccagccgaccaacggcgugggguaccagcccuaccggguggucgugcuguccuucgagcuccugcacgcccccgccacggugugcggccccaagaaguccaccaaccuggucaagaacaagugcgugaacuucaacuucaacggccucaccgggaccggcgugcugaccgagagcaacaagaaguuccugccguuccagcaguucgggcgcgacaucgccgacacgaccgacgcgguccgcgacccccagacccuggagauccucgacaucacccccugcagcuucggcggggugagcgugaucacgccgggcaccaacaccuccaaccaggucgccgugcuguaccagggcgugaacugcaccgagguccccguggccauccacgccgaccagcugacgcccaccuggcggguguacagcaccggguccaacgucuuccagacccgcgccggcugccucaucggggcggagcacgugaacaacagcuacgagugcgacauccccaucggcgccggcaucugcgccuccuaccagacgcagaccaacagcccgcggcgcgcccgguccguggcgagccaguccaucaucgccuacaccaugagccugggggccgagaacuccgucgccuacagcaacaacuccaucgccauccccaccaacuucacgaucagcgugaccaccgagauccugcccguguccaugaccaagacgagcgucgacugcaccauguacaucugcggcgacagcaccgagugcuccaaccuccugcugcaguacgggagcuucugcacccagcucaaccgcgcgcugacgggcaucgccguggagcaggacaagaacacccaggagguguucgcccaggucaagcagaucuacaagacgcccccgaucaaggacuucgggggcuucaacuucucccagauccugcccgaccccagcaagcccuccaagcggagcuucaucgaggaccuccuguucaacaaggugacccuggccgacgccggcuucaucaagcaguacggggacugccucggcgacaucgcggcccgcgaccugaucugcgcccagaaguucaacgggcugaccgugcucccgccccugcugaccgacgagaugaucgcccaguacaccuccgcccuccuggcgggcaccaucacgagcggguggaccuucggcgccggcgccgcccugcagauccccuucgcgaugcagauggccuaccgguucaacgggaucggcgucacccagaacgugcucuacgagaaccagaagcugaucgccaaccaguucaacuccgccaucgggaagauccaggacagccuguccagcaccgccuccgcgcucggcaagcugcaggacguggucaaccagaacgcccaggcccugaacacgcucgugaagcagcugagcuccaacuucggggccaucagcuccgugcugaacgacauccucagccgccuggacccgcccgaggccgagguccagaucgaccggcugaucaccggccgccuccagucccugcagaccuacgugacccagcagcugauccgggcggccgagauccgcgccagcgccaaccucgccgcgaccaagaugagcgagugcgugcugggccaguccaagcgggucgacuucugcgggaagggcuaccaccugaugagcuucccccaguccgcgccccacggggugguguuccuccacgucacguacgugcccgcccaggagaagaacuucaccaccgccccggccaucugccacgacggcaaggcccacuucccccgcgagggggucuucgugagcaacggcacccacugguucgugacgcagcggaacuucuacgagccccagaucaucaccaccgacaacaccuucgucuccggcaacugcgacguggugaucgggaucgucaacaacacgguguacgacccccugcagccggagcuggacagcuucaaggaggagcucgacaaguacuucaagaaccacaccucccccgacguggaccugggcgacaucagcgggaucaacgccuccgucgugaacauccagaaggagaucgaccgccugaacgagguggccaagaaccucaacgagagccugaucgaccugcaggagcucggcaaguacgagcaguacaucaaguggcccugguacaucuggcugggcuucaucgccgggcugaucgcgaucgucauggugaccaucaugcucugcugcaugaccuccugcugcagcugccugaagggcugcugcuccugcgggagcugcugcaaguucgacgaggacgacuccgagccggugcugaagggcgucaagcuccacuacacgugaugacucgagcugguacugcaugcacgcaaugcuagcugccccuuucccguccuggguaccccgagucucccccgaccucgggucccagguaugcucccaccuccaccugccccacucaccaccucugcuaguuccagacaccucccaagcacgcagcaaugcagcucaaaacgcuuagccuagccacacccccacgggaaacagcagugauuaaccuuuagcaauaaacgaaaguuuaacuaagcuauacuaaccccaggguuggucaauuucgugccagccacacccuggagcuagcaaaaaaaaaaaaaaaaaaaaaaaaaaaaaagcauaugacuaaaaaaaaaaaaaaaaaaaaaaaaaaaaaaaaaaaaaaaaaaaaaaaaaaaaaaaaaaaaaaaaaaaaaa

SEQ ID NO: 26840 - RNA, 4283 nt, Artificial Sequence
  SARS-CoV-2/Wuhan/WIV05/2019__EPI_ISL_402128 spike protein mRNA gc (1-1273)(K986P_V987P_N501Y_D614G)
agaauaaacuaguauucuucugguccccacagacucagagagaacccgccaccauguucguguuccugguccuccugccccuggugagcucccagugcgugaaccucaccacccgcacgcagcugccgcccgccuacaccaacagcuucacccggggcgucuacuaccccgacaagguguuccgcuccagcgugcugcacuccacccaggaccucuuccugcccuucuucagcaacgucacgugguuccacgccauccacguguccgggaccaacggcaccaagcgguucgacaacccggugcugcccuucaacgacggggucuacuucgcgagcaccgagaaguccaacaucauccgcggcuggaucuucgggacgacccucgacagcaagacccagucccugcugaucgugaacaacgccaccaacguggucaucaaggugugcgaguuccaguucugcaacgaccccuuccucggcguguacuaccacaagaacaacaagagcuggauggaguccgaguuccgggucuacagcuccgccaacaacugcacguucgaguacgugagccagcccuuccugauggaccuggagggcaagcaggggaacuucaagaaccuccgcgaguucguguucaagaacaucgacggcuacuucaagaucuacuccaagcacaccccgaucaaccugguccgggaccugccccagggguucagcgcccucgagccccugguggaccugcccaucggcaucaacaucacccgcuuccagacccuccuggcccugcaccgguccuaccucacgccgggggacagcagcuccggcuggaccgcgggcgccgccgccuacuacgugggguaccugcagccccgcaccuuccugcucaaguacaacgagaacggcaccaucacggacgcggucgacugcgcccuggacccccugagcgagaccaagugcacccucaaguccuucaccguggagaaggggaucuaccagacgagcaacuuccgggugcagcccaccgaguccaucguccgcuucccgaacaucaccaaccugugccccuucggcgagguguucaacgccacccgguucgccagcgucuacgccuggaaccgcaagcggaucuccaacugcguggcggacuacagcgugcuguacaacuccgccagcuucuccacguucaagugcuacggcgucagccccaccaagcucaacgaccugugcuucaccaacguguacgccgacuccuucgugauccgcggggacgagguccggcagaucgcccccggccagaccgggaagaucgccgacuacaacuacaagcugccggacgacuucacgggcugcgugaucgcguggaacagcaacaaccucgacuccaaggucgggggcaacuacaacuaccuguaccgccuguuccgcaagagcaaccucaagcccuucgagcgggacaucuccaccgagaucuaccaggccggcagcacccccugcaacgggguggagggcuucaacugcuacuucccccugcaguccuacggguuccagccgaccuacggcgugggguaccagcccuaccggguggucgugcugagcuucgagcuccugcacgcccccgccacggugugcggccccaagaaguccaccaaccuggucaagaacaagugcgugaacuucaacuucaacggccucaccgggaccggcgugcugaccgagagcaacaagaaguuccugccguuccagcaguucgggcgcgacaucgccgacacgaccgacgcgguccgcgacccccagacccuggagauccucgacaucacccccugcagcuucggcgggguguccgugaucacgccgggcaccaacaccagcaaccaggucgccgugcuguaccagggcgugaacugcaccgagguccccguggccauccacgccgaccagcugacgcccaccuggcggguguacuccaccgggagcaacgucuuccagacccgcgccggcugccucaucggggcggagcacgugaacaacuccuacgagugcgacauccccaucggcgccggcaucugcgccagcuaccagacgcagaccaacuccccgcggcgcgcccggagcguggcgucccagagcaucaucgccuacaccaugucccugggggccgagaacagcgucgccuacuccaacaacagcaucgccauccccaccaacuucacgaucuccgugaccaccgagauccugcccgugagcaugaccaagacgagcgucgacugcaccauguacaucugcggcgacuccaccgagugcagcaaccuccugcugcaguacggguccuucugcacccagcucaaccgcgcgcugacgggcaucgccguggagcaggacaagaacacccaggagguguucgcccaggucaagcagaucuacaagacgcccccgaucaaggacuucgggggcuucaacuucagccagauccugcccgaccccuccaagcccagcaagcgguccuucaucgaggaccuccuguucaacaaggugacccuggccgacgccggcuucaucaagcaguacggggacugccucggcgacaucgcggcccgcgaccugaucugcgcccagaaguucaacgggcugaccgugcucccgccccugcugaccgacgagaugaucgcccaguacaccagcgcccuccuggcgggcaccaucacguccggguggaccuucggcgccggcgccgcccugcagauccccuucgcgaugcagauggccuaccgguucaacgggaucggcgucacccagaacgugcucuacgagaaccagaagcugaucgccaaccaguucaacagcgccaucgggaagauccaggacucccugagcuccaccgccagcgcgcucggcaagcugcaggacguggucaaccagaacgcccaggcccugaacacgcucgugaagcagcuguccagcaacuucggggccaucuccagcgugcugaacgacauccucucccgccuggacccgcccgaggccgagguccagaucgaccggcugaucaccggccgccuccagagccugcagaccuacgugacccagcagcugauccgggcggccgagauccgcgccagcgccaaccucgccgcgaccaagauguccgagugcgugcugggccagagcaagcgggucgacuucugcgggaagggcuaccaccugauguccuucccccagagcgcgccccacggggugguguuccuccacgucacguacgugcccgcccaggagaagaacuucaccaccgccccggccaucugccacgacggcaaggcccacuucccccgcgagggggucuucguguccaacggcacccacugguucgugacgcagcggaacuucuacgagccccagaucaucaccaccgacaacaccuucgucagcggcaacugcgacguggugaucgggaucgucaacaacacgguguacgacccccugcagccggagcuggacuccuucaaggaggagcucgacaaguacuucaagaaccacaccagccccgacguggaccugggcgacaucuccgggaucaacgccagcgucgugaacauccagaaggagaucgaccgccugaacgagguggccaagaaccucaacgagucccugaucgaccugcaggagcucggcaaguacgagcaguacaucaaguggcccugguacaucuggcugggcuucaucgccgggcugaucgcgaucgucauggugaccaucaugcucugcugcaugaccagcugcugcuccugccugaagggcugcugcagcugcggguccugcugcaaguucgacgaggacgacagcgagccggugcugaagggcgucaagcuccacuacacgugaugacucgagcugguacugcaugcacgcaaugcuagcugccccuuucccguccuggguaccccgagucucccccgaccucgggucccagguaugcucccaccuccaccugccccacucaccaccucugcuaguuccagacaccucccaagcacgcagcaaugcagcucaaaacgcuuagccuagccacacccccacgggaaacagcagugauuaaccuuuagcaauaaacgaaaguuuaacuaagcuauacuaaccccaggguuggucaauuucgugccagccacacccuggagcuagcaaaaaaaaaaaaaaaaaaaaaaaaaaaaaagcauaugacuaaaaaaaaaaaaaaaaaaaaaaaaaaaaaaaaaaaaaaaaaaaaaaaaaaaaaaaaaaaaaaaaaaaaaa

SEQ ID NO: 26841 - RNA, 4277 nt, Artificial Sequence
  SARS-CoV-2/Wuhan/WIV05/2019__EPI_ISL_402128 spike protein mRNA gc (1-1273)(K986P_V987P_H69del_V70del_D614G)
agaauaaacuaguauucuucugguccccacagacucagagagaacccgccaccauguucguguuccugguccuccugccccuggugagcucccagugcgugaaccucaccacccgcacgcagcugccgcccgccuacaccaacagcuucacccggggcgucuacuaccccgacaagguguuccgcuccagcgugcugcacuccacccaggaccucuuccugcccuucuucagcaacgucacgugguuccacgccaucuccgggaccaacggcaccaagcgguucgacaacccggugcugcccuucaacgacgggguguacuucgcgagcaccgagaaguccaacaucauccgcggcuggaucuucgggacgacccucgacagcaagacccagucccugcugaucgucaacaacgccaccaacguggugaucaaggucugcgaguuccaguucugcaacgaccccuuccucggcguguacuaccacaagaacaacaagagcuggauggaguccgaguuccggguguacagcuccgccaacaacugcacguucgaguacgucagccagcccuuccugauggaccuggagggcaagcaggggaacuucaagaaccuccgcgaguucguguucaagaacaucgacggcuacuucaagaucuacuccaagcacaccccgaucaaccuggugcgggaccugccccagggguucagcgcccucgagccccuggucgaccugcccaucggcaucaacaucacccgcuuccagacccuccuggcccugcaccgguccuaccucacgccgggggacagcagcuccggcuggaccgcgggcgccgccgccuacuacgugggguaccugcagccccgcaccuuccugcucaaguacaacgagaacggcaccaucacggacgcgguggacugcgcccuggacccccugagcgagaccaagugcacccucaaguccuucaccgucgagaaggggaucuaccagacgagcaacuuccgggugcagcccaccgaguccaucgugcgcuucccgaacaucaccaaccugugccccuucggcgaggucuucaacgccacccgguucgccagcguguacgccuggaaccgcaagcggaucuccaacugcgucgcggacuacagcgugcuguacaacuccgccagcuucuccacguucaagugcuacggcgugagccccaccaagcucaacgaccugugcuucaccaacgucuacgccgacuccuucgugauccgcggggacgaggugcggcagaucgcccccggccagaccgggaagaucgccgacuacaacuacaagcugccggacgacuucacgggcugcgucaucgcguggaacagcaacaaccucgacuccaaggucgggggcaacuacaacuaccuguaccgccuguuccgcaagagcaaccucaagcccuucgagcgggacaucuccaccgagaucuaccaggccggcagcacccccugcaacgggguggagggcuucaacugcuacuucccccugcaguccuacggguuccagccgaccaacggcgugggguaccagcccuaccggguggugguccugagcuucgagcuccugcacgcccccgccacggugugcggccccaagaaguccaccaaccuggugaagaacaagugcgucaacuucaacuucaacggccucaccgggaccggcgugcugaccgagagcaacaagaaguuccugccguuccagcaguucgggcgcgacaucgccgacacgaccgacgcggugcgcgacccccagacccuggagauccucgacaucacccccugcagcuucggcggggucuccgugaucacgccgggcaccaacaccagcaaccagguggccguccuguaccagggcgugaacugcaccgaggugcccgucgccauccacgccgaccagcugacgcccaccuggcggguguacuccaccgggagcaacguguuccagacccgcgccggcugccucaucggggcggagcacgucaacaacuccuacgagugcgacauccccaucggcgccggcaucugcgccagcuaccagacgcagaccaacuccccgcggcgcgcccggagcguggcgucccagagcaucaucgccuacaccaugucccugggggccgagaacagcguggccuacuccaacaacagcaucgccauccccaccaacuucacgaucuccgucaccaccgagauccugcccgugagcaugaccaagacgagcguggacugcaccauguacaucugcggcgacuccaccgagugcagcaaccuccugcugcaguacggguccuucugcacccagcucaaccgcgcgcugacgggcaucgccgucgagcaggacaagaacacccaggagguguucgcccaggugaagcagaucuacaagacgcccccgaucaaggacuucgggggcuucaacuucagccagauccugcccgaccccuccaagcccagcaagcgguccuucaucgaggaccuccuguucaacaaggucacccuggccgacgccggcuucaucaagcaguacggggacugccucggcgacaucgcggcccgcgaccugaucugcgcccagaaguucaacgggcugaccgugcucccgccccugcugaccgacgagaugaucgcccaguacaccagcgcccuccuggcgggcaccaucacguccggguggaccuucggcgccggcgccgcccugcagauccccuucgcgaugcagauggccuaccgguucaacgggaucggcgugacccagaacguccucuacgagaaccagaagcugaucgccaaccaguucaacagcgccaucgggaagauccaggacucccugagcuccaccgccagcgcgcucggcaagcugcaggacguggugaaccagaacgcccaggcccugaacacgcucgucaagcagcuguccagcaacuucggggccaucuccagcgugcugaacgacauccucucccgccuggacccgcccgaggccgaggugcagaucgaccggcugaucaccggccgccuccagagccugcagaccuacgucacccagcagcugauccgggcggccgagauccgcgccagcgccaaccucgccgcgaccaagauguccgagugcgugcugggccagagcaagcggguggacuucugcgggaagggcuaccaccugauguccuucccccagagcgcgccccacggggucguguuccuccacgugacguacguccccgcccaggagaagaacuucaccaccgccccggccaucugccacgacggcaaggcccacuucccccgcgaggggguguucgucuccaacggcacccacugguucgugacgcagcggaacuucuacgagccccagaucaucaccaccgacaacaccuucgugagcggcaacugcgacgucgugaucgggaucgugaacaacacggucuacgacccccugcagccggagcuggacuccuucaaggaggagcucgacaaguacuucaagaaccacaccagccccgacguggaccugggcgacaucuccgggaucaacgccagcguggucaacauccagaaggagaucgaccgccugaacgagguggccaagaaccucaacgagucccugaucgaccugcaggagcucggcaaguacgagcaguacaucaaguggcccugguacaucuggcugggcuucaucgccgggcugaucgcgaucgugauggucaccaucaugcucugcugcaugaccagcugcugcuccugccugaagggcugcugcagcugcggguccugcugcaaguucgacgaggacgacagcgagccggugcugaagggcgugaagcuccacuacacgugaugacucgagcugguacugcaugcacgcaaugcuagcugccccuuucccguccuggguaccccgagucucccccgaccucgggucccagguaugcucccaccuccaccugccccacucaccaccucugcuaguuccagacaccucccaagcacgcagcaaugcagcucaaaacgcuuagccuagccacacccccacgggaaacagcagugauuaaccuuuagcaauaaacgaaaguuuaacuaagcuauacuaaccccaggguuggucaauuucgugccagccacacccuggagcuagcaaaaaaaaaaaaaaaaaaaaaaaaaaaaaagcauaugacuaaaaaaaaaaaaaaaaaaaaaaaaaaaaaaaaaaaaaaaaaaaaaaaaaaaaaaaaaaaaaaaaaaaaaa

SEQ ID NO: 26842 - RNA, 4283 nt, Artificial Sequence
  SARS-CoV-2/Wuhan/WIV05/2019__EPI_ISL_402128 spike protein mRNA gc (1-1273)(K986P_V987P_Y453F_D614G)
agaauaaacuaguauucuucugguccccacagacucagagagaacccgccaccauguucguguuccugguccuccugccccuggugagcucccagugcgugaaccucaccacccgcacgcagcugccgcccgccuacaccaacagcuucacccggggcgucuacuaccccgacaagguguuccgcuccagcgugcugcacuccacccaggaccucuuccugcccuucuucagcaacgucacgugguuccacgccauccacguguccgggaccaacggcaccaagcgguucgacaacccggugcugcccuucaacgacggggucuacuucgcgagcaccgagaaguccaacaucauccgcggcuggaucuucgggacgacccucgacagcaagacccagucccugcugaucgugaacaacgccaccaacguggucaucaaggugugcgaguuccaguucugcaacgaccccuuccucggcguguacuaccacaagaacaacaagagcuggauggaguccgaguuccgggucuacagcuccgccaacaacugcacguucgaguacgugagccagcccuuccugauggaccuggagggcaagcaggggaacuucaagaaccuccgcgaguucguguucaagaacaucgacggcuacuucaagaucuacuccaagcacaccccgaucaaccugguccgggaccugccccagggguucagcgcccucgagccccugguggaccugcccaucggcaucaacaucacccgcuuccagacccuccuggcccugcaccgguccuaccucacgccgggggacagcagcuccggcuggaccgcgggcgccgccgccuacuacgugggguaccugcagccccgcaccuuccugcucaaguacaacgagaacggcaccaucacggacgcggucgacugcgcccuggacccccugagcgagaccaagugcacccucaaguccuucaccguggagaaggggaucuaccagacgagcaacuuccgggugcagcccaccgaguccaucguccgcuucccgaacaucaccaaccugugccccuucggcgagguguucaacgccacccgguucgccagcgucuacgccuggaaccgcaagcggaucuccaacugcguggcggacuacagcgugcuguacaacuccgccagcuucuccacguucaagugcuacggcgucagccccaccaagcucaacgaccugugcuucaccaacguguacgccgacuccuucgugauccgcggggacgagguccggcagaucgcccccggccagaccgggaagaucgccgacuacaacuacaagcugccggacgacuucacgggcugcgugaucgcguggaacagcaacaaccucgacuccaaggucgggggcaacuacaacuaccuguuccgccuguuccgcaagagcaaccucaagcccuucgagcgggacaucuccaccgagaucuaccaggccggcagcacccccugcaacgggguggagggcuucaacugcuacuucccccugcaguccuacggguuccagccgaccaacggcgugggguaccagcccuaccggguggucgugcugagcuucgagcuccugcacgcccccgccacggugugcggccccaagaaguccaccaaccuggucaagaacaagugcgugaacuucaacuucaacggccucaccgggaccggcgugcugaccgagagcaacaagaaguuccugccguuccagcaguucgggcgcgacaucgccgacacgaccgacgcgguccgcgacccccagacccuggagauccucgacaucacccccugcagcuucggcgggguguccgugaucacgccgggcaccaacaccagcaaccaggucgccgugcuguaccagggcgugaacugcaccgagguccccguggccauccacgccgaccagcugacgcccaccuggcggguguacuccaccgggagcaacgucuuccagacccgcgccggcugccucaucggggcggagcacgugaacaacuccuacgagugcgacauccccaucggcgccggcaucugcgccagcuaccagacgcagaccaacuccccgcggcgcgcccggagcguggcgucccagagcaucaucgccuacaccaugucccugggggccgagaacagcgucgccuacuccaacaacagcaucgccauccccaccaacuucacgaucuccgugaccaccgagauccugcccgugagcaugaccaagacgagcgucgacugcaccauguacaucugcggcgacuccaccgagugcagcaaccuccugcugcaguacggguccuucugcacccagcucaaccgcgcgcugacgggcaucgccguggagcaggacaagaacacccaggagguguucgcccaggucaagcagaucuacaagacgcccccgaucaaggacuucgggggcuucaacuucagccagauccugcccgaccccuccaagcccagcaagcgguccuucaucgaggaccuccuguucaacaaggugacccuggccgacgccggcuucaucaagcaguacggggacugccucggcgacaucgcggcccgcgaccugaucugcgcccagaaguucaacgggcugaccgugcucccgccccugcugaccgacgagaugaucgcccaguacaccagcgcccuccuggcgggcaccaucacguccggguggaccuucggcgccggcgccgcccugcagauccccuucgcgaugcagauggccuaccgguucaacgggaucggcgucacccagaacgugcucuacgagaaccagaagcugaucgccaaccaguucaacagcgccaucgggaagauccaggacucccugagcuccaccgccagcgcgcucggcaagcugcaggacguggucaaccagaacgcccaggcccugaacacgcucgugaagcagcuguccagcaacuucggggccaucuccagcgugcugaacgacauccucucccgccuggacccgcccgaggccgagguccagaucgaccggcugaucaccggccgccuccagagccugcagaccuacgugacccagcagcugauccgggcggccgagauccgcgccagcgccaaccucgccgcgaccaagauguccgagugcgugcugggccagagcaagcgggucgacuucugcgggaagggcuaccaccugauguccuucccccagagcgcgccccacggggugguguuccuccacgucacguacgugcccgcccaggagaagaacuucaccaccgccccggccaucugccacgacggcaaggcccacuucccccgcgagggggucuucguguccaacggcacccacugguucgugacgcagcggaacuucuacgagccccagaucaucaccaccgacaacaccuucgucagcggcaacugcgacguggugaucgggaucgucaacaacacgguguacgacccccugcagccggagcuggacuccuucaaggaggagcucgacaaguacuucaagaaccacaccagccccgacguggaccugggcgacaucuccgggaucaacgccagcgucgugaacauccagaaggagaucgaccgccugaacgagguggccaagaaccucaacgagucccugaucgaccugcaggagcucggcaaguacgagcaguacaucaaguggcccugguacaucuggcugggcuucaucgccgggcugaucgcgaucgucauggugaccaucaugcucugcugcaugaccagcugcugcuccugccugaagggcugcugcagcugcggguccugcugcaaguucgacgaggacgacagcgagccggugcugaagggcgucaagcuccacuacacgugaugacucgagcugguacugcaugcacgcaaugcuagcugccccuuucccguccuggguaccccgagucucccccgaccucgggucccagguaugcucccaccuccaccugccccacucaccaccucugcuaguuccagacaccucccaagcacgcagcaaugcagcucaaaacgcuuagccuagccacacccccacgggaaacagcagugauuaaccuuuagcaauaaacgaaaguuuaacuaagcuauacuaaccccaggguuggucaauuucgugccagccacacccuggagcuagcaaaaaaaaaaaaaaaaaaaaaaaaaaaaaagcauaugacuaaaaaaaaaaaaaaaaaaaaaaaaaaaaaaaaaaaaaaaaaaaaaaaaaaaaaaaaaaaaaaaaaaaaaa

SEQ ID NO: 26843 - RNA, 4283 nt, Artificial Sequence
  SARS-CoV-2/Wuhan/WIV05/2019__EPI_ISL_402128 spike protein mRNA gc (1-1273)(K986P_V987P_D614G_I692V)
agaauaaacuaguauucuucugguccccacagacucagagagaacccgccaccauguucguguuccugguccuccugccccuggugagcucccagugcgugaaccucaccacccgcacgcagcugccgcccgccuacaccaacagcuucacccggggcgucuacuaccccgacaagguguuccgcuccagcgugcugcacuccacccaggaccucuuccugcccuucuucagcaacgucacgugguuccacgccauccacguguccgggaccaacggcaccaagcgguucgacaacccggugcugcccuucaacgacggggucuacuucgcgagcaccgagaaguccaacaucauccgcggcuggaucuucgggacgacccucgacagcaagacccagucccugcugaucgugaacaacgccaccaacguggucaucaaggugugcgaguuccaguucugcaacgaccccuuccucggcguguacuaccacaagaacaacaagagcuggauggaguccgaguuccgggucuacagcuccgccaacaacugcacguucgaguacgugagccagcccuuccugauggaccuggagggcaagcaggggaacuucaagaaccuccgcgaguucguguucaagaacaucgacggcuacuucaagaucuacuccaagcacaccccgaucaaccugguccgggaccugccccagggguucagcgcccucgagccccugguggaccugcccaucggcaucaacaucacccgcuuccagacccuccuggcccugcaccgguccuaccucacgccgggggacagcagcuccggcuggaccgcgggcgccgccgccuacuacgugggguaccugcagccccgcaccuuccugcucaaguacaacgagaacggcaccaucacggacgcggucgacugcgcccuggacccccugagcgagaccaagugcacccucaaguccuucaccguggagaaggggaucuaccagacgagcaacuuccgggugcagcccaccgaguccaucguccgcuucccgaacaucaccaaccugugccccuucggcgagguguucaacgccacccgguucgccagcgucuacgccuggaaccgcaagcggaucuccaacugcguggcggacuacagcgugcuguacaacuccgccagcuucuccacguucaagugcuacggcgucagccccaccaagcucaacgaccugugcuucaccaacguguacgccgacuccuucgugauccgcggggacgagguccggcagaucgcccccggccagaccgggaagaucgccgacuacaacuacaagcugccggacgacuucacgggcugcgugaucgcguggaacagcaacaaccucgacuccaaggucgggggcaacuacaacuaccuguaccgccuguuccgcaagagcaaccucaagcccuucgagcgggacaucuccaccgagaucuaccaggccggcagcacccccugcaacgggguggagggcuucaacugcuacuucccccugcaguccuacggguuccagccgaccaacggcgugggguaccagcccuaccggguggucgugcugagcuucgagcuccugcacgcccccgccacggugugcggccccaagaaguccaccaaccuggucaagaacaagugcgugaacuucaacuucaacggccucaccgggaccggcgugcugaccgagagcaacaagaaguuccugccguuccagcaguucgggcgcgacaucgccgacacgaccgacgcgguccgcgacccccagacccuggagauccucgacaucacccccugcagcuucggcgggguguccgugaucacgccgggcaccaacaccagcaaccaggucgccgugcuguaccagggcgugaacugcaccgagguccccguggccauccacgccgaccagcugacgcccaccuggcggguguacuccaccgggagcaacgucuuccagacccgcgccggcugccucaucggggcggagcacgugaacaacuccuacgagugcgacauccccaucggcgccggcaucugcgccagcuaccagacgcagaccaacuccccgcggcgcgcccggagcguggcgucccagagcgucaucgccuacaccaugucccugggggccgagaacagcguggccuacuccaacaacagcaucgccauccccaccaacuucacgaucuccgugaccaccgagauccugcccgucagcaugaccaagacgagcguggacugcaccauguacaucugcggcgacuccaccgagugcagcaaccuccugcugcaguacggguccuucugcacccagcucaaccgcgcgcugacgggcaucgccguggagcaggacaagaacacccaggaggucuucgcccaggugaagcagaucuacaagacgcccccgaucaaggacuucgggggcuucaacuucagccagauccugcccgaccccuccaagcccagcaagcgguccuucaucgaggaccuccuguucaacaaggugacccuggccgacgccggcuucaucaagcaguacggggacugccucggcgacaucgcggcccgcgaccugaucugcgcccagaaguucaacgggcugaccguccucccgccccugcugaccgacgagaugaucgcccaguacaccagcgcccuccuggcgggcaccaucacguccggguggaccuucggcgccggcgccgcccugcagauccccuucgcgaugcagauggccuaccgguucaacgggaucggcgugacccagaacgugcucuacgagaaccagaagcugaucgccaaccaguucaacagcgccaucgggaagauccaggacucccugagcuccaccgccagcgcgcucggcaagcugcaggacgucgugaaccagaacgcccaggcccugaacacgcucgugaagcagcuguccagcaacuucggggccaucuccagcguccugaacgacauccucucccgccuggacccgcccgaggccgaggugcagaucgaccggcugaucaccggccgccuccagagccugcagaccuacgugacccagcagcugauccgggcggccgagauccgcgccagcgccaaccucgccgcgaccaagauguccgagugcguccugggccagagcaagcggguggacuucugcgggaagggcuaccaccugauguccuucccccagagcgcgccccacgggguggucuuccuccacgugacguacguccccgcccaggagaagaacuucaccaccgccccggccaucugccacgacggcaaggcccacuucccccgcgaggggguguucguguccaacggcacccacugguucgucacgcagcggaacuucuacgagccccagaucaucaccaccgacaacaccuucgugagcggcaacugcgacguggucaucgggaucgugaacaacacgguguacgacccccugcagccggagcuggacuccuucaaggaggagcucgacaaguacuucaagaaccacaccagccccgacgucgaccugggcgacaucuccgggaucaacgccagcguggugaacauccagaaggagaucgaccgccugaacgaggucgccaagaaccucaacgagucccugaucgaccugcaggagcucggcaaguacgagcaguacaucaaguggcccugguacaucuggcugggcuucaucgccgggcugaucgcgaucgugauggugaccaucaugcucugcugcaugaccagcugcugcuccugccugaagggcugcugcagcugcggguccugcugcaaguucgacgaggacgacagcgagccgguccugaagggcgugaagcuccacuacacgugaugacucgagcugguacugcaugcacgcaaugcuagcugccccuuucccguccuggguaccccgagucucccccgaccucgggucccagguaugcucccaccuccaccugccccacucaccaccucugcuaguuccagacaccucccaagcacgcagcaaugcagcucaaaacgcuuagccuagccacacccccacgggaaacagcagugauuaaccuuuagcaauaaacgaaaguuuaacuaagcuauacuaaccccaggguuggucaauuucgugccagccacacccuggagcuagcaaaaaaaaaaaaaaaaaaaaaaaaaaaaaagcauaugacuaaaaaaaaaaaaaaaaaaaaaaaaaaaaaaaaaaaaaaaaaaaaaaaaaaaaaaaaaaaaaaaaaaaaaa

SEQ ID NO: 26844 - RNA, 4283 nt, Artificial Sequence
  SARS-CoV-2/Wuhan/WIV05/2019__EPI_ISL_402128 spike protein mRNA gc (1-1273)(K986P_V987P_D614G_M1229I)
agaauaaacuaguauucuucugguccccacagacucagagagaacccgccaccauguucguguuccugguccuccugccccuggugagcucccagugcgugaaccucaccacccgcacgcagcugccgcccgccuacaccaacagcuucacccggggcgucuacuaccccgacaagguguuccgcuccagcgugcugcacuccacccaggaccucuuccugcccuucuucagcaacgucacgugguuccacgccauccacguguccgggaccaacggcaccaagcgguucgacaacccggugcugcccuucaacgacggggucuacuucgcgagcaccgagaaguccaacaucauccgcggcuggaucuucgggacgacccucgacagcaagacccagucccugcugaucgugaacaacgccaccaacguggucaucaaggugugcgaguuccaguucugcaacgaccccuuccucggcguguacuaccacaagaacaacaagagcuggauggaguccgaguuccgggucuacagcuccgccaacaacugcacguucgaguacgugagccagcccuuccugauggaccuggagggcaagcaggggaacuucaagaaccuccgcgaguucguguucaagaacaucgacggcuacuucaagaucuacuccaagcacaccccgaucaaccugguccgggaccugccccagggguucagcgcccucgagccccugguggaccugcccaucggcaucaacaucacccgcuuccagacccuccuggcccugcaccgguccuaccucacgccgggggacagcagcuccggcuggaccgcgggcgccgccgccuacuacgugggguaccugcagccccgcaccuuccugcucaaguacaacgagaacggcaccaucacggacgcggucgacugcgcccuggacccccugagcgagaccaagugcacccucaaguccuucaccguggagaaggggaucuaccagacgagcaacuuccgggugcagcccaccgaguccaucguccgcuucccgaacaucaccaaccugugccccuucggcgagguguucaacgccacccgguucgccagcgucuacgccuggaaccgcaagcggaucuccaacugcguggcggacuacagcgugcuguacaacuccgccagcuucuccacguucaagugcuacggcgucagccccaccaagcucaacgaccugugcuucaccaacguguacgccgacuccuucgugauccgcggggacgagguccggcagaucgcccccggccagaccgggaagaucgccgacuacaacuacaagcugccggacgacuucacgggcugcgugaucgcguggaacagcaacaaccucgacuccaaggucgggggcaacuacaacuaccuguaccgccuguuccgcaagagcaaccucaagcccuucgagcgggacaucuccaccgagaucuaccaggccggcagcacccccugcaacgggguggagggcuucaacugcuacuucccccugcaguccuacggguuccagccgaccaacggcgugggguaccagcccuaccggguggucgugcugagcuucgagcuccugcacgcccccgccacggugugcggccccaagaaguccaccaaccuggucaagaacaagugcgugaacuucaacuucaacggccucaccgggaccggcgugcugaccgagagcaacaagaaguuccugccguuccagcaguucgggcgcgacaucgccgacacgaccgacgcgguccgcgacccccagacccuggagauccucgacaucacccccugcagcuucggcgggguguccgugaucacgccgggcaccaacaccagcaaccaggucgccgugcuguaccagggcgugaacugcaccgagguccccguggccauccacgccgaccagcugacgcccaccuggcggguguacuccaccgggagcaacgucuuccagacccgcgccggcugccucaucggggcggagcacgugaacaacuccuacgagugcgacauccccaucggcgccggcaucugcgccagcuaccagacgcagaccaacuccccgcggcgcgcccggagcguggcgucccagagcaucaucgccuacaccaugucccugggggccgagaacagcgucgccuacuccaacaacagcaucgccauccccaccaacuucacgaucuccgugaccaccgagauccugcccgugagcaugaccaagacgagcgucgacugcaccauguacaucugcggcgacuccaccgagugcagcaaccuccugcugcaguacggguccuucugcacccagcucaaccgcgcgcugacgggcaucgccguggagcaggacaagaacacccaggagguguucgcccaggucaagcagaucuacaagacgcccccgaucaaggacuucgggggcuucaacuucagccagauccugcccgaccccuccaagcccagcaagcgguccuucaucgaggaccuccuguucaacaaggugacccuggccgacgccggcuucaucaagcaguacggggacugccucggcgacaucgcggcccgcgaccugaucugcgcccagaaguucaacgggcugaccgugcucccgccccugcugaccgacgagaugaucgcccaguacaccagcgcccuccuggcgggcaccaucacguccggguggaccuucggcgccggcgccgcccugcagauccccuucgcgaugcagauggccuaccgguucaacgggaucggcgucacccagaacgugcucuacgagaaccagaagcugaucgccaaccaguucaacagcgccaucgggaagauccaggacucccugagcuccaccgccagcgcgcucggcaagcugcaggacguggucaaccagaacgcccaggcccugaacacgcucgugaagcagcuguccagcaacuucggggccaucuccagcgugcugaacgacauccucucccgccuggacccgcccgaggccgagguccagaucgaccggcugaucaccggccgccuccagagccugcagaccuacgugacccagcagcugauccgggcggccgagauccgcgccagcgccaaccucgccgcgaccaagauguccgagugcgugcugggccagagcaagcgggucgacuucugcgggaagggcuaccaccugauguccuucccccagagcgcgccccacggggugguguuccuccacgucacguacgugcccgcccaggagaagaacuucaccaccgccccggccaucugccacgacggcaaggcccacuucccccgcgagggggucuucguguccaacggcacccacugguucgugacgcagcggaacuucuacgagccccagaucaucaccaccgacaacaccuucgucagcggcaacugcgacguggugaucgggaucgucaacaacacgguguacgacccccugcagccggagcuggacuccuucaaggaggagcucgacaaguacuucaagaaccacaccagccccgacguggaccugggcgacaucuccgggaucaacgccagcgucgugaacauccagaaggagaucgaccgccugaacgagguggccaagaaccucaacgagucccugaucgaccugcaggagcucggcaaguacgagcaguacaucaaguggcccugguacaucuggcugggcuucaucgccgggcugaucgcgaucgucaucgugaccaucaugcucugcugcaugaccagcugcugcuccugccugaagggcugcugcagcugcggguccugcugcaaguucgacgaggacgacagcgagccggugcugaagggcgucaagcuccacuacacgugaugacucgagcugguacugcaugcacgcaaugcuagcugccccuuucccguccuggguaccccgagucucccccgaccucgggucccagguaugcucccaccuccaccugccccacucaccaccucugcuaguuccagacaccucccaagcacgcagcaaugcagcucaaaacgcuuagccuagccacacccccacgggaaacagcagugauuaaccuuuagcaauaaacgaaaguuuaacuaagcuauacuaaccccaggguuggucaauuucgugccagccacacccuggagcuagcaaaaaaaaaaaaaaaaaaaaaaaaaaaaaagcauaugacuaaaaaaaaaaaaaaaaaaaaaaaaaaaaaaaaaaaaaaaaaaaaaaaaaaaaaaaaaaaaaaaaaaaaaa

SEQ ID NO: 26845 - RNA, 4277 nt, Artificial Sequence
  SARS-CoV-2/Wuhan/WIV05/2019__EPI_ISL_402128 spike protein mRNA gc (1-1273)(K986P_V987P_H69del_V70del_A222V_Y453F_S477N_D614G_I692V)
agaauaaacuaguauucuucugguccccacagacucagagagaacccgccaccauguucguguuccugguccuccugccccuggugagcucccagugcgugaaccucaccacccgcacgcagcugccgcccgccuacaccaacagcuucacccggggcgucuacuaccccgacaagguguuccgcuccagcgugcugcacuccacccaggaccucuuccugcccuucuucagcaacgucacgugguuccacgccaucuccgggaccaacggcaccaagcgguucgacaacccggugcugcccuucaacgacgggguguacuucgcgagcaccgagaaguccaacaucauccgcggcuggaucuucgggacgacccucgacagcaagacccagucccugcugaucgucaacaacgccaccaacguggugaucaaggucugcgaguuccaguucugcaacgaccccuuccucggcguguacuaccacaagaacaacaagagcuggauggaguccgaguuccggguguacagcuccgccaacaacugcacguucgaguacgucagccagcccuuccugauggaccuggagggcaagcaggggaacuucaagaaccuccgcgaguucguguucaagaacaucgacggcuacuucaagaucuacuccaagcacaccccgaucaaccuggugcgggaccugccccagggguucagcguccucgagccccugguggaccugcccaucggcaucaacaucacccgcuuccagacccuccuggcccugcaccgguccuaccucacgccgggggacagcagcuccggcuggaccgccggcgcggccgccuacuacgugggguaccugcagccccgcaccuuccugcucaaguacaacgagaacggcaccaucacggacgccgucgacugcgcgcuggacccccugagcgagaccaagugcacccucaaguccuucaccguggagaaggggaucuaccagacgagcaacuuccgggugcagcccaccgaguccaucguccgcuucccgaacaucaccaaccugugccccuucggcgagguguucaacgccacccgguucgccagcgucuacgccuggaaccgcaagcggaucuccaacugcguggccgacuacagcgugcuguacaacuccgcgagcuucuccacguucaagugcuacggcgucagccccaccaagcucaacgaccugugcuucaccaacguguacgccgacuccuucgugauccgcggggacgagguccggcagaucgcccccggccagaccgggaagaucgccgacuacaacuacaagcugccggacgacuucacgggcugcgugaucgccuggaacagcaacaaccucgacuccaaggucgggggcaacuacaacuaccuguuccgccuguuccgcaagagcaaccucaagcccuucgagcgggacaucuccaccgagaucuaccaggcgggcaacacccccugcaacgggguggagggcuucaacugcuacuucccccugcagagcuacggguuccagccgaccaacggcgugggguaccagcccuaccggguggucgugcuguccuucgagcuccugcacgcccccgccacggugugcggccccaagaaguccaccaaccuggucaagaacaagugcgugaacuucaacuucaacggccucaccgggaccggcgugcugaccgagagcaacaagaaguuccugccguuccagcaguucgggcgcgacaucgccgacacgaccgacgccguccgcgacccccagacccuggagauccucgacaucacccccugcagcuucggcggggugagcgugaucacgccgggcaccaacaccuccaaccaggucgcggugcuguaccagggcgugaacugcaccgagguccccguggccauccacgccgaccagcugacgcccaccuggcggguguacagcaccggguccaacgucuuccagacccgcgccggcugccucaucggggccgagcacgugaacaacagcuacgagugcgacauccccaucggcgcgggcaucugcgccuccuaccagacgcagaccaacagcccgcggcgcgcccgguccguggccagccaguccgucaucgcguacaccaugagccugggggccgagaacuccguggccuacagcaacaacuccaucgccauccccaccaacuucacgaucagcgugaccaccgagauccugcccgucuccaugaccaagacgagcguggacugcaccauguacaucugcggcgacagcaccgagugcuccaaccuccugcugcaguacgggagcuucugcacccagcucaaccgcgcccugacgggcaucgcgguggagcaggacaagaacacccaggaggucuucgcccaggugaagcagaucuacaagacgcccccgaucaaggacuucgggggcuucaacuucucccagauccugcccgaccccagcaagcccuccaagcggagcuucaucgaggaccuccuguucaacaaggugacccuggccgacgccggcuucaucaagcaguacggggacugccucggcgacaucgccgcgcgcgaccugaucugcgcccagaaguucaacgggcugaccguccucccgccccugcugaccgacgagaugaucgcccaguacaccuccgcccuccuggccggcaccaucacgagcggguggaccuucggcgcgggcgccgcccugcagauccccuucgccaugcagauggcguaccgguucaacgggaucggcgugacccagaacgugcucuacgagaaccagaagcugaucgccaaccaguucaacuccgccaucgggaagauccaggacagccuguccagcaccgccuccgcccucggcaagcugcaggacgucgugaaccagaacgcgcaggcccugaacacgcucgugaagcagcugagcuccaacuucggggccaucagcuccguccugaacgacauccucagccgccuggacccgcccgaggccgaggugcagaucgaccggcugaucaccggccgccuccagucccugcagaccuacgugacccagcagcugauccgggccgcggagauccgcgccagcgccaaccucgccgccaccaagaugagcgagugcguccugggccaguccaagcggguggacuucugcgggaagggcuaccaccugaugagcuucccccaguccgcgccccacgggguggucuuccuccacgugacguacguccccgcccaggagaagaacuucaccaccgccccggccaucugccacgacggcaaggcgcacuucccccgcgaggggguguucgugagcaacggcacccacugguucgucacgcagcggaacuucuacgagccccagaucaucaccaccgacaacaccuucguguccggcaacugcgacguggucaucgggaucgugaacaacacgguguacgacccccugcagccggagcuggacagcuucaaggaggagcucgacaaguacuucaagaaccacaccucccccgacgucgaccugggcgacaucagcgggaucaacgccuccguggugaacauccagaaggagaucgaccgccugaacgaggucgccaagaaccucaacgagagccugaucgaccugcaggagcucggcaaguacgagcaguacaucaaguggcccugguacaucuggcugggcuucaucgccgggcugaucgccaucgugauggugaccaucaugcucugcugcaugaccuccugcugcagcugccugaagggcugcugcuccugcgggagcugcugcaaguucgacgaggacgacuccgagccgguccugaagggcgugaagcuccacuacacgugaugacucgagcugguacugcaugcacgcaaugcuagcugccccuuucccguccuggguaccccgagucucccccgaccucgggucccagguaugcucccaccuccaccugccccacucaccaccucugcuaguuccagacaccucccaagcacgcagcaaugcagcucaaaacgcuuagccuagccacacccccacgggaaacagcagugauuaaccuuuagcaauaaacgaaaguuuaacuaagcuauacuaaccccaggguuggucaauuucgugccagccacacccuggagcuagcaaaaaaaaaaaaaaaaaaaaaaaaaaaaaagcauaugacuaaaaaaaaaaaaaaaaaaaaaaaaaaaaaaaaaaaaaaaaaaaaaaaaaaaaaaaaaaaaaaaaaaaaaa

SEQ ID NO: 26846 - RNA, 4277 nt, Artificial Sequence
  SARS-CoV-2/Wuhan/WIV05/2019__EPI_ISL_402128 spike protein mRNA gc (1-1273)(K986P_V987P_H69del_V70del_Y453F_D614G_I692V_M1229I)
agaauaaacuaguauucuucugguccccacagacucagagagaacccgccaccauguucguguuccugguccuccugccccuggugagcucccagugcgugaaccucaccacccgcacgcagcugccgcccgccuacaccaacagcuucacccggggcgucuacuaccccgacaagguguuccgcuccagcgugcugcacuccacccaggaccucuuccugcccuucuucagcaacgucacgugguuccacgccaucuccgggaccaacggcaccaagcgguucgacaacccggugcugcccuucaacgacgggguguacuucgcgagcaccgagaaguccaacaucauccgcggcuggaucuucgggacgacccucgacagcaagacccagucccugcugaucgucaacaacgccaccaacguggugaucaaggucugcgaguuccaguucugcaacgaccccuuccucggcguguacuaccacaagaacaacaagagcuggauggaguccgaguuccggguguacagcuccgccaacaacugcacguucgaguacgucagccagcccuuccugauggaccuggagggcaagcaggggaacuucaagaaccuccgcgaguucguguucaagaacaucgacggcuacuucaagaucuacuccaagcacaccccgaucaaccuggugcgggaccugccccagggguucagcgcccucgagccccuggucgaccugcccaucggcaucaacaucacccgcuuccagacccuccuggcccugcaccgguccuaccucacgccgggggacagcagcuccggcuggaccgcgggcgccgccgccuacuacgugggguaccugcagccccgcaccuuccugcucaaguacaacgagaacggcaccaucacggacgcgguggacugcgcccuggacccccugagcgagaccaagugcacccucaaguccuucaccgucgagaaggggaucuaccagacgagcaacuuccgggugcagcccaccgaguccaucgugcgcuucccgaacaucaccaaccugugccccuucggcgaggucuucaacgccacccgguucgccagcguguacgccuggaaccgcaagcggaucuccaacugcgucgcggacuacagcgugcuguacaacuccgccagcuucuccacguucaagugcuacggcgugagccccaccaagcucaacgaccugugcuucaccaacgucuacgccgacuccuucgugauccgcggggacgaggugcggcagaucgcccccggccagaccgggaagaucgccgacuacaacuacaagcugccggacgacuucacgggcugcgucaucgcguggaacagcaacaaccucgacuccaaggucgggggcaacuacaacuaccuguuccgccuguuccgcaagagcaaccucaagcccuucgagcgggacaucuccaccgagaucuaccaggccggcagcacccccugcaacgggguggagggcuucaacugcuacuucccccugcaguccuacggguuccagccgaccaacggcgugggguaccagcccuaccggguggugguccugagcuucgagcuccugcacgcccccgccacggugugcggccccaagaaguccaccaaccuggugaagaacaagugcgucaacuucaacuucaacggccucaccgggaccggcgugcugaccgagagcaacaagaaguuccugccguuccagcaguucgggcgcgacaucgccgacacgaccgacgcggugcgcgacccccagacccuggagauccucgacaucacccccugcagcuucggcggggucuccgugaucacgccgggcaccaacaccagcaaccagguggccguccuguaccagggcgugaacugcaccgaggugcccgucgccauccacgccgaccagcugacgcccaccuggcggguguacuccaccgggagcaacguguuccagacccgcgccggcugccucaucggggcggagcacgucaacaacuccuacgagugcgacauccccaucggcgccggcaucugcgccagcuaccagacgcagaccaacuccccgcggcgcgcccggagcguggcgucccagagcgugaucgccuacaccaugucccugggggccgagaacagcgucgccuacuccaacaacagcaucgccauccccaccaacuucacgaucuccgugaccaccgagauccugcccgugagcaugaccaagacgagcgucgacugcaccauguacaucugcggcgacuccaccgagugcagcaaccuccugcugcaguacggguccuucugcacccagcucaaccgcgcgcugacgggcaucgccguggagcaggacaagaacacccaggagguguucgcccaggucaagcagaucuacaagacgcccccgaucaaggacuucgggggcuucaacuucagccagauccugcccgaccccuccaagcccagcaagcgguccuucaucgaggaccuccuguucaacaaggugacccuggccgacgccggcuucaucaagcaguacggggacugccucggcgacaucgcggcccgcgaccugaucugcgcccagaaguucaacgggcugaccgugcucccgccccugcugaccgacgagaugaucgcccaguacaccagcgcccuccuggcgggcaccaucacguccggguggaccuucggcgccggcgccgcccugcagauccccuucgcgaugcagauggccuaccgguucaacgggaucggcgucacccagaacgugcucuacgagaaccagaagcugaucgccaaccaguucaacagcgccaucgggaagauccaggacucccugagcuccaccgccagcgcgcucggcaagcugcaggacguggucaaccagaacgcccaggcccugaacacgcucgugaagcagcuguccagcaacuucggggccaucuccagcgugcugaacgacauccucucccgccuggacccgcccgaggccgagguccagaucgaccggcugaucaccggccgccuccagagccugcagaccuacgugacccagcagcugauccgggcggccgagauccgcgccagcgccaaccucgccgcgaccaagauguccgagugcgugcugggccagagcaagcgggucgacuucugcgggaagggcuaccaccugauguccuucccccagagcgcgccccacggggugguguuccuccacgucacguacgugcccgcccaggagaagaacuucaccaccgccccggccaucugccacgacggcaaggcccacuucccccgcgagggggucuucguguccaacggcacccacugguucgugacgcagcggaacuucuacgagccccagaucaucaccaccgacaacaccuucgucagcggcaacugcgacguggugaucgggaucgucaacaacacgguguacgacccccugcagccggagcuggacuccuucaaggaggagcucgacaaguacuucaagaaccacaccagccccgacguggaccugggcgacaucuccgggaucaacgccagcgucgugaacauccagaaggagaucgaccgccugaacgagguggccaagaaccucaacgagucccugaucgaccugcaggagcucggcaaguacgagcaguacaucaaguggcccugguacaucuggcugggcuucaucgccgggcugaucgcgaucgucaucgugaccaucaugcucugcugcaugaccagcugcugcuccugccugaagggcugcugcagcugcggguccugcugcaaguucgacgaggacgacagcgagccggugcugaagggcgucaagcuccacuacacgugaugacucgagcugguacugcaugcacgcaaugcuagcugccccuuucccguccuggguaccccgagucucccccgaccucgggucccagguaugcucccaccuccaccugccccacucaccaccucugcuaguuccagacaccucccaagcacgcagcaaugcagcucaaaacgcuuagccuagccacacccccacgggaaacagcagugauuaaccuuuagcaauaaacgaaaguuuaacuaagcuauacuaaccccaggguuggucaauuucgugccagccacacccuggagcuagcaaaaaaaaaaaaaaaaaaaaaaaaaaaaaagcauaugacuaaaaaaaaaaaaaaaaaaaaaaaaaaaaaaaaaaaaaaaaaaaaaaaaaaaaaaaaaaaaaaaaaaaaaa

SEQ ID NO: 26847 - RNA, 4274 nt, Artificial Sequence
  SARS-CoV-2/Wuhan/WIV05/2019__EPI_ISL_402128 spike protein mRNA gc (1-1273)(K986P_V987P_K986P_V987P_H69del_V70del_Y144del_N501Y_A570 D_D614G_P681H_T716I_S982A_D1118H)
agaauaaacuaguauucuucugguccccacagacucagagagaacccgccaccauguucguguuccugguccuccugccccuggugagcucccagugcgugaaccucaccacccgcacgcagcugccgcccgccuacaccaacagcuucacccggggcgucuacuaccccgacaagguguuccgcuccagcgugcugcacuccacccaggaccucuuccugcccuucuucagcaacgucacgugguuccacgccaucuccgggaccaacggcaccaagcgguucgacaacccggugcugcccuucaacgacgggguguacuucgcgagcaccgagaaguccaacaucauccgcggcuggaucuucgggacgacccucgacagcaagacccagucccugcugaucgucaacaacgccaccaacguggugaucaaggucugcgaguuccaguucugcaacgaccccuuccucggcguguaccacaagaacaacaagagcuggauggaguccgaguuccggguguacagcuccgccaacaacugcacguucgaguacgucagccagcccuuccugauggaccuggagggcaagcaggggaacuucaagaaccuccgcgaguucguguucaagaacaucgacggcuacuucaagaucuacuccaagcacaccccgaucaaccuggugcgggaccugccccagggguucagcgcccucgagccccuggucgaccugcccaucggcaucaacaucacccgcuuccagacccuccuggcccugcaccgguccuaccucacgccgggggacagcagcuccggcuggaccgcgggcgccgccgccuacuacgugggguaccugcagccccgcaccuuccugcucaaguacaacgagaacggcaccaucacggacgcgguggacugcgcccuggacccccugagcgagaccaagugcacccucaaguccuucaccgucgagaaggggaucuaccagacgagcaacuuccgggugcagcccaccgaguccaucgugcgcuucccgaacaucaccaaccugugccccuucggcgaggucuucaacgccacccgguucgccagcguguacgccuggaaccgcaagcggaucuccaacugcgucgcggacuacagcgugcuguacaacuccgccagcuucuccacguucaagugcuacggcgugagccccaccaagcucaacgaccugugcuucaccaacgucuacgccgacuccuucgugauccgcggggacgaggugcggcagaucgcccccggccagaccgggaagaucgccgacuacaacuacaagcugccggacgacuucacgggcugcgucaucgcguggaacagcaacaaccucgacuccaaggucgggggcaacuacaacuaccuguaccgccuguuccgcaagagcaaccucaagcccuucgagcgggacaucuccaccgagaucuaccaggccggcagcacccccugcaacgggguggagggcuucaacugcuacuucccccugcaguccuacggguuccagccgaccuacggcgugggguaccagcccuaccggguggugguccugagcuucgagcuccugcacgcccccgccacggugugcggccccaagaaguccaccaaccuggugaagaacaagugcgucaacuucaacuucaacggccucaccgggaccggcgugcugaccgagagcaacaagaaguuccugccguuccagcaguucgggcgcgacaucgacgacacgaccgacgccgugcgcgacccccagacccuggagauccucgacaucacccccugcagcuucggcggggucuccgugaucacgccgggcaccaacaccagcaaccagguggcgguccuguaccagggcgugaacugcaccgaggugcccgucgccauccacgccgaccagcugacgcccaccuggcggguguacuccaccgggagcaacguguuccagacccgcgccggcugccucaucggggccgagcacgucaacaacuccuacgagugcgacauccccaucggcgcgggcaucugcgccagcuaccagacgcagaccaacucccaccggcgcgcccggagcguggccucccagagcaucaucgcguacaccaugucccugggggccgagaacagcguggccuacuccaacaacagcaucgccaucccgaucaacuucaccaucuccgucacgaccgagauccugcccgugagcaugaccaagaccagcguggacugcacgauguacaucugcggcgacuccaccgagugcagcaaccuccugcugcaguacggguccuucugcacccagcucaaccgcgcccugaccggcaucgcggucgagcaggacaagaacacgcaggagguguucgcccaggugaagcagaucuacaagaccccgcccaucaaggacuucgggggcuucaacuucagccagauccugcccgaccccuccaagcccagcaagcgguccuucaucgaggaccuccuguucaacaaggucacccuggccgacgccggcuucaucaagcaguacggggacugccucggcgacaucgccgcgcgcgaccugaucugcgcccagaaguucaacgggcugaccgugcugcccccgcuccugacggacgagaugaucgcccaguacaccagcgcccuccuggccggcaccaucaccuccggguggacguucggcgcgggcgccgcccugcagauccccuucgccaugcagauggcguaccgguucaacgggaucggcgugacccagaacguccucuacgagaaccagaagcugaucgccaaccaguucaacagcgccaucgggaagauccaggacucccugagcuccaccgccagcgcccucggcaagcugcaggacguggugaaccagaacgcgcaggcccugaacacccucgucaagcagcuguccagcaacuucggggccaucuccagcgugcugaacgacauccucgcccgccuggacccgcccgaggccgaggugcagaucgaccggcugaucacgggccgccuccagucccugcagaccuacgucacccagcagcugauccgggcggccgagauccgcgccagcgccaaccucgccgcgaccaagaugagcgagugcgugcugggccaguccaagcggguggacuucugcgggaagggcuaccaccugaugagcuucccccaguccgcgccccacggggucguguuccuccacgugaccuacguccccgcccaggagaagaacuucacgaccgcccccgccaucugccacgacggcaaggcccacuucccgcgcgaggggguguucgucagcaacggcacccacugguucgugacccagcggaacuucuacgagccccagaucaucacgacccacaacaccuucguguccggcaacugcgacgucgugaucgggaucgugaacaacaccgucuacgacccccugcagcccgagcuggacagcuucaaggaggagcucgacaaguacuucaagaaccacacguccccggacguggaccugggcgacaucagcgggaucaacgccuccguggucaacauccagaaggagaucgaccgccugaacgagguggccaagaaccucaacgagagccugaucgaccugcaggagcucggcaaguacgagcaguacaucaaguggcccugguacaucuggcugggcuucaucgccgggcugaucgcgaucgugauggucaccaucaugcucugcugcaugaccuccugcugcagcugccugaagggcugcugcuccugcgggagcugcugcaaguucgacgaggacgacuccgagcccgugcugaagggcgugaagcuccacuacaccugaugacucgagcugguacugcaugcacgcaaugcuagcugccccuuucccguccuggguaccccgagucucccccgaccucgggucccagguaugcucccaccuccaccugccccacucaccaccucugcuaguuccagacaccucccaagcacgcagcaaugcagcucaaaacgcuuagccuagccacacccccacgggaaacagcagugauuaaccuuuagcaauaaacgaaaguuuaacuaagcuauacuaaccccaggguuggucaauuucgugccagccacacccuggagcuagcaaaaaaaaaaaaaaaaaaaaaaaaaaaaaagcauaugacuaaaaaaaaaaaaaaaaaaaaaaaaaaaaaaaaaaaaaaaaaaaaaaaaaaaaaaaaaaaaaaaaaaaaaa

SEQ ID NO: 26848 - RNA, 4283 nt, Artificial Sequence
  SARS-CoV-2/Wuhan/WIV05/2019__EPI_ISL_402128 spike protein mRNA gc (1-1273)(K986P_V987P_K986P_V987P_K417N_E484K_N501Y_D614G)
agaauaaacuaguauucuucugguccccacagacucagagagaacccgccaccauguucguguuccugguccuccugccccuggugagcucccagugcgugaaccucaccacccgcacgcagcugccgcccgccuacaccaacagcuucacccggggcgucuacuaccccgacaagguguuccgcuccagcgugcugcacuccacccaggaccucuuccugcccuucuucagcaacgucacgugguuccacgccauccacguguccgggaccaacggcaccaagcgguucgacaacccggugcugcccuucaacgacggggucuacuucgcgagcaccgagaaguccaacaucauccgcggcuggaucuucgggacgacccucgacagcaagacccagucccugcugaucgugaacaacgccaccaacguggucaucaaggugugcgaguuccaguucugcaacgaccccuuccucggcguguacuaccacaagaacaacaagagcuggauggaguccgaguuccgggucuacagcuccgccaacaacugcacguucgaguacgugagccagcccuuccugauggaccuggagggcaagcaggggaacuucaagaaccuccgcgaguucguguucaagaacaucgacggcuacuucaagaucuacuccaagcacaccccgaucaaccugguccgggaccugccccagggguucagcgcccucgagccccugguggaccugcccaucggcaucaacaucacccgcuuccagacccuccuggcccugcaccgguccuaccucacgccgggggacagcagcuccggcuggaccgcgggcgccgccgccuacuacgugggguaccugcagccccgcaccuuccugcucaaguacaacgagaacggcaccaucacggacgcggucgacugcgcccuggacccccugagcgagaccaagugcacccucaaguccuucaccguggagaaggggaucuaccagacgagcaacuuccgggugcagcccaccgaguccaucguccgcuucccgaacaucaccaaccugugccccuucggcgagguguucaacgccacccgguucgccagcgucuacgccuggaaccgcaagcggaucuccaacugcguggcggacuacagcgugcuguacaacuccgccagcuucuccacguucaagugcuacggcgucagccccaccaagcucaacgaccugugcuucaccaacguguacgccgacuccuucgugauccgcggggacgagguccggcagaucgcccccggccagaccgggaacaucgccgacuacaacuacaagcugccggacgacuucacgggcugcgugaucgcguggaacagcaacaaccucgacuccaaggucgggggcaacuacaacuaccuguaccgccuguuccgcaagagcaaccucaagcccuucgagcgggacaucuccaccgagaucuaccaggccggcagcacccccugcaacggggugaagggcuucaacugcuacuucccccugcaguccuacggguuccagccgaccuacggcgugggguaccagcccuaccggguggucgugcugagcuucgagcuccugcacgcccccgccacggugugcggccccaagaaguccaccaaccuggucaagaacaagugcgugaacuucaacuucaacggccucaccgggaccggcgugcugaccgagagcaacaagaaguuccugccguuccagcaguucgggcgcgacaucgccgacacgaccgacgcgguccgcgacccccagacccuggagauccucgacaucacccccugcagcuucggcgggguguccgugaucacgccgggcaccaacaccagcaaccaggucgccgugcuguaccagggcgugaacugcaccgagguccccguggccauccacgccgaccagcugacgcccaccuggcggguguacuccaccgggagcaacgucuuccagacccgcgccggcugccucaucggggcggagcacgugaacaacuccuacgagugcgacauccccaucggcgccggcaucugcgccagcuaccagacgcagaccaacuccccgcggcgcgcccggagcguggcgucccagagcaucaucgccuacaccaugucccugggggccgagaacagcgucgccuacuccaacaacagcaucgccauccccaccaacuucacgaucuccgugaccaccgagauccugcccgugagcaugaccaagacgagcgucgacugcaccauguacaucugcggcgacuccaccgagugcagcaaccuccugcugcaguacggguccuucugcacccagcucaaccgcgcgcugacgggcaucgccguggagcaggacaagaacacccaggagguguucgcccaggucaagcagaucuacaagacgcccccgaucaaggacuucgggggcuucaacuucagccagauccugcccgaccccuccaagcccagcaagcgguccuucaucgaggaccuccuguucaacaaggugacccuggccgacgccggcuucaucaagcaguacggggacugccucggcgacaucgcggcccgcgaccugaucugcgcccagaaguucaacgggcugaccgugcucccgccccugcugaccgacgagaugaucgcccaguacaccagcgcccuccuggcgggcaccaucacguccggguggaccuucggcgccggcgccgcccugcagauccccuucgcgaugcagauggccuaccgguucaacgggaucggcgucacccagaacgugcucuacgagaaccagaagcugaucgccaaccaguucaacagcgccaucgggaagauccaggacucccugagcuccaccgccagcgcgcucggcaagcugcaggacguggucaaccagaacgcccaggcccugaacacgcucgugaagcagcuguccagcaacuucggggccaucuccagcgugcugaacgacauccucucccgccuggacccgcccgaggccgagguccagaucgaccggcugaucaccggccgccuccagagccugcagaccuacgugacccagcagcugauccgggcggccgagauccgcgccagcgccaaccucgccgcgaccaagauguccgagugcgugcugggccagagcaagcgggucgacuucugcgggaagggcuaccaccugauguccuucccccagagcgcgccccacggggugguguuccuccacgucacguacgugcccgcccaggagaagaacuucaccaccgccccggccaucugccacgacggcaaggcccacuucccccgcgagggggucuucguguccaacggcacccacugguucgugacgcagcggaacuucuacgagccccagaucaucaccaccgacaacaccuucgucagcggcaacugcgacguggugaucgggaucgucaacaacacgguguacgacccccugcagccggagcuggacuccuucaaggaggagcucgacaaguacuucaagaaccacaccagccccgacguggaccugggcgacaucuccgggaucaacgccagcgucgugaacauccagaaggagaucgaccgccugaacgagguggccaagaaccucaacgagucccugaucgaccugcaggagcucggcaaguacgagcaguacaucaaguggcccugguacaucuggcugggcuucaucgccgggcugaucgcgaucgucauggugaccaucaugcucugcugcaugaccagcugcugcuccugccugaagggcugcugcagcugcggguccugcugcaaguucgacgaggacgacagcgagccggugcugaagggcgucaagcuccacuacacgugaugacucgagcugguacugcaugcacgcaaugcuagcugccccuuucccguccuggguaccccgagucucccccgaccucgggucccagguaugcucccaccuccaccugccccacucaccaccucugcuaguuccagacaccucccaagcacgcagcaaugcagcucaaaacgcuuagccuagccacacccccacgggaaacagcagugauuaaccuuuagcaauaaacgaaaguuuaacuaagcuauacuaaccccaggguuggucaauuucgugccagccacacccuggagcuagcaaaaaaaaaaaaaaaaaaaaaaaaaaaaaagcauaugacuaaaaaaaaaaaaaaaaaaaaaaaaaaaaaaaaaaaaaaaaaaaaaaaaaaaaaaaaaaaaaaaaaaaaaa

SEQ ID NO: 26849 - RNA, 4274 nt, Artificial Sequence
  SARS-CoV-2/Wuhan/WIV05/2019__EPI_ISL_402128 spike protein mRNA gc (1-1273)(K986P_V987P_K986P_V987P_L18F_D80A_D215G_L242del_A243del_ L244del_R246I_K417N_E484K_N501Y_D614G_A701V)
agaauaaacuaguauucuucugguccccacagacucagagagaacccgccaccauguucguguuccugguccuccugccccuggugagcucccagugcgugaacuucaccacccgcacgcagcucccgcccgccuacaccaacagcuucacccggggcgucuacuaccccgacaagguguuccgcuccagcgugcugcacuccacccaggaccuguuccuccccuucuucagcaacgucacgugguuccacgccauccacguguccgggaccaacggcaccaagcgguucgcgaacccggugcugcccuucaacgacggggucuacuucgccagcaccgagaaguccaacaucauccgcggcuggaucuucgggacgacccuggacagcaagacccagucccuccugaucgugaacaacgccaccaacguggucaucaaggugugcgaguuccaguucugcaacgaccccuuccugggcguguacuaccacaagaacaacaagagcuggauggaguccgaguuccgggucuacagcuccgccaacaacugcacguucgaguacgugagccagcccuuccucauggaccuggagggcaagcaggggaacuucaagaaccugcgcgaguucguguucaagaacaucgacggcuacuucaagaucuacuccaagcacaccccgaucaaccucguccgggggcugccccagggcuucagcgcccuggagccccucguggaccugcccaucgggaucaacaucacccgcuuccagacccugcacaucuccuaccucacgccgggcgacagcagcuccggcuggaccgcgggggccgccgccuacuacgugggcuaccugcagccccggaccuuccugcucaaguacaacgagaacgggaccaucacggacgcggucgacugcgcccuggacccccugagcgagaccaagugcacccucaaguccuucaccguggagaagggcaucuaccagacgagcaacuuccgcgugcagcccaccgaguccaucguccgguucccgaacaucaccaaccugugccccuucggcgagguguucaacgccacccgcuucgccagcgucuacgccuggaaccggaagcgcaucuccaacugcguggcggacuacagcgugcuguacaacuccgccagcuucuccacguucaagugcuacggggucagccccaccaagcucaacgaccugugcuucaccaacguguacgccgacuccuucgugauccggggcgacgagguccgccagaucgcccccgggcagaccggcaacaucgccgacuacaacuacaagcugccggacgacuucacggggugcgugaucgcguggaacagcaacaaccucgacuccaaggugggcggcaacuacaacuaccuguaccggcuguuccgcaagagcaaccucaagcccuucgagcgggacaucuccaccgagaucuaccaggccgggagcacccccugcaacggcgucaagggguucaacugcuacuucccccugcaguccuacggcuuccagccgaccuacggggugggcuaccagcccuaccgcguggucgugcugagcuucgagcuccugcacgcccccgccacggugugcggccccaagaaguccaccaaccuggucaagaacaagugcgugaacuucaacuucaacgggcucaccggcaccggggugcugaccgagagcaacaagaaguuccugccguuccagcaguucggccgggacaucgccgacacgaccgacgcgguccgcgacccccagacccucgagauccuggacaucacccccugcagcuucgggggcguguccgugaucacgccgggcaccaacaccagcaaccaggucgccgugcuguaccagggggugaacugcaccgagguccccguggccauccacgccgaccagcugacgcccaccuggcgcguguacuccaccggcagcaacgucuuccagacccgggccgggugccucaucggcgcggagcacgugaacaacuccuacgagugcgacauccccaucggcgccgggaucugcgccagcuaccagacgcagaccaacuccccgcgccgggcccgcagcguggcgucccagagcaucaucgccuacaccaugucccugggcgucgagaacagcguggccuacuccaacaacagcaucgccauccccaccaacuucacgaucuccgugaccaccgagauccugcccgucagcaugaccaagacgagcguggacugcaccauguacaucugcggggacuccaccgagugcagcaaccuccugcugcaguacggcuccuucugcacccagcucaaccgggcccugacggggaucgcgguggagcaggacaagaacacccaggaggucuucgcccaggugaagcagaucuacaagacgcccccgaucaaggacuucggcggcuucaacuucagccagauccugcccgaccccuccaagcccagcaagcgcuccuucaucgaggaccuccuguucaacaaggugacccuggccgacgccggguucaucaagcaguacggcgacugccucggggacaucgccgcgcgggaccugaucugcgcccagaaguucaacggccugaccguccucccgccccugcugaccgacgagaugaucgcccaguacaccagcgcccuccuggccgggaccaucacguccggcuggaccuucggcgcgggggccgcccugcagauccccuucgccaugcagauggcguaccgcuucaacggcaucggggugacccagaacgugcucuacgagaaccagaagcugaucgccaaccaguucaacagcgccaucggcaagauccaggacucccugagcuccaccgccagcgcccucgggaagcugcaggacgucgugaaccagaacgcgcaggcccugaacacgcucgugaagcagcuguccagcaacuucggcgccaucuccagcguccugaacgacauccucucccggcuggacccgcccgaggccgaggugcagaucgaccgccugaucaccggccggcuccagagccugcagaccuacgugacccagcagcugauccgcgccgcggagauccgggccagcgccaaccucgccgccaccaagauguccgagugcguccuggggcagagcaagcgcguggacuucugcggcaagggguaccaccugauguccuucccccagagcgcgccccacggcguggucuuccuccacgugacguacguccccgcccaggagaagaacuucaccaccgccccggccaucugccacgacgggaaggcgcacuucccccgggagggcguguucguguccaacggcacccacugguucgucacgcagcgcaacuucuacgagccccagaucaucaccaccgacaacaccuucgugagcgggaacugcgacguggucaucggcaucgugaacaacacgguguacgacccccugcagccggagcuggacuccuucaaggaggagcucgacaaguacuucaagaaccacaccagccccgacgucgaccugggggacaucuccggcaucaacgccagcguggugaacauccagaaggagaucgaccggcugaacgaggucgccaagaaccucaacgagucccugaucgaccugcaggagcucggcaaguacgagcaguacaucaaguggcccugguacaucuggcugggguucaucgccggccugaucgccaucgugauggugaccaucaugcucugcugcaugaccagcugcugcuccugccugaaggggugcugcagcugcggcuccugcugcaaguucgacgaggacgacagcgagccgguccugaagggggugaagcuccacuacacgugaugacucgagcugguacugcaugcacgcaaugcuagcugccccuuucccguccuggguaccccgagucucccccgaccucgggucccagguaugcucccaccuccaccugccccacucaccaccucugcuaguuccagacaccucccaagcacgcagcaaugcagcucaaaacgcuuagccuagccacacccccacgggaaacagcagugauuaaccuuuagcaauaaacgaaaguuuaacuaagcuauacuaaccccaggguuggucaauuucgugccagccacacccuggagcuagcaaaaaaaaaaaaaaaaaaaaaaaaaaaaaagcauaugacuaaaaaaaaaaaaaaaaaaaaaaaaaaaaaaaaaaaaaaaaaaaaaaaaaaaaaaaaaaaaaaaaaaaaaa

SEQ ID NO: 26850 - RNA, 4283 nt, Artificial Sequence
  SARS-CoV-2/Wuhan/WIV05/2019__EPI_ISL_402128 spike protein mRNA gc (1-1273)(K986P_V987P_K986P_V987P_E484K_D614G)
agaauaaacuaguauucuucugguccccacagacucagagagaacccgccaccauguucguguuccugguccuccugccccuggugagcucccagugcgugaaccucaccacccgcacgcagcugccgcccgccuacaccaacagcuucacccggggcgucuacuaccccgacaagguguuccgcuccagcgugcugcacuccacccaggaccucuuccugcccuucuucagcaacgucacgugguuccacgccauccacguguccgggaccaacggcaccaagcgguucgacaacccggugcugcccuucaacgacggggucuacuucgcgagcaccgagaaguccaacaucauccgcggcuggaucuucgggacgacccucgacagcaagacccagucccugcugaucgugaacaacgccaccaacguggucaucaaggugugcgaguuccaguucugcaacgaccccuuccucggcguguacuaccacaagaacaacaagagcuggauggaguccgaguuccgggucuacagcuccgccaacaacugcacguucgaguacgugagccagcccuuccugauggaccuggagggcaagcaggggaacuucaagaaccuccgcgaguucguguucaagaacaucgacggcuacuucaagaucuacuccaagcacaccccgaucaaccugguccgggaccugccccagggguucagcgcccucgagccccugguggaccugcccaucggcaucaacaucacccgcuuccagacccuccuggcccugcaccgguccuaccucacgccgggggacagcagcuccggcuggaccgcgggcgccgccgccuacuacgugggguaccugcagccccgcaccuuccugcucaaguacaacgagaacggcaccaucacggacgcggucgacugcgcccuggacccccugagcgagaccaagugcacccucaaguccuucaccguggagaaggggaucuaccagacgagcaacuuccgggugcagcccaccgaguccaucguccgcuucccgaacaucaccaaccugugccccuucggcgagguguucaacgccacccgguucgccagcgucuacgccuggaaccgcaagcggaucuccaacugcguggcggacuacagcgugcuguacaacuccgccagcuucuccacguucaagugcuacggcgucagccccaccaagcucaacgaccugugcuucaccaacguguacgccgacuccuucgugauccgcggggacgagguccggcagaucgcccccggccagaccgggaagaucgccgacuacaacuacaagcugccggacgacuucacgggcugcgugaucgcguggaacagcaacaaccucgacuccaaggucgggggcaacuacaacuaccuguaccgccuguuccgcaagagcaaccucaagcccuucgagcgggacaucuccaccgagaucuaccaggccggcagcacccccugcaacggggugaagggcuucaacugcuacuucccccugcaguccuacggguuccagccgaccaacggcgugggguaccagcccuaccggguggucgugcugagcuucgagcuccugcacgcccccgccacggugugcggccccaagaaguccaccaaccuggucaagaacaagugcgugaacuucaacuucaacggccucaccgggaccggcgugcugaccgagagcaacaagaaguuccugccguuccagcaguucgggcgcgacaucgccgacacgaccgacgcgguccgcgacccccagacccuggagauccucgacaucacccccugcagcuucggcgggguguccgugaucacgccgggcaccaacaccagcaaccaggucgccgugcuguaccagggcgugaacugcaccgagguccccguggccauccacgccgaccagcugacgcccaccuggcggguguacuccaccgggagcaacgucuuccagacccgcgccggcugccucaucggggcggagcacgugaacaacuccuacgagugcgacauccccaucggcgccggcaucugcgccagcuaccagacgcagaccaacuccccgcggcgcgcccggagcguggcgucccagagcaucaucgccuacaccaugucccugggggccgagaacagcgucgccuacuccaacaacagcaucgccauccccaccaacuucacgaucuccgugaccaccgagauccugcccgugagcaugaccaagacgagcgucgacugcaccauguacaucugcggcgacuccaccgagugcagcaaccuccugcugcaguacggguccuucugcacccagcucaaccgcgcgcugacgggcaucgccguggagcaggacaagaacacccaggagguguucgcccaggucaagcagaucuacaagacgcccccgaucaaggacuucgggggcuucaacuucagccagauccugcccgaccccuccaagcccagcaagcgguccuucaucgaggaccuccuguucaacaaggugacccuggccgacgccggcuucaucaagcaguacggggacugccucggcgacaucgcggcccgcgaccugaucugcgcccagaaguucaacgggcugaccgugcucccgccccugcugaccgacgagaugaucgcccaguacaccagcgcccuccuggcgggcaccaucacguccggguggaccuucggcgccggcgccgcccugcagauccccuucgcgaugcagauggccuaccgguucaacgggaucggcgucacccagaacgugcucuacgagaaccagaagcugaucgccaaccaguucaacagcgccaucgggaagauccaggacucccugagcuccaccgccagcgcgcucggcaagcugcaggacguggucaaccagaacgcccaggcccugaacacgcucgugaagcagcuguccagcaacuucggggccaucuccagcgugcugaacgacauccucucccgccuggacccgcccgaggccgagguccagaucgaccggcugaucaccggccgccuccagagccugcagaccuacgugacccagcagcugauccgggcggccgagauccgcgccagcgccaaccucgccgcgaccaagauguccgagugcgugcugggccagagcaagcgggucgacuucugcgggaagggcuaccaccugauguccuucccccagagcgcgccccacggggugguguuccuccacgucacguacgugcccgcccaggagaagaacuucaccaccgccccggccaucugccacgacggcaaggcccacuucccccgcgagggggucuucguguccaacggcacccacugguucgugacgcagcggaacuucuacgagccccagaucaucaccaccgacaacaccuucgucagcggcaacugcgacguggugaucgggaucgucaacaacacgguguacgacccccugcagccggagcuggacuccuucaaggaggagcucgacaaguacuucaagaaccacaccagccccgacguggaccugggcgacaucuccgggaucaacgccagcgucgugaacauccagaaggagaucgaccgccugaacgagguggccaagaaccucaacgagucccugaucgaccugcaggagcucggcaaguacgagcaguacaucaaguggcccugguacaucuggcugggcuucaucgccgggcugaucgcgaucgucauggugaccaucaugcucugcugcaugaccagcugcugcuccugccugaagggcugcugcagcugcggguccugcugcaaguucgacgaggacgacagcgagccggugcugaagggcgucaagcuccacuacacgugaugacucgagcugguacugcaugcacgcaaugcuagcugccccuuucccguccuggguaccccgagucucccccgaccucgggucccagguaugcucccaccuccaccugccccacucaccaccucugcuaguuccagacaccucccaagcacgcagcaaugcagcucaaaacgcuuagccuagccacacccccacgggaaacagcagugauuaaccuuuagcaauaaacgaaaguuuaacuaagcuauacuaaccccaggguuggucaauuucgugccagccacacccuggagcuagcaaaaaaaaaaaaaaaaaaaaaaaaaaaaaagcauaugacuaaaaaaaaaaaaaaaaaaaaaaaaaaaaaaaaaaaaaaaaaaaaaaaaaaaaaaaaaaaaaaaaaaaaaa

SEQ ID NO: 26851 - RNA, 4283 nt, Artificial Sequence
  SARS-CoV-2/Wuhan/WIV05/2019__EPI_ISL_402128 spike protein mRNA gc (1-1273)(K986P_V987P_K986P_V987P_L18F_T20N_P26S_D138Y_R190S_K417T _E484K_N501Y_D614G_H655Y_T1027I)
agaauaaacuaguauucuucugguccccacagacucagagagaacccgccaccauguucguguuccugguccuccugccccuggugagcucccagugcgugaacuucaccaaccgcacccagcucccgagcgccuacacgaacuccuucacccggggcgucuacuaccccgacaagguguuccgcagcuccgugcugcacagcacccaggaccuguuccuccccuucuucuccaacgucaccugguuccacgccauccacgugagcgggacgaacggcaccaagcgguucgacaaccccgugcugccguucaacgacggggucuacuucgcguccaccgagaaguccaacaucauccgcggcuggaucuucgggaccacgcuggacuccaagacccagagccuccugaucgugaacaacgccaccaacguggucaucaaggugugcgaguuccaguucugcaacuaccccuuccugggcguguacuaccacaagaacaacaaguccuggauggagagcgaguuccgggucuacuccagcgccaacaacugcaccuucgaguacgugucccagcccuuccucauggaccuggagggcaagcaggggaacuucaagaaccugagcgaguucguguucaagaacaucgacggcuacuucaagaucuacuccaagcacacgcccaucaaccucguccgcgaccugccgcagggguucagcgcccuggagccccucguggaccugcccaucggcaucaacaucacccgguuccagacccugcucgcccugcaccgcagcuaccugacccccggggacuccagcuccggcuggacggcgggcgccgccgccuacuacgugggguaccuccagccgcggaccuuccugcugaaguacaacgagaacggcaccaucaccgacgcggucgacugcgcccucgacccccugagcgagacgaagugcacccugaaguccuucaccguggagaaggggaucuaccagaccagcaacuuccgcgugcagcccacggaguccaucguccgguuccccaacaucaccaaccucugcccguucggcgagguguucaacgccacccgcuucgccagcgucuacgccuggaaccggaagcgcaucuccaacugcguggcggacuacagcgugcuguacaacuccgccagcuucuccaccuucaagugcuacggcgucagccccacgaagcugaacgaccucugcuucaccaacguguacgccgacuccuucgugauccgcggggacgagguccggcagaucgcccccggccagaccgggaccaucgccgacuacaacuacaagcugcccgacgacuucacgggcugcgugaucgcguggaacagcaacaaccuggacuccaaggucgggggcaacuacaacuaccucuaccggcuguuccgcaagagcaaccugaagccguucgagcgggacaucuccaccgagaucuaccaggccggcagcacccccugcaacggggugaagggcuucaacugcuacuucccccuccagagcuacggguuccagcccaccuacggcgugggguaccagccguaccgcguggucgugcuguccuucgagcugcuccacgcccccgccacggugugcggccccaagaaguccaccaaccuggucaagaacaagugcgugaacuucaacuucaacggccugaccgggaccggcgugcucaccgagagcaacaagaaguuccugcccuuccagcaguucgggcgggacaucgccgacacgaccgacgcgguccgcgacccgcagacccuggagauccuggacaucacccccugcagcuucggcgggguguccgugaucacgcccggcaccaacaccagcaaccaggucgccgugcucuaccagggcgugaacugcaccgaggucccgguggccauccacgccgaccagcugacgcccaccuggcgcguguacuccaccgggagcaacgucuuccagacccgggccggcugccugaucggggcggaguacgugaacaacuccuacgagugcgacauccccaucggcgccggcaucugcgccagcuaccagacgcagaccaacagcccccgccgggcccgcagcguggcgucccagagcaucaucgccuacaccaugucccucggggccgagaacagcgucgccuacuccaacaacagcaucgccaucccgaccaacuucacgaucagcgugaccaccgagauccugcccguguccaugaccaagacgagcgucgacugcaccauguacaucugcggcgacuccaccgagugcagcaaccugcuccugcaguacggguccuucugcacccagcugaaccgggcgcucacgggcaucgccguggagcaggacaagaacacccaggagguguucgcccaggucaagcagaucuacaagaccccgcccaucaaggacuucgggggcuucaacuucagccagauccugcccgaccccuccaagcccagcaagcgcuccuucaucgaggaccuccuguucaacaaggugacccuggccgacgccggcuucaucaagcaguacggggacugccugggcgacaucgcggcccgggaccucaucugcgcccagaaguucaacgggcugacggugcugcccccgcuccugaccgacgagaugaucgcccaguacaccagcgcccugcucgcgggcaccaucacguccggguggaccuucggcgccggcgccgcccugcagauccccuucgcgaugcagauggccuaccgcuucaacgggaucggcgucacccagaacgugcuguacgagaaccagaagcucaucgccaaccaguucaacagcgccaucgggaagauccaggacucccugagcuccaccgccagcgcgcugggcaagcuccaggacguggucaaccagaacgcccaggcccugaacacgcuggugaagcagcucuccagcaacuucggggccaucuccagcgugcugaacgacauccugagccggcucgacccgcccgaggccgagguccagaucgaccgccugaucaccggccggcugcagucccuccagaccuacgugacccagcagcugauccgcgcggccgagauccgggccagcgccaaccuggccgcgaucaagauguccgagugcgugcucggccagagcaagcgcgucgacuucugcgggaagggcuaccaccugauguccuucccccagagcgcgccccacggggugguguuccugcacgucaccuacgugcccgcccaggagaagaacuucacgaccgcccccgccaucugccacgacggcaaggcccacuucccgcgggagggggucuucguguccaacggcacccacugguucgugacccagcgcaacuucuacgagccccagaucaucacgaccgacaacaccuucgucagcggcaacugcgacguggugaucgggaucgucaacaacaccguguacgacccccuccagcccgagcuggacuccuucaaggaggagcuggacaaguacuucaagaaccacacgagcccggacguggaccucggcgacaucuccgggaucaacgccagcgucgugaacauccagaaggagaucgaccggcugaacgagguggccaagaaccugaacgagucccucaucgaccugcaggagcugggcaaguacgagcaguacaucaaguggcccugguacaucuggcucggcuucaucgccgggcugaucgcgaucgucauggugaccaucaugcugugcugcaugaccagcugcugcuccugccucaagggcugcugcagcugcggguccugcugcaaguucgacgaggacgacagcgagcccgugcugaagggcgucaagcugcacuacaccugaugacucgagcugguacugcaugcacgcaaugcuagcugccccuuucccguccuggguaccccgagucucccccgaccucgggucccagguaugcucccaccuccaccugccccacucaccaccucugcuaguuccagacaccucccaagcacgcagcaaugcagcucaaaacgcuuagccuagccacacccccacgggaaacagcagugauuaaccuuuagcaauaaacgaaaguuuaacuaagcuauacuaaccccaggguuggucaauuucgugccagccacacccuggagcuagcaaaaaaaaaaaaaaaaaaaaaaaaaaaaaagcauaugacuaaaaaaaaaaaaaaaaaaaaaaaaaaaaaaaaaaaaaaaaaaaaaaaaaaaaaaaaaaaaaaaaaaaaaa

SEQ ID NO: 26852 - RNA, 4283 nt, Artificial Sequence
  SARS-CoV-2/Wuhan/WIV05/2019__EPI_ISL_402128 spike protein mRNA gc (1-1273)(K986P_V987P_K986P_V987P_S13I_W152C_L452R_D614G)
agaauaaacuaguauucuucugguccccacagacucagagagaacccgccaccauguucguguuccugguccuccugccccuggugagcauccagugcgugaaccucaccacccgcacgcagcugccgcccgccuacaccaacuccuucacccggggcgucuacuaccccgacaagguguuccgcagcuccgugcugcacagcacccaggaccucuuccugcccuucuucuccaacgucacgugguuccacgccauccacgugagcgggaccaacggcaccaagcgguucgacaacccggugcugcccuucaacgacggggucuacuucgcguccaccgagaaguccaacaucauccgcggcuggaucuucgggacgacccucgacagcaagacccagagccugcugaucgugaacaacgccaccaacguggucaucaaggugugcgaguuccaguucugcaacgaccccuuccucggcguguacuaccacaagaacaacaaguccugcauggagagcgaguuccgggucuacuccagcgccaacaacugcacguucgaguacgugucccagcccuuccugauggaccuggagggcaagcaggggaacuucaagaaccuccgcgaguucguguucaagaacaucgacggcuacuucaagaucuacagcaagcacaccccgaucaaccugguccgggaccugccccagggguucuccgcccucgagccccugguggaccugcccaucggcaucaacaucacccgcuuccagacccuccuggcccugcaccggagcuaccucacgccgggggacuccagcagcggcuggaccgcgggcgccgccgccuacuacgugggguaccugcagccccgcaccuuccugcucaaguacaacgagaacggcaccaucacggacgcggucgacugcgcccuggacccccuguccgagaccaagugcacccucaagagcuucaccguggagaaggggaucuaccagacguccaacuuccgggugcagcccaccgagagcaucguccgcuucccgaacaucaccaaccugugccccuucggcgagguguucaacgccacccgguucgccuccgucuacgccuggaaccgcaagcggaucagcaacugcguggcggacuacuccgugcuguacaacagcgccuccuucagcacguucaagugcuacggcgucucccccaccaagcucaacgaccugugcuucaccaacguguacgccgacagcuucgugauccgcggggacgagguccggcagaucgcccccggccagaccgggaagaucgccgacuacaacuacaagcugccggacgacuucacgggcugcgugaucgcguggaacuccaacaaccucgacagcaaggucgggggcaacuacaacuaccgcuaccggcuguuccgcaaguccaaccugaagcccuucgagcgggacaucagcaccgagaucuaccaggccggcuccacccccugcaacgggguggagggcuucaacugcuacuucccccuccagagcuacggguuccagccgaccaacggcgugggguaccagcccuaccgcguggucgugcuguccuucgagcugcuccacgcccccgccacggugugcggccccaagaaguccaccaaccuggucaagaacaagugcgugaacuucaacuucaacggccugaccgggaccggcgugcucaccgagagcaacaagaaguuccugccguuccagcaguucgggcgcgacaucgccgacacgaccgacgcgguccgggacccccagacccuggagauccuggacaucacccccugcagcuucggcggggugagcgugaucacgccgggcaccaacaccuccaaccaggucgccgugcucuaccagggcgugaacugcaccgagguccccguggccauccacgccgaccagcugacgcccaccuggcgcguguacagcaccggguccaacgucuuccagacccgggccggcugccugaucggggcggagcacgugaacaacagcuacgagugcgacauccccaucggcgccggcaucugcgccuccuaccagacgcagaccaacagcccgcgccgggcccgcuccguggcgagccaguccaucaucgccuacaccaugagccucggggccgagaacuccgucgccuacagcaacaacuccaucgccauccccaccaacuucacgaucagcgugaccaccgagauccugcccguguccaugaccaagacgagcgucgacugcaccauguacaucugcggcgacagcaccgagugcuccaaccugcuccugcaguacgggagcuucugcacccagcugaaccgggcgcucacgggcaucgccguggagcaggacaagaacacccaggagguguucgcccaggucaagcagaucuacaagacgcccccgaucaaggacuucgggggcuucaacuucucccagauccugcccgaccccagcaagcccuccaagcgcagcuucaucgaggaccuccuguucaacaaggugacccuggccgacgccggcuucaucaagcaguacggggacugccugggcgacaucgcggcccgggaccucaucugcgcccagaaguucaacgggcugaccgugcugccgccccuccugaccgacgagaugaucgcccaguacaccuccgcccugcucgcgggcaccaucacgagcggguggaccuucggcgccggcgccgcccugcagauccccuucgcgaugcagauggccuaccgcuucaacgggaucggcgucacccagaacgugcuguacgagaaccagaagcucaucgccaaccaguucaacuccgccaucgggaagauccaggacagccuguccagcaccgccuccgcgcugggcaagcuccaggacguggucaaccagaacgcccaggcccugaacacgcuggugaagcagcucagcuccaacuucggggccaucagcuccgugcugaacgacauccugagccggcucgacccgcccgaggccgagguccagaucgaccgccugaucaccggccggcugcagucccuccagaccuacgugacccagcagcugauccgcgcggccgagauccgggccagcgccaaccuggccgcgaccaagaugagcgagugcgugcucggccaguccaagcgcgucgacuucugcgggaagggcuaccaccugaugagcuucccccaguccgcgccccacggggugguguuccugcacgucacguacgugcccgcccaggagaagaacuucaccaccgccccggccaucugccacgacggcaaggcccacuucccccgggagggggucuucgugagcaacggcacccacugguucgugacgcagcgcaacuucuacgagccccagaucaucaccaccgacaacaccuucgucuccggcaacugcgacguggugaucgggaucgucaacaacacgguguacgacccccuccagccggagcuggacagcuucaaggaggagcuggacaaguacuucaagaaccacaccucccccgacguggaccucggcgacaucagcgggaucaacgccuccgucgugaacauccagaaggagaucgaccggcugaacgagguggccaagaaccugaacgagagccucaucgaccugcaggagcugggcaaguacgagcaguacaucaaguggcccugguacaucuggcucggcuucaucgccgggcugaucgcgaucgucauggugaccaucaugcugugcugcaugaccuccugcugcagcugccucaagggcugcugcuccugcgggagcugcugcaaguucgacgaggacgacuccgagccggugcugaagggcgucaagcugcacuacacgugaugacucgagcugguacugcaugcacgcaaugcuagcugccccuuucccguccuggguaccccgagucucccccgaccucgggucccagguaugcucccaccuccaccugccccacucaccaccucugcuaguuccagacaccucccaagcacgcagcaaugcagcucaaaacgcuuagccuagccacacccccacgggaaacagcagugauuaaccuuuagcaauaaacgaaaguuuaacuaagcuauacuaaccccaggguuggucaauuucgugccagccacacccuggagcuagcaaaaaaaaaaaaaaaaaaaaaaaaaaaaaagcauaugacuaaaaaaaaaaaaaaaaaaaaaaaaaaaaaaaaaaaaaaaaaaaaaaaaaaaaaaaaaaaaaaaaaaaaaa

SEQ ID NO: 26853 - RNA, 4283 nt, Artificial Sequence
  SARS-CoV-2/Wuhan/WIV05/2019__EPI_ISL_402128 spike protein mRNA gc (1-1273)(K986P_V987P)
agaauaaacuaguauucuucugguccccacagacucagagagaacccgccaccauguucguguuccuggugcugcugccccuggugagcagccagugcgugaaccugaccacccggacccagcugccaccagccuacaccaacagcuucacccggggcgucuacuaccccgacaagguguuccggagcagcguccugcacagcacccaggaccuguuccugcccuucuucagcaacgugaccugguuccacgccauccacgugagcggcaccaacggcaccaagcgguucgacaaccccgugcugcccuucaacgacggcguguacuucgccagcaccgagaagagcaacaucauccggggcuggaucuucggcaccacccuggacagcaagacccagagccugcugaucgugaauaacgccaccaacguggugaucaaggugugcgaguuccaguucugcaacgaccccuuccugggcguguacuaccacaagaacaacaagagcuggauggagagcgaguuccggguguacagcagcgccaacaacugcaccuucgaguacgugagccagcccuuccugauggaccuggagggcaagcagggcaacuucaagaaccugcgggaguucguguucaagaacaucgacggcuacuucaagaucuacagcaagcacaccccaaucaaccuggugcgggaucugccccagggcuucucagcccuggagccccugguggaccugcccaucggcaucaacaucacccgguuccagacccugcuggcccugcaccggagcuaccugaccccaggcgacagcagcagcggguggacagcaggcgcggcugcuuacuacgugggcuaccugcagccccggaccuuccugcugaaguacaacgagaacggcaccaucaccgacgccguggacugcgcccuggacccucugagcgagaccaagugcacccugaagagcuucaccguggagaagggcaucuaccagaccagcaacuuccgggugcagcccaccgagagcaucgugcgguuccccaacaucaccaaccugugccccuucggcgagguguucaacgccacccgguucgccagcguguacgccuggaaccggaagcggaucagcaacugcguggccgacuacagcgugcuguacaacagcgccagcuucagcaccuucaagugcuacggcgugagccccaccaagcugaacgaccugugcuucaccaacguguacgccgacagcuucgugauccguggcgacgaggugcggcagaucgcacccggccagacaggcaagaucgccgacuacaacuacaagcugcccgacgacuucaccggcugcgugaucgccuggaacagcaacaaccucgacagcaaggugggcggcaacuacaacuaccuguaccggcuguuccggaagagcaaccugaagcccuucgagcgggacaucagcaccgagaucuaccaagccggcuccaccccuugcaacggcguggagggcuucaacugcuacuucccucugcagagcuacggcuuccagcccaccaacggcgugggcuaccagcccuaccgggugguggugcugagcuucgagcugcugcacgccccagccaccguguguggccccaagaagagcaccaaccuggugaagaacaagugcgugaacuucaacuucaacggccuuaccggcaccggcgugcugaccgagagcaacaagaaauuccugcccuuucagcaguucggccgggacaucgccgacaccaccgacgcugugcgggauccccagacccuggagauccuggacaucaccccuugcagcuucggcggcgugagcgugaucaccccaggcaccaacaccagcaaccagguggccgugcuguaccaggacgugaacugcaccgaggugcccguggccauccacgccgaccagcugacacccaccuggcgggucuacagcaccggcagcaacguguuccagacccgggccgguugccugaucggcgccgagcacgugaacaacagcuacgagugcgacauccccaucggcgccggcaucugugccagcuaccagacccagaccaauucaccccggagggcaaggagcguggccagccagagcaucaucgccuacaccaugagccugggcgccgagaacagcguggccuacagcaacaacagcaucgccauccccaccaacuucaccaucagcgugaccaccgagauucugcccgugagcaugaccaagaccagcguggacugcaccauguacaucugcggcgacagcaccgagugcagcaaccugcugcugcaguacggcagcuucugcacccagcugaaccgggcccugaccggcaucgccguggagcaggacaagaacacccaggagguguucgcccaggugaagcagaucuacaagaccccucccaucaaggacuucggcggcuucaacuucagccagauccugcccgaccccagcaagcccagcaagcggagcuucaucgaggaccugcuguucaacaaggugacccuagccgacgccggcuucaucaagcaguacggcgacugccucggcgacauagccgcccgggaccugaucugcgcccagaaguucaacggccugaccgugcugccuccccugcugaccgacgagaugaucgcccaguacaccagcgcccuguuagccggaaccaucaccagcggcuggacuuucggcgcuggagccgcucugcagauccccuucgccaugcagauggccuaccgguucaacggcaucggcgugacccagaacgugcuguacgagaaccagaagcugaucgccaaccaguucaacagcgccaucggcaagauccaggacagccugagcagcaccgcuagcgcccugggcaagcugcaggacguggugaaccagaacgcccaggcccugaacacccuggugaagcagcugagcagcaacuucggcgccaucagcagcgugcugaacgacauccugagccggcuggacccucccgaggccgaggugcagaucgaccggcugaucacuggccggcugcagagccugcagaccuacgugacccagcagcugauccgggccgccgagauucgggccagcgccaaccuggccgccaccaagaugagcgagugcgugcugggccagagcaagcggguggacuucugcggcaagggcuaccaccugaugagcuuuccccagagcgcaccccacggagugguguuccugcacgugaccuacgugcccgcccaggagaagaacuucaccaccgccccagccaucugccacgacggcaaggcccacuuuccccgggagggcguguucgugagcaacggcacccacugguucgugacccagcggaacuucuacgagccccagaucaucaccaccgacaacaccuucgugagcggcaacugcgacguggugaucggcaucgugaacaacaccguguacgauccccugcagcccgagcuggacagcuucaaggaggagcuggacaaguacuucaagaaucacaccagccccgacguggaccugggcgacaucagcggcaucaacgccagcguggugaacauccagaaggagaucgaucggcugaacgagguggccaagaaccugaacgagagccugaucgaccugcaggagcugggcaaguacgagcaguacaucaaguggcccugguacaucuggcugggcuucaucgccggccugaucgccaucgugauggugaccaucaugcugugcugcaugaccagcugcugcagcugccugaagggcuguugcagcugcggcagcugcugcaaguucgacgaggacgacagcgagcccgugcugaagggcgugaagcugcacuacaccugaugacucgagcugguacugcaugcacgcaaugcuagcugccccuuucccguccuggguaccccgagucucccccgaccucgggucccagguaugcucccaccuccaccugccccacucaccaccucugcuaguuccagacaccucccaagcacgcagcaaugcagcucaaaacgcuuagccuagccacacccccacgggaaacagcagugauuaaccuuuagcaauaaacgaaaguuuaacuaagcuauacuaaccccaggguuggucaauuucgugccagccacacccuggagcuagcaaaaaaaaaaaaaaaaaaaaaaaaaaaaaagcauaugacuaaaaaaaaaaaaaaaaaaaaaaaaaaaaaaaaaaaaaaaaaaaaaaaaaaaaaaaaaaaaaaaaaaaaaa

SEQ ID NO: 26854 - RNA, 4283 nt, Artificial Sequence
  SARS-CoV-2/Wuhan/WIV05/2019__EPI_ISL_402128 spike protein mRNA gc (1-1273)(K986P_V987P_ D614G)
agaauaaacuaguauucuucugguccccacagacucagagagaacccgccaccauguucguguuccuggugcugcugccccuggugagcagccagugcgugaaccugaccacccggacccagcugccaccagccuacaccaacagcuucacccggggcgucuacuaccccgacaagguguuccggagcagcguccugcacagcacccaggaccuguuccugcccuucuucagcaacgugaccugguuccacgccauccacgugagcggcaccaacggcaccaagcgguucgacaaccccgugcugcccuucaacgacggcguguacuucgccagcaccgagaagagcaacaucauccggggcuggaucuucggcaccacccuggacagcaagacccagagccugcugaucgugaauaacgccaccaacguggugaucaaggugugcgaguuccaguucugcaacgaccccuuccugggcguguacuaccacaagaacaacaagagcuggauggagagcgaguuccggguguacagcagcgccaacaacugcaccuucgaguacgugagccagcccuuccugauggaccuggagggcaagcagggcaacuucaagaaccugcgggaguucguguucaagaacaucgacggcuacuucaagaucuacagcaagcacaccccaaucaaccuggugcgggaucugccccagggcuucucagcccuggagccccugguggaccugcccaucggcaucaacaucacccgguuccagacccugcuggcccugcaccggagcuaccugaccccaggcgacagcagcagcggguggacagcaggcgcggcugcuuacuacgugggcuaccugcagccccggaccuuccugcugaaguacaacgagaacggcaccaucaccgacgccguggacugcgcccuggacccucugagcgagaccaagugcacccugaagagcuucaccguggagaagggcaucuaccagaccagcaacuuccgggugcagcccaccgagagcaucgugcgguuccccaacaucaccaaccugugccccuucggcgagguguucaacgccacccgguucgccagcguguacgccuggaaccggaagcggaucagcaacugcguggccgacuacagcgugcuguacaacagcgccagcuucagcaccuucaagugcuacggcgugagccccaccaagcugaacgaccugugcuucaccaacguguacgccgacagcuucgugauccguggcgacgaggugcggcagaucgcacccggccagacaggcaagaucgccgacuacaacuacaagcugcccgacgacuucaccggcugcgugaucgccuggaacagcaacaaccucgacagcaaggugggcggcaacuacaacuaccuguaccggcuguuccggaagagcaaccugaagcccuucgagcgggacaucagcaccgagaucuaccaagccggcuccaccccuugcaacggcguggagggcuucaacugcuacuucccucugcagagcuacggcuuccagcccaccaacggcgugggcuaccagcccuaccgggugguggugcugagcuucgagcugcugcacgccccagccaccguguguggccccaagaagagcaccaaccuggugaagaacaagugcgugaacuucaacuucaacggccuuaccggcaccggcgugcugaccgagagcaacaagaaauuccugcccuuucagcaguucggccgggacaucgccgacaccaccgacgcugugcgggauccccagacccuggagauccuggacaucaccccuugcagcuucggcggcgugagcgugaucaccccaggcaccaacaccagcaaccagguggccgugcuguaccagggcgugaacugcaccgaggugcccguggccauccacgccgaccagcugacacccaccuggcgggucuacagcaccggcagcaacguguuccagacccgggccgguugccugaucggcgccgagcacgugaacaacagcuacgagugcgacauccccaucggcgccggcaucugugccagcuaccagacccagaccaauucaccccggagggcaaggagcguggccagccagagcaucaucgccuacaccaugagccugggcgccgagaacagcguggccuacagcaacaacagcaucgccauccccaccaacuucaccaucagcgugaccaccgagauucugcccgugagcaugaccaagaccagcguggacugcaccauguacaucugcggcgacagcaccgagugcagcaaccugcugcugcaguacggcagcuucugcacccagcugaaccgggcccugaccggcaucgccguggagcaggacaagaacacccaggagguguucgcccaggugaagcagaucuacaagaccccucccaucaaggacuucggcggcuucaacuucagccagauccugcccgaccccagcaagcccagcaagcggagcuucaucgaggaccugcuguucaacaaggugacccuagccgacgccggcuucaucaagcaguacggcgacugccucggcgacauagccgcccgggaccugaucugcgcccagaaguucaacggccugaccgugcugccuccccugcugaccgacgagaugaucgcccaguacaccagcgcccuguuagccggaaccaucaccagcggcuggacuuucggcgcuggagccgcucugcagauccccuucgccaugcagauggccuaccgguucaacggcaucggcgugacccagaacgugcuguacgagaaccagaagcugaucgccaaccaguucaacagcgccaucggcaagauccaggacagccugagcagcaccgcuagcgcccugggcaagcugcaggacguggugaaccagaacgcccaggcccugaacacccuggugaagcagcugagcagcaacuucggcgccaucagcagcgugcugaacgacauccugagccggcuggacccucccgaggccgaggugcagaucgaccggcugaucacuggccggcugcagagccugcagaccuacgugacccagcagcugauccgggccgccgagauucgggccagcgccaaccuggccgccaccaagaugagcgagugcgugcugggccagagcaagcggguggacuucugcggcaagggcuaccaccugaugagcuuuccccagagcgcaccccacggagugguguuccugcacgugaccuacgugcccgcccaggagaagaacuucaccaccgccccagccaucugccacgacggcaaggcccacuuuccccgggagggcguguucgugagcaacggcacccacugguucgugacccagcggaacuucuacgagccccagaucaucaccaccgacaacaccuucgugagcggcaacugcgacguggugaucggcaucgugaacaacaccguguacgauccccugcagcccgagcuggacagcuucaaggaggagcuggacaaguacuucaagaaucacaccagccccgacguggaccugggcgacaucagcggcaucaacgccagcguggugaacauccagaaggagaucgaucggcugaacgagguggccaagaaccugaacgagagccugaucgaccugcaggagcugggcaaguacgagcaguacaucaaguggcccugguacaucuggcugggcuucaucgccggccugaucgccaucgugauggugaccaucaugcugugcugcaugaccagcugcugcagcugccugaagggcuguugcagcugcggcagcugcugcaaguucgacgaggacgacagcgagcccgugcugaagggcgugaagcugcacuacaccugaugacucgagcugguacugcaugcacgcaaugcuagcugccccuuucccguccuggguaccccgagucucccccgaccucgggucccagguaugcucccaccuccaccugccccacucaccaccucugcuaguuccagacaccucccaagcacgcagcaaugcagcucaaaacgcuuagccuagccacacccccacgggaaacagcagugauuaaccuuuagcaauaaacgaaaguuuaacuaagcuauacuaaccccaggguuggucaauuucgugccagccacacccuggagcuagcaaaaaaaaaaaaaaaaaaaaaaaaaaaaaagcauaugacuaaaaaaaaaaaaaaaaaaaaaaaaaaaaaaaaaaaaaaaaaaaaaaaaaaaaaaaaaaaaaaaaaaaaaa

SEQ ID NO: 26855 - RNA, 4283 nt, Artificial Sequence
  SARS-CoV-2/Wuhan/WIV05/2019__EPI_ISL_402128 spike protein mRNA gc (1-1273)(K986P_V987P_A222V_D614G)
agaauaaacuaguauucuucugguccccacagacucagagagaacccgccaccauguucguguuccuggugcugcugccccuggugagcagccagugcgugaaccugaccacccggacccagcugccaccagccuacaccaacagcuucacccggggcgucuacuaccccgacaagguguuccggagcagcguccugcacagcacccaggaccuguuccugcccuucuucagcaacgugaccugguuccacgccauccacgugagcggcaccaacggcaccaagcgguucgacaaccccgugcugcccuucaacgacggcguguacuucgccagcaccgagaagagcaacaucauccggggcuggaucuucggcaccacccuggacagcaagacccagagccugcugaucgugaauaacgccaccaacguggugaucaaggugugcgaguuccaguucugcaacgaccccuuccugggcguguacuaccacaagaacaacaagagcuggauggagagcgaguuccggguguacagcagcgccaacaacugcaccuucgaguacgugagccagcccuuccugauggaccuggagggcaagcagggcaacuucaagaaccugcgggaguucguguucaagaacaucgacggcuacuucaagaucuacagcaagcacaccccaaucaaccuggugcgggaucugccccagggcuucucagugcuggagccccugguggaccugcccaucggcaucaacaucacccgguuccagacccugcuggcccugcaccggagcuaccugaccccaggcgacagcagcagcggguggacagcaggcgcggcugcuuacuacgugggcuaccugcagccccggaccuuccugcugaaguacaacgagaacggcaccaucaccgacgccguggacugcgcccuggacccucugagcgagaccaagugcacccugaagagcuucaccguggagaagggcaucuaccagaccagcaacuuccgggugcagcccaccgagagcaucgugcgguuccccaacaucaccaaccugugccccuucggcgagguguucaacgccacccgguucgccagcguguacgccuggaaccggaagcggaucagcaacugcguggccgacuacagcgugcuguacaacagcgccagcuucagcaccuucaagugcuacggcgugagccccaccaagcugaacgaccugugcuucaccaacguguacgccgacagcuucgugauccguggcgacgaggugcggcagaucgcacccggccagacaggcaagaucgccgacuacaacuacaagcugcccgacgacuucaccggcugcgugaucgccuggaacagcaacaaccucgacagcaaggugggcggcaacuacaacuaccuguaccggcuguuccggaagagcaaccugaagcccuucgagcgggacaucagcaccgagaucuaccaagccggcuccaccccuugcaacggcguggagggcuucaacugcuacuucccucugcagagcuacggcuuccagcccaccaacggcgugggcuaccagcccuaccgggugguggugcugagcuucgagcugcugcacgccccagccaccguguguggccccaagaagagcaccaaccuggugaagaacaagugcgugaacuucaacuucaacggccuuaccggcaccggcgugcugaccgagagcaacaagaaauuccugcccuuucagcaguucggccgggacaucgccgacaccaccgacgcugugcgggauccccagacccuggagauccuggacaucaccccuugcagcuucggcggcgugagcgugaucaccccaggcaccaacaccagcaaccagguggccgugcuguaccagggcgugaacugcaccgaggugcccguggccauccacgccgaccagcugacacccaccuggcgggucuacagcaccggcagcaacguguuccagacccgggccgguugccugaucggcgccgagcacgugaacaacagcuacgagugcgacauccccaucggcgccggcaucugugccagcuaccagacccagaccaauucaccccggagggcaaggagcguggccagccagagcaucaucgccuacaccaugagccugggcgccgagaacagcguggccuacagcaacaacagcaucgccauccccaccaacuucaccaucagcgugaccaccgagauucugcccgugagcaugaccaagaccagcguggacugcaccauguacaucugcggcgacagcaccgagugcagcaaccugcugcugcaguacggcagcuucugcacccagcugaaccgggcccugaccggcaucgccguggagcaggacaagaacacccaggagguguucgcccaggugaagcagaucuacaagaccccucccaucaaggacuucggcggcuucaacuucagccagauccugcccgaccccagcaagcccagcaagcggagcuucaucgaggaccugcuguucaacaaggugacccuagccgacgccggcuucaucaagcaguacggcgacugccucggcgacauagccgcccgggaccugaucugcgcccagaaguucaacggccugaccgugcugccuccccugcugaccgacgagaugaucgcccaguacaccagcgcccuguuagccggaaccaucaccagcggcuggacuuucggcgcuggagccgcucugcagauccccuucgccaugcagauggccuaccgguucaacggcaucggcgugacccagaacgugcuguacgagaaccagaagcugaucgccaaccaguucaacagcgccaucggcaagauccaggacagccugagcagcaccgcuagcgcccugggcaagcugcaggacguggugaaccagaacgcccaggcccugaacacccuggugaagcagcugagcagcaacuucggcgccaucagcagcgugcugaacgacauccugagccggcuggacccucccgaggccgaggugcagaucgaccggcugaucacuggccggcugcagagccugcagaccuacgugacccagcagcugauccgggccgccgagauucgggccagcgccaaccuggccgccaccaagaugagcgagugcgugcugggccagagcaagcggguggacuucugcggcaagggcuaccaccugaugagcuuuccccagagcgcaccccacggagugguguuccugcacgugaccuacgugcccgcccaggagaagaacuucaccaccgccccagccaucugccacgacggcaaggcccacuuuccccgggagggcguguucgugagcaacggcacccacugguucgugacccagcggaacuucuacgagccccagaucaucaccaccgacaacaccuucgugagcggcaacugcgacguggugaucggcaucgugaacaacaccguguacgauccccugcagcccgagcuggacagcuucaaggaggagcuggacaaguacuucaagaaucacaccagccccgacguggaccugggcgacaucagcggcaucaacgccagcguggugaacauccagaaggagaucgaucggcugaacgagguggccaagaaccugaacgagagccugaucgaccugcaggagcugggcaaguacgagcaguacaucaaguggcccugguacaucuggcugggcuucaucgccggccugaucgccaucgugauggugaccaucaugcugugcugcaugaccagcugcugcagcugccugaagggcuguugcagcugcggcagcugcugcaaguucgacgaggacgacagcgagcccgugcugaagggcgugaagcugcacuacaccugaugacucgagcugguacugcaugcacgcaaugcuagcugccccuuucccguccuggguaccccgagucucccccgaccucgggucccagguaugcucccaccuccaccugccccacucaccaccucugcuaguuccagacaccucccaagcacgcagcaaugcagcucaaaacgcuuagccuagccacacccccacgggaaacagcagugauuaaccuuuagcaauaaacgaaaguuuaacuaagcuauacuaaccccaggguuggucaauuucgugccagccacacccuggagcuagcaaaaaaaaaaaaaaaaaaaaaaaaaaaaaagcauaugacuaaaaaaaaaaaaaaaaaaaaaaaaaaaaaaaaaaaaaaaaaaaaaaaaaaaaaaaaaaaaaaaaaaaaaa

SEQ ID NO: 26856 - RNA, 4283 nt, Artificial Sequence
  SARS-CoV-2/Wuhan/WIV05/2019__EPI_ISL_402128 spike protein mRNA gc (1-1273)(K986P_V987P_N439K_D614G)
agaauaaacuaguauucuucugguccccacagacucagagagaacccgccaccauguucguguuccuggugcugcugccccuggugagcagccagugcgugaaccugaccacccggacccagcugccaccagccuacaccaacagcuucacccggggcgucuacuaccccgacaagguguuccggagcagcguccugcacagcacccaggaccuguuccugcccuucuucagcaacgugaccugguuccacgccauccacgugagcggcaccaacggcaccaagcgguucgacaaccccgugcugcccuucaacgacggcguguacuucgccagcaccgagaagagcaacaucauccggggcuggaucuucggcaccacccuggacagcaagacccagagccugcugaucgugaauaacgccaccaacguggugaucaaggugugcgaguuccaguucugcaacgaccccuuccugggcguguacuaccacaagaacaacaagagcuggauggagagcgaguuccggguguacagcagcgccaacaacugcaccuucgaguacgugagccagcccuuccugauggaccuggagggcaagcagggcaacuucaagaaccugcgggaguucguguucaagaacaucgacggcuacuucaagaucuacagcaagcacaccccaaucaaccuggugcgggaucugccccagggcuucucagcccuggagccccugguggaccugcccaucggcaucaacaucacccgguuccagacccugcuggcccugcaccggagcuaccugaccccaggcgacagcagcagcggguggacagcaggcgcggcugcuuacuacgugggcuaccugcagccccggaccuuccugcugaaguacaacgagaacggcaccaucaccgacgccguggacugcgcccuggacccucugagcgagaccaagugcacccugaagagcuucaccguggagaagggcaucuaccagaccagcaacuuccgggugcagcccaccgagagcaucgugcgguuccccaacaucaccaaccugugccccuucggcgagguguucaacgccacccgguucgccagcguguacgccuggaaccggaagcggaucagcaacugcguggccgacuacagcgugcuguacaacagcgccagcuucagcaccuucaagugcuacggcgugagccccaccaagcugaacgaccugugcuucaccaacguguacgccgacagcuucgugauccguggcgacgaggugcggcagaucgcacccggccagacaggcaagaucgccgacuacaacuacaagcugcccgacgacuucaccggcugcgugaucgccuggaacagcaagaaccucgacagcaaggugggcggcaacuacaacuaccuguaccggcuguuccggaagagcaaccugaagcccuucgagcgggacaucagcaccgagaucuaccaagccggcuccaccccuugcaacggcguggagggcuucaacugcuacuucccucugcagagcuacggcuuccagcccaccaacggcgugggcuaccagcccuaccgggugguggugcugagcuucgagcugcugcacgccccagccaccguguguggccccaagaagagcaccaaccuggugaagaacaagugcgugaacuucaacuucaacggccuuaccggcaccggcgugcugaccgagagcaacaagaaauuccugcccuuucagcaguucggccgggacaucgccgacaccaccgacgcugugcgggauccccagacccuggagauccuggacaucaccccuugcagcuucggcggcgugagcgugaucaccccaggcaccaacaccagcaaccagguggccgugcuguaccagggcgugaacugcaccgaggugcccguggccauccacgccgaccagcugacacccaccuggcgggucuacagcaccggcagcaacguguuccagacccgggccgguugccugaucggcgccgagcacgugaacaacagcuacgagugcgacauccccaucggcgccggcaucugugccagcuaccagacccagaccaauucaccccggagggcaaggagcguggccagccagagcaucaucgccuacaccaugagccugggcgccgagaacagcguggccuacagcaacaacagcaucgccauccccaccaacuucaccaucagcgugaccaccgagauucugcccgugagcaugaccaagaccagcguggacugcaccauguacaucugcggcgacagcaccgagugcagcaaccugcugcugcaguacggcagcuucugcacccagcugaaccgggcccugaccggcaucgccguggagcaggacaagaacacccaggagguguucgcccaggugaagcagaucuacaagaccccucccaucaaggacuucggcggcuucaacuucagccagauccugcccgaccccagcaagcccagcaagcggagcuucaucgaggaccugcuguucaacaaggugacccuagccgacgccggcuucaucaagcaguacggcgacugccucggcgacauagccgcccgggaccugaucugcgcccagaaguucaacggccugaccgugcugccuccccugcugaccgacgagaugaucgcccaguacaccagcgcccuguuagccggaaccaucaccagcggcuggacuuucggcgcuggagccgcucugcagauccccuucgccaugcagauggccuaccgguucaacggcaucggcgugacccagaacgugcuguacgagaaccagaagcugaucgccaaccaguucaacagcgccaucggcaagauccaggacagccugagcagcaccgcuagcgcccugggcaagcugcaggacguggugaaccagaacgcccaggcccugaacacccuggugaagcagcugagcagcaacuucggcgccaucagcagcgugcugaacgacauccugagccggcuggacccucccgaggccgaggugcagaucgaccggcugaucacuggccggcugcagagccugcagaccuacgugacccagcagcugauccgggccgccgagauucgggccagcgccaaccuggccgccaccaagaugagcgagugcgugcugggccagagcaagcggguggacuucugcggcaagggcuaccaccugaugagcuuuccccagagcgcaccccacggagugguguuccugcacgugaccuacgugcccgcccaggagaagaacuucaccaccgccccagccaucugccacgacggcaaggcccacuuuccccgggagggcguguucgugagcaacggcacccacugguucgugacccagcggaacuucuacgagccccagaucaucaccaccgacaacaccuucgugagcggcaacugcgacguggugaucggcaucgugaacaacaccguguacgauccccugcagcccgagcuggacagcuucaaggaggagcuggacaaguacuucaagaaucacaccagccccgacguggaccugggcgacaucagcggcaucaacgccagcguggugaacauccagaaggagaucgaucggcugaacgagguggccaagaaccugaacgagagccugaucgaccugcaggagcugggcaaguacgagcaguacaucaaguggcccugguacaucuggcugggcuucaucgccggccugaucgccaucgugauggugaccaucaugcugugcugcaugaccagcugcugcagcugccugaagggcuguugcagcugcggcagcugcugcaaguucgacgaggacgacagcgagcccgugcugaagggcgugaagcugcacuacaccugaugacucgagcugguacugcaugcacgcaaugcuagcugccccuuucccguccuggguaccccgagucucccccgaccucgggucccagguaugcucccaccuccaccugccccacucaccaccucugcuaguuccagacaccucccaagcacgcagcaaugcagcucaaaacgcuuagccuagccacacccccacgggaaacagcagugauuaaccuuuagcaauaaacgaaaguuuaacuaagcuauacuaaccccaggguuggucaauuucgugccagccacacccuggagcuagcaaaaaaaaaaaaaaaaaaaaaaaaaaaaaagcauaugacuaaaaaaaaaaaaaaaaaaaaaaaaaaaaaaaaaaaaaaaaaaaaaaaaaaaaaaaaaaaaaaaaaaaaaa

SEQ ID NO: 26857 - RNA, 4283 nt, Artificial Sequence
  SARS-CoV-2/Wuhan/WIV05/2019__EPI_ISL_402128 spike protein mRNA gc (1-1273)(K986P_V987P_S477N_D614G)
agaauaaacuaguauucuucugguccccacagacucagagagaacccgccaccauguucguguuccuggugcugcugccccuggugagcagccagugcgugaaccugaccacccggacccagcugccaccagccuacaccaacagcuucacccggggcgucuacuaccccgacaagguguuccggagcagcguccugcacagcacccaggaccuguuccugcccuucuucagcaacgugaccugguuccacgccauccacgugagcggcaccaacggcaccaagcgguucgacaaccccgugcugcccuucaacgacggcguguacuucgccagcaccgagaagagcaacaucauccggggcuggaucuucggcaccacccuggacagcaagacccagagccugcugaucgugaauaacgccaccaacguggugaucaaggugugcgaguuccaguucugcaacgaccccuuccugggcguguacuaccacaagaacaacaagagcuggauggagagcgaguuccggguguacagcagcgccaacaacugcaccuucgaguacgugagccagcccuuccugauggaccuggagggcaagcagggcaacuucaagaaccugcgggaguucguguucaagaacaucgacggcuacuucaagaucuacagcaagcacaccccaaucaaccuggugcgggaucugccccagggcuucucagcccuggagccccugguggaccugcccaucggcaucaacaucacccgguuccagacccugcuggcccugcaccggagcuaccugaccccaggcgacagcagcagcggguggacagcaggcgcggcugcuuacuacgugggcuaccugcagccccggaccuuccugcugaaguacaacgagaacggcaccaucaccgacgccguggacugcgcccuggacccucugagcgagaccaagugcacccugaagagcuucaccguggagaagggcaucuaccagaccagcaacuuccgggugcagcccaccgagagcaucgugcgguuccccaacaucaccaaccugugccccuucggcgagguguucaacgccacccgguucgccagcguguacgccuggaaccggaagcggaucagcaacugcguggccgacuacagcgugcuguacaacagcgccagcuucagcaccuucaagugcuacggcgugagccccaccaagcugaacgaccugugcuucaccaacguguacgccgacagcuucgugauccguggcgacgaggugcggcagaucgcacccggccagacaggcaagaucgccgacuacaacuacaagcugcccgacgacuucaccggcugcgugaucgccuggaacagcaacaaccucgacagcaaggugggcggcaacuacaacuaccuguaccggcuguuccggaagagcaaccugaagcccuucgagcgggacaucagcaccgagaucuaccaagccggcaacaccccuugcaacggcguggagggcuucaacugcuacuucccucugcagagcuacggcuuccagcccaccaacggcgugggcuaccagcccuaccgggugguggugcugagcuucgagcugcugcacgccccagccaccguguguggccccaagaagagcaccaaccuggugaagaacaagugcgugaacuucaacuucaacggccuuaccggcaccggcgugcugaccgagagcaacaagaaauuccugcccuuucagcaguucggccgggacaucgccgacaccaccgacgcugugcgggauccccagacccuggagauccuggacaucaccccuugcagcuucggcggcgugagcgugaucaccccaggcaccaacaccagcaaccagguggccgugcuguaccagggcgugaacugcaccgaggugcccguggccauccacgccgaccagcugacacccaccuggcgggucuacagcaccggcagcaacguguuccagacccgggccgguugccugaucggcgccgagcacgugaacaacagcuacgagugcgacauccccaucggcgccggcaucugugccagcuaccagacccagaccaauucaccccggagggcaaggagcguggccagccagagcaucaucgccuacaccaugagccugggcgccgagaacagcguggccuacagcaacaacagcaucgccauccccaccaacuucaccaucagcgugaccaccgagauucugcccgugagcaugaccaagaccagcguggacugcaccauguacaucugcggcgacagcaccgagugcagcaaccugcugcugcaguacggcagcuucugcacccagcugaaccgggcccugaccggcaucgccguggagcaggacaagaacacccaggagguguucgcccaggugaagcagaucuacaagaccccucccaucaaggacuucggcggcuucaacuucagccagauccugcccgaccccagcaagcccagcaagcggagcuucaucgaggaccugcuguucaacaaggugacccuagccgacgccggcuucaucaagcaguacggcgacugccucggcgacauagccgcccgggaccugaucugcgcccagaaguucaacggccugaccgugcugccuccccugcugaccgacgagaugaucgcccaguacaccagcgcccuguuagccggaaccaucaccagcggcuggacuuucggcgcuggagccgcucugcagauccccuucgccaugcagauggccuaccgguucaacggcaucggcgugacccagaacgugcuguacgagaaccagaagcugaucgccaaccaguucaacagcgccaucggcaagauccaggacagccugagcagcaccgcuagcgcccugggcaagcugcaggacguggugaaccagaacgcccaggcccugaacacccuggugaagcagcugagcagcaacuucggcgccaucagcagcgugcugaacgacauccugagccggcuggacccucccgaggccgaggugcagaucgaccggcugaucacuggccggcugcagagccugcagaccuacgugacccagcagcugauccgggccgccgagauucgggccagcgccaaccuggccgccaccaagaugagcgagugcgugcugggccagagcaagcggguggacuucugcggcaagggcuaccaccugaugagcuuuccccagagcgcaccccacggagugguguuccugcacgugaccuacgugcccgcccaggagaagaacuucaccaccgccccagccaucugccacgacggcaaggcccacuuuccccgggagggcguguucgugagcaacggcacccacugguucgugacccagcggaacuucuacgagccccagaucaucaccaccgacaacaccuucgugagcggcaacugcgacguggugaucggcaucgugaacaacaccguguacgauccccugcagcccgagcuggacagcuucaaggaggagcuggacaaguacuucaagaaucacaccagccccgacguggaccugggcgacaucagcggcaucaacgccagcguggugaacauccagaaggagaucgaucggcugaacgagguggccaagaaccugaacgagagccugaucgaccugcaggagcugggcaaguacgagcaguacaucaaguggcccugguacaucuggcugggcuucaucgccggccugaucgccaucgugauggugaccaucaugcugugcugcaugaccagcugcugcagcugccugaagggcuguugcagcugcggcagcugcugcaaguucgacgaggacgacagcgagcccgugcugaagggcgugaagcugcacuacaccugaugacucgagcugguacugcaugcacgcaaugcuagcugccccuuucccguccuggguaccccgagucucccccgaccucgggucccagguaugcucccaccuccaccugccccacucaccaccucugcuaguuccagacaccucccaagcacgcagcaaugcagcucaaaacgcuuagccuagccacacccccacgggaaacagcagugauuaaccuuuagcaauaaacgaaaguuuaacuaagcuauacuaaccccaggguuggucaauuucgugccagccacacccuggagcuagcaaaaaaaaaaaaaaaaaaaaaaaaaaaaaagcauaugacuaaaaaaaaaaaaaaaaaaaaaaaaaaaaaaaaaaaaaaaaaaaaaaaaaaaaaaaaaaaaaaaaaaaaaa

SEQ ID NO: 26858 - RNA, 4283 nt, Artificial Sequence
  SARS-CoV-2/Wuhan/WIV05/2019__EPI_ISL_402128 spike protein mRNA gc (1-1273)(K986P_V987P_N501Y_D614G)
agaauaaacuaguauucuucugguccccacagacucagagagaacccgccaccauguucguguuccuggugcugcugccccuggugagcagccagugcgugaaccugaccacccggacccagcugccaccagccuacaccaacagcuucacccggggcgucuacuaccccgacaagguguuccggagcagcguccugcacagcacccaggaccuguuccugcccuucuucagcaacgugaccugguuccacgccauccacgugagcggcaccaacggcaccaagcgguucgacaaccccgugcugcccuucaacgacggcguguacuucgccagcaccgagaagagcaacaucauccggggcuggaucuucggcaccacccuggacagcaagacccagagccugcugaucgugaauaacgccaccaacguggugaucaaggugugcgaguuccaguucugcaacgaccccuuccugggcguguacuaccacaagaacaacaagagcuggauggagagcgaguuccggguguacagcagcgccaacaacugcaccuucgaguacgugagccagcccuuccugauggaccuggagggcaagcagggcaacuucaagaaccugcgggaguucguguucaagaacaucgacggcuacuucaagaucuacagcaagcacaccccaaucaaccuggugcgggaucugccccagggcuucucagcccuggagccccugguggaccugcccaucggcaucaacaucacccgguuccagacccugcuggcccugcaccggagcuaccugaccccaggcgacagcagcagcggguggacagcaggcgcggcugcuuacuacgugggcuaccugcagccccggaccuuccugcugaaguacaacgagaacggcaccaucaccgacgccguggacugcgcccuggacccucugagcgagaccaagugcacccugaagagcuucaccguggagaagggcaucuaccagaccagcaacuuccgggugcagcccaccgagagcaucgugcgguuccccaacaucaccaaccugugccccuucggcgagguguucaacgccacccgguucgccagcguguacgccuggaaccggaagcggaucagcaacugcguggccgacuacagcgugcuguacaacagcgccagcuucagcaccuucaagugcuacggcgugagccccaccaagcugaacgaccugugcuucaccaacguguacgccgacagcuucgugauccguggcgacgaggugcggcagaucgcacccggccagacaggcaagaucgccgacuacaacuacaagcugcccgacgacuucaccggcugcgugaucgccuggaacagcaacaaccucgacagcaaggugggcggcaacuacaacuaccuguaccggcuguuccggaagagcaaccugaagcccuucgagcgggacaucagcaccgagaucuaccaagccggcuccaccccuugcaacggcguggagggcuucaacugcuacuucccucugcagagcuacggcuuccagcccaccuacggcgugggcuaccagcccuaccgggugguggugcugagcuucgagcugcugcacgccccagccaccguguguggccccaagaagagcaccaaccuggugaagaacaagugcgugaacuucaacuucaacggccuuaccggcaccggcgugcugaccgagagcaacaagaaauuccugcccuuucagcaguucggccgggacaucgccgacaccaccgacgcugugcgggauccccagacccuggagauccuggacaucaccccuugcagcuucggcggcgugagcgugaucaccccaggcaccaacaccagcaaccagguggccgugcuguaccagggcgugaacugcaccgaggugcccguggccauccacgccgaccagcugacacccaccuggcgggucuacagcaccggcagcaacguguuccagacccgggccgguugccugaucggcgccgagcacgugaacaacagcuacgagugcgacauccccaucggcgccggcaucugugccagcuaccagacccagaccaauucaccccggagggcaaggagcguggccagccagagcaucaucgccuacaccaugagccugggcgccgagaacagcguggccuacagcaacaacagcaucgccauccccaccaacuucaccaucagcgugaccaccgagauucugcccgugagcaugaccaagaccagcguggacugcaccauguacaucugcggcgacagcaccgagugcagcaaccugcugcugcaguacggcagcuucugcacccagcugaaccgggcccugaccggcaucgccguggagcaggacaagaacacccaggagguguucgcccaggugaagcagaucuacaagaccccucccaucaaggacuucggcggcuucaacuucagccagauccugcccgaccccagcaagcccagcaagcggagcuucaucgaggaccugcuguucaacaaggugacccuagccgacgccggcuucaucaagcaguacggcgacugccucggcgacauagccgcccgggaccugaucugcgcccagaaguucaacggccugaccgugcugccuccccugcugaccgacgagaugaucgcccaguacaccagcgcccuguuagccggaaccaucaccagcggcuggacuuucggcgcuggagccgcucugcagauccccuucgccaugcagauggccuaccgguucaacggcaucggcgugacccagaacgugcuguacgagaaccagaagcugaucgccaaccaguucaacagcgccaucggcaagauccaggacagccugagcagcaccgcuagcgcccugggcaagcugcaggacguggugaaccagaacgcccaggcccugaacacccuggugaagcagcugagcagcaacuucggcgccaucagcagcgugcugaacgacauccugagccggcuggacccucccgaggccgaggugcagaucgaccggcugaucacuggccggcugcagagccugcagaccuacgugacccagcagcugauccgggccgccgagauucgggccagcgccaaccuggccgccaccaagaugagcgagugcgugcugggccagagcaagcggguggacuucugcggcaagggcuaccaccugaugagcuuuccccagagcgcaccccacggagugguguuccugcacgugaccuacgugcccgcccaggagaagaacuucaccaccgccccagccaucugccacgacggcaaggcccacuuuccccgggagggcguguucgugagcaacggcacccacugguucgugacccagcggaacuucuacgagccccagaucaucaccaccgacaacaccuucgugagcggcaacugcgacguggugaucggcaucgugaacaacaccguguacgauccccugcagcccgagcuggacagcuucaaggaggagcuggacaaguacuucaagaaucacaccagccccgacguggaccugggcgacaucagcggcaucaacgccagcguggugaacauccagaaggagaucgaucggcugaacgagguggccaagaaccugaacgagagccugaucgaccugcaggagcugggcaaguacgagcaguacaucaaguggcccugguacaucuggcugggcuucaucgccggccugaucgccaucgugauggugaccaucaugcugugcugcaugaccagcugcugcagcugccugaagggcuguugcagcugcggcagcugcugcaaguucgacgaggacgacagcgagcccgugcugaagggcgugaagcugcacuacaccugaugacucgagcugguacugcaugcacgcaaugcuagcugccccuuucccguccuggguaccccgagucucccccgaccucgggucccagguaugcucccaccuccaccugccccacucaccaccucugcuaguuccagacaccucccaagcacgcagcaaugcagcucaaaacgcuuagccuagccacacccccacgggaaacagcagugauuaaccuuuagcaauaaacgaaaguuuaacuaagcuauacuaaccccaggguuggucaauuucgugccagccacacccuggagcuagcaaaaaaaaaaaaaaaaaaaaaaaaaaaaaagcauaugacuaaaaaaaaaaaaaaaaaaaaaaaaaaaaaaaaaaaaaaaaaaaaaaaaaaaaaaaaaaaaaaaaaaaaaa

SEQ ID NO: 26859 - RNA, 4277 nt, Artificial Sequence
  SARS-CoV-2/Wuhan/WIV05/2019__EPI_ISL_402128 spike protein mRNA gc (1-1273)(K986P_V987P_H69del_V70del_D614G)
agaauaaacuaguauucuucugguccccacagacucagagagaacccgccaccauguucguguuccuggugcugcugccccuggugagcagccagugcgugaaccugaccacccggacccagcugccaccagccuacaccaacagcuucacccggggcgucuacuaccccgacaagguguuccggagcagcguccugcacagcacccaggaccuguuccugcccuucuucagcaacgugaccugguuccacgccaucagcggcaccaacggcaccaagcgguucgacaaccccgugcugcccuucaacgacggcguguacuucgccagcaccgagaagagcaacaucauccggggcuggaucuucggcaccacccuggacagcaagacccagagccugcugaucgugaauaacgccaccaacguggugaucaaggugugcgaguuccaguucugcaacgaccccuuccugggcguguacuaccacaagaacaacaagagcuggauggagagcgaguuccggguguacagcagcgccaacaacugcaccuucgaguacgugagccagcccuuccugauggaccuggagggcaagcagggcaacuucaagaaccugcgggaguucguguucaagaacaucgacggcuacuucaagaucuacagcaagcacaccccaaucaaccuggugcgggaucugccccagggcuucucagcccuggagccccugguggaccugcccaucggcaucaacaucacccgguuccagacccugcuggcccugcaccggagcuaccugaccccaggcgacagcagcagcggguggacagcaggcgcggcugcuuacuacgugggcuaccugcagccccggaccuuccugcugaaguacaacgagaacggcaccaucaccgacgccguggacugcgcccuggacccucugagcgagaccaagugcacccugaagagcuucaccguggagaagggcaucuaccagaccagcaacuuccgggugcagcccaccgagagcaucgugcgguuccccaacaucaccaaccugugccccuucggcgagguguucaacgccacccgguucgccagcguguacgccuggaaccggaagcggaucagcaacugcguggccgacuacagcgugcuguacaacagcgccagcuucagcaccuucaagugcuacggcgugagccccaccaagcugaacgaccugugcuucaccaacguguacgccgacagcuucgugauccguggcgacgaggugcggcagaucgcacccggccagacaggcaagaucgccgacuacaacuacaagcugcccgacgacuucaccggcugcgugaucgccuggaacagcaacaaccucgacagcaaggugggcggcaacuacaacuaccuguaccggcuguuccggaagagcaaccugaagcccuucgagcgggacaucagcaccgagaucuaccaagccggcuccaccccuugcaacggcguggagggcuucaacugcuacuucccucugcagagcuacggcuuccagcccaccaacggcgugggcuaccagcccuaccgggugguggugcugagcuucgagcugcugcacgccccagccaccguguguggccccaagaagagcaccaaccuggugaagaacaagugcgugaacuucaacuucaacggccuuaccggcaccggcgugcugaccgagagcaacaagaaauuccugcccuuucagcaguucggccgggacaucgccgacaccaccgacgcugugcgggauccccagacccuggagauccuggacaucaccccuugcagcuucggcggcgugagcgugaucaccccaggcaccaacaccagcaaccagguggccgugcuguaccagggcgugaacugcaccgaggugcccguggccauccacgccgaccagcugacacccaccuggcgggucuacagcaccggcagcaacguguuccagacccgggccgguugccugaucggcgccgagcacgugaacaacagcuacgagugcgacauccccaucggcgccggcaucugugccagcuaccagacccagaccaauucaccccggagggcaaggagcguggccagccagagcaucaucgccuacaccaugagccugggcgccgagaacagcguggccuacagcaacaacagcaucgccauccccaccaacuucaccaucagcgugaccaccgagauucugcccgugagcaugaccaagaccagcguggacugcaccauguacaucugcggcgacagcaccgagugcagcaaccugcugcugcaguacggcagcuucugcacccagcugaaccgggcccugaccggcaucgccguggagcaggacaagaacacccaggagguguucgcccaggugaagcagaucuacaagaccccucccaucaaggacuucggcggcuucaacuucagccagauccugcccgaccccagcaagcccagcaagcggagcuucaucgaggaccugcuguucaacaaggugacccuagccgacgccggcuucaucaagcaguacggcgacugccucggcgacauagccgcccgggaccugaucugcgcccagaaguucaacggccugaccgugcugccuccccugcugaccgacgagaugaucgcccaguacaccagcgcccuguuagccggaaccaucaccagcggcuggacuuucggcgcuggagccgcucugcagauccccuucgccaugcagauggccuaccgguucaacggcaucggcgugacccagaacgugcuguacgagaaccagaagcugaucgccaaccaguucaacagcgccaucggcaagauccaggacagccugagcagcaccgcuagcgcccugggcaagcugcaggacguggugaaccagaacgcccaggcccugaacacccuggugaagcagcugagcagcaacuucggcgccaucagcagcgugcugaacgacauccugagccggcuggacccucccgaggccgaggugcagaucgaccggcugaucacuggccggcugcagagccugcagaccuacgugacccagcagcugauccgggccgccgagauucgggccagcgccaaccuggccgccaccaagaugagcgagugcgugcugggccagagcaagcggguggacuucugcggcaagggcuaccaccugaugagcuuuccccagagcgcaccccacggagugguguuccugcacgugaccuacgugcccgcccaggagaagaacuucaccaccgccccagccaucugccacgacggcaaggcccacuuuccccgggagggcguguucgugagcaacggcacccacugguucgugacccagcggaacuucuacgagccccagaucaucaccaccgacaacaccuucgugagcggcaacugcgacguggugaucggcaucgugaacaacaccguguacgauccccugcagcccgagcuggacagcuucaaggaggagcuggacaaguacuucaagaaucacaccagccccgacguggaccugggcgacaucagcggcaucaacgccagcguggugaacauccagaaggagaucgaucggcugaacgagguggccaagaaccugaacgagagccugaucgaccugcaggagcugggcaaguacgagcaguacaucaaguggcccugguacaucuggcugggcuucaucgccggccugaucgccaucgugauggugaccaucaugcugugcugcaugaccagcugcugcagcugccugaagggcuguugcagcugcggcagcugcugcaaguucgacgaggacgacagcgagcccgugcugaagggcgugaagcugcacuacaccugaugacucgagcugguacugcaugcacgcaaugcuagcugccccuuucccguccuggguaccccgagucucccccgaccucgggucccagguaugcucccaccuccaccugccccacucaccaccucugcuaguuccagacaccucccaagcacgcagcaaugcagcucaaaacgcuuagccuagccacacccccacgggaaacagcagugauuaaccuuuagcaauaaacgaaaguuuaacuaagcuauacuaaccccaggguuggucaauuucgugccagccacacccuggagcuagcaaaaaaaaaaaaaaaaaaaaaaaaaaaaaagcauaugacuaaaaaaaaaaaaaaaaaaaaaaaaaaaaaaaaaaaaaaaaaaaaaaaaaaaaaaaaaaaaaaaaaaaaaa

SEQ ID NO: 26860 - RNA, 4283 nt, Artificial Sequence
  SARS-CoV-2/Wuhan/WIV05/2019__EPI_ISL_402128 spike protein mRNA gc (1-1273)(K986P_V987P_Y453F_D614G)
agaauaaacuaguauucuucugguccccacagacucagagagaacccgccaccauguucguguuccuggugcugcugccccuggugagcagccagugcgugaaccugaccacccggacccagcugccaccagccuacaccaacagcuucacccggggcgucuacuaccccgacaagguguuccggagcagcguccugcacagcacccaggaccuguuccugcccuucuucagcaacgugaccugguuccacgccauccacgugagcggcaccaacggcaccaagcgguucgacaaccccgugcugcccuucaacgacggcguguacuucgccagcaccgagaagagcaacaucauccggggcuggaucuucggcaccacccuggacagcaagacccagagccugcugaucgugaauaacgccaccaacguggugaucaaggugugcgaguuccaguucugcaacgaccccuuccugggcguguacuaccacaagaacaacaagagcuggauggagagcgaguuccggguguacagcagcgccaacaacugcaccuucgaguacgugagccagcccuuccugauggaccuggagggcaagcagggcaacuucaagaaccugcgggaguucguguucaagaacaucgacggcuacuucaagaucuacagcaagcacaccccaaucaaccuggugcgggaucugccccagggcuucucagcccuggagccccugguggaccugcccaucggcaucaacaucacccgguuccagacccugcuggcccugcaccggagcuaccugaccccaggcgacagcagcagcggguggacagcaggcgcggcugcuuacuacgugggcuaccugcagccccggaccuuccugcugaaguacaacgagaacggcaccaucaccgacgccguggacugcgcccuggacccucugagcgagaccaagugcacccugaagagcuucaccguggagaagggcaucuaccagaccagcaacuuccgggugcagcccaccgagagcaucgugcgguuccccaacaucaccaaccugugccccuucggcgagguguucaacgccacccgguucgccagcguguacgccuggaaccggaagcggaucagcaacugcguggccgacuacagcgugcuguacaacagcgccagcuucagcaccuucaagugcuacggcgugagccccaccaagcugaacgaccugugcuucaccaacguguacgccgacagcuucgugauccguggcgacgaggugcggcagaucgcacccggccagacaggcaagaucgccgacuacaacuacaagcugcccgacgacuucaccggcugcgugaucgccuggaacagcaacaaccucgacagcaaggugggcggcaacuacaacuaccuguuccggcuguuccggaagagcaaccugaagcccuucgagcgggacaucagcaccgagaucuaccaagccggcuccaccccuugcaacggcguggagggcuucaacugcuacuucccucugcagagcuacggcuuccagcccaccaacggcgugggcuaccagcccuaccgggugguggugcugagcuucgagcugcugcacgccccagccaccguguguggccccaagaagagcaccaaccuggugaagaacaagugcgugaacuucaacuucaacggccuuaccggcaccggcgugcugaccgagagcaacaagaaauuccugcccuuucagcaguucggccgggacaucgccgacaccaccgacgcugugcgggauccccagacccuggagauccuggacaucaccccuugcagcuucggcggcgugagcgugaucaccccaggcaccaacaccagcaaccagguggccgugcuguaccagggcgugaacugcaccgaggugcccguggccauccacgccgaccagcugacacccaccuggcgggucuacagcaccggcagcaacguguuccagacccgggccgguugccugaucggcgccgagcacgugaacaacagcuacgagugcgacauccccaucggcgccggcaucugugccagcuaccagacccagaccaauucaccccggagggcaaggagcguggccagccagagcaucaucgccuacaccaugagccugggcgccgagaacagcguggccuacagcaacaacagcaucgccauccccaccaacuucaccaucagcgugaccaccgagauucugcccgugagcaugaccaagaccagcguggacugcaccauguacaucugcggcgacagcaccgagugcagcaaccugcugcugcaguacggcagcuucugcacccagcugaaccgggcccugaccggcaucgccguggagcaggacaagaacacccaggagguguucgcccaggugaagcagaucuacaagaccccucccaucaaggacuucggcggcuucaacuucagccagauccugcccgaccccagcaagcccagcaagcggagcuucaucgaggaccugcuguucaacaaggugacccuagccgacgccggcuucaucaagcaguacggcgacugccucggcgacauagccgcccgggaccugaucugcgcccagaaguucaacggccugaccgugcugccuccccugcugaccgacgagaugaucgcccaguacaccagcgcccuguuagccggaaccaucaccagcggcuggacuuucggcgcuggagccgcucugcagauccccuucgccaugcagauggccuaccgguucaacggcaucggcgugacccagaacgugcuguacgagaaccagaagcugaucgccaaccaguucaacagcgccaucggcaagauccaggacagccugagcagcaccgcuagcgcccugggcaagcugcaggacguggugaaccagaacgcccaggcccugaacacccuggugaagcagcugagcagcaacuucggcgccaucagcagcgugcugaacgacauccugagccggcuggacccucccgaggccgaggugcagaucgaccggcugaucacuggccggcugcagagccugcagaccuacgugacccagcagcugauccgggccgccgagauucgggccagcgccaaccuggccgccaccaagaugagcgagugcgugcugggccagagcaagcggguggacuucugcggcaagggcuaccaccugaugagcuuuccccagagcgcaccccacggagugguguuccugcacgugaccuacgugcccgcccaggagaagaacuucaccaccgccccagccaucugccacgacggcaaggcccacuuuccccgggagggcguguucgugagcaacggcacccacugguucgugacccagcggaacuucuacgagccccagaucaucaccaccgacaacaccuucgugagcggcaacugcgacguggugaucggcaucgugaacaacaccguguacgauccccugcagcccgagcuggacagcuucaaggaggagcuggacaaguacuucaagaaucacaccagccccgacguggaccugggcgacaucagcggcaucaacgccagcguggugaacauccagaaggagaucgaucggcugaacgagguggccaagaaccugaacgagagccugaucgaccugcaggagcugggcaaguacgagcaguacaucaaguggcccugguacaucuggcugggcuucaucgccggccugaucgccaucgugauggugaccaucaugcugugcugcaugaccagcugcugcagcugccugaagggcuguugcagcugcggcagcugcugcaaguucgacgaggacgacagcgagcccgugcugaagggcgugaagcugcacuacaccugaugacucgagcugguacugcaugcacgcaaugcuagcugccccuuucccguccuggguaccccgagucucccccgaccucgggucccagguaugcucccaccuccaccugccccacucaccaccucugcuaguuccagacaccucccaagcacgcagcaaugcagcucaaaacgcuuagccuagccacacccccacgggaaacagcagugauuaaccuuuagcaauaaacgaaaguuuaacuaagcuauacuaaccccaggguuggucaauuucgugccagccacacccuggagcuagcaaaaaaaaaaaaaaaaaaaaaaaaaaaaaagcauaugacuaaaaaaaaaaaaaaaaaaaaaaaaaaaaaaaaaaaaaaaaaaaaaaaaaaaaaaaaaaaaaaaaaaaaaa

SEQ ID NO: 26861 - RNA, 4283 nt, Artificial Sequence
  SARS-CoV-2/Wuhan/WIV05/2019__EPI_ISL_402128 spike protein mRNA gc (1-1273)(K986P_V987P_D614G_I692V)
agaauaaacuaguauucuucugguccccacagacucagagagaacccgccaccauguucguguuccuggugcugcugccccuggugagcagccagugcgugaaccugaccacccggacccagcugccaccagccuacaccaacagcuucacccggggcgucuacuaccccgacaagguguuccggagcagcguccugcacagcacccaggaccuguuccugcccuucuucagcaacgugaccugguuccacgccauccacgugagcggcaccaacggcaccaagcgguucgacaaccccgugcugcccuucaacgacggcguguacuucgccagcaccgagaagagcaacaucauccggggcuggaucuucggcaccacccuggacagcaagacccagagccugcugaucgugaauaacgccaccaacguggugaucaaggugugcgaguuccaguucugcaacgaccccuuccugggcguguacuaccacaagaacaacaagagcuggauggagagcgaguuccggguguacagcagcgccaacaacugcaccuucgaguacgugagccagcccuuccugauggaccuggagggcaagcagggcaacuucaagaaccugcgggaguucguguucaagaacaucgacggcuacuucaagaucuacagcaagcacaccccaaucaaccuggugcgggaucugccccagggcuucucagcccuggagccccugguggaccugcccaucggcaucaacaucacccgguuccagacccugcuggcccugcaccggagcuaccugaccccaggcgacagcagcagcggguggacagcaggcgcggcugcuuacuacgugggcuaccugcagccccggaccuuccugcugaaguacaacgagaacggcaccaucaccgacgccguggacugcgcccuggacccucugagcgagaccaagugcacccugaagagcuucaccguggagaagggcaucuaccagaccagcaacuuccgggugcagcccaccgagagcaucgugcgguuccccaacaucaccaaccugugccccuucggcgagguguucaacgccacccgguucgccagcguguacgccuggaaccggaagcggaucagcaacugcguggccgacuacagcgugcuguacaacagcgccagcuucagcaccuucaagugcuacggcgugagccccaccaagcugaacgaccugugcuucaccaacguguacgccgacagcuucgugauccguggcgacgaggugcggcagaucgcacccggccagacaggcaagaucgccgacuacaacuacaagcugcccgacgacuucaccggcugcgugaucgccuggaacagcaacaaccucgacagcaaggugggcggcaacuacaacuaccuguaccggcuguuccggaagagcaaccugaagcccuucgagcgggacaucagcaccgagaucuaccaagccggcuccaccccuugcaacggcguggagggcuucaacugcuacuucccucugcagagcuacggcuuccagcccaccaacggcgugggcuaccagcccuaccgggugguggugcugagcuucgagcugcugcacgccccagccaccguguguggccccaagaagagcaccaaccuggugaagaacaagugcgugaacuucaacuucaacggccuuaccggcaccggcgugcugaccgagagcaacaagaaauuccugcccuuucagcaguucggccgggacaucgccgacaccaccgacgcugugcgggauccccagacccuggagauccuggacaucaccccuugcagcuucggcggcgugagcgugaucaccccaggcaccaacaccagcaaccagguggccgugcuguaccagggcgugaacugcaccgaggugcccguggccauccacgccgaccagcugacacccaccuggcgggucuacagcaccggcagcaacguguuccagacccgggccgguugccugaucggcgccgagcacgugaacaacagcuacgagugcgacauccccaucggcgccggcaucugugccagcuaccagacccagaccaauucaccccggagggcaaggagcguggccagccagagcgugaucgccuacaccaugagccugggcgccgagaacagcguggccuacagcaacaacagcaucgccauccccaccaacuucaccaucagcgugaccaccgagauucugcccgugagcaugaccaagaccagcguggacugcaccauguacaucugcggcgacagcaccgagugcagcaaccugcugcugcaguacggcagcuucugcacccagcugaaccgggcccugaccggcaucgccguggagcaggacaagaacacccaggagguguucgcccaggugaagcagaucuacaagaccccucccaucaaggacuucggcggcuucaacuucagccagauccugcccgaccccagcaagcccagcaagcggagcuucaucgaggaccugcuguucaacaaggugacccuagccgacgccggcuucaucaagcaguacggcgacugccucggcgacauagccgcccgggaccugaucugcgcccagaaguucaacggccugaccgugcugccuccccugcugaccgacgagaugaucgcccaguacaccagcgcccuguuagccggaaccaucaccagcggcuggacuuucggcgcuggagccgcucugcagauccccuucgccaugcagauggccuaccgguucaacggcaucggcgugacccagaacgugcuguacgagaaccagaagcugaucgccaaccaguucaacagcgccaucggcaagauccaggacagccugagcagcaccgcuagcgcccugggcaagcugcaggacguggugaaccagaacgcccaggcccugaacacccuggugaagcagcugagcagcaacuucggcgccaucagcagcgugcugaacgacauccugagccggcuggacccucccgaggccgaggugcagaucgaccggcugaucacuggccggcugcagagccugcagaccuacgugacccagcagcugauccgggccgccgagauucgggccagcgccaaccuggccgccaccaagaugagcgagugcgugcugggccagagcaagcggguggacuucugcggcaagggcuaccaccugaugagcuuuccccagagcgcaccccacggagugguguuccugcacgugaccuacgugcccgcccaggagaagaacuucaccaccgccccagccaucugccacgacggcaaggcccacuuuccccgggagggcguguucgugagcaacggcacccacugguucgugacccagcggaacuucuacgagccccagaucaucaccaccgacaacaccuucgugagcggcaacugcgacguggugaucggcaucgugaacaacaccguguacgauccccugcagcccgagcuggacagcuucaaggaggagcuggacaaguacuucaagaaucacaccagccccgacguggaccugggcgacaucagcggcaucaacgccagcguggugaacauccagaaggagaucgaucggcugaacgagguggccaagaaccugaacgagagccugaucgaccugcaggagcugggcaaguacgagcaguacaucaaguggcccugguacaucuggcugggcuucaucgccggccugaucgccaucgugauggugaccaucaugcugugcugcaugaccagcugcugcagcugccugaagggcuguugcagcugcggcagcugcugcaaguucgacgaggacgacagcgagcccgugcugaagggcgugaagcugcacuacaccugaugacucgagcugguacugcaugcacgcaaugcuagcugccccuuucccguccuggguaccccgagucucccccgaccucgggucccagguaugcucccaccuccaccugccccacucaccaccucugcuaguuccagacaccucccaagcacgcagcaaugcagcucaaaacgcuuagccuagccacacccccacgggaaacagcagugauuaaccuuuagcaauaaacgaaaguuuaacuaagcuauacuaaccccaggguuggucaauuucgugccagccacacccuggagcuagcaaaaaaaaaaaaaaaaaaaaaaaaaaaaaagcauaugacuaaaaaaaaaaaaaaaaaaaaaaaaaaaaaaaaaaaaaaaaaaaaaaaaaaaaaaaaaaaaaaaaaaaaaa

SEQ ID NO: 26862 - RNA, 4283 nt, Artificial Sequence
  SARS-CoV-2/Wuhan/WIV05/2019__EPI_ISL_402128 spike protein mRNA gc (1-1273)(K986P_V987P_D614G_M1229I)
agaauaaacuaguauucuucugguccccacagacucagagagaacccgccaccauguucguguuccuggugcugcugccccuggugagcagccagugcgugaaccugaccacccggacccagcugccaccagccuacaccaacagcuucacccggggcgucuacuaccccgacaagguguuccggagcagcguccugcacagcacccaggaccuguuccugcccuucuucagcaacgugaccugguuccacgccauccacgugagcggcaccaacggcaccaagcgguucgacaaccccgugcugcccuucaacgacggcguguacuucgccagcaccgagaagagcaacaucauccggggcuggaucuucggcaccacccuggacagcaagacccagagccugcugaucgugaauaacgccaccaacguggugaucaaggugugcgaguuccaguucugcaacgaccccuuccugggcguguacuaccacaagaacaacaagagcuggauggagagcgaguuccggguguacagcagcgccaacaacugcaccuucgaguacgugagccagcccuuccugauggaccuggagggcaagcagggcaacuucaagaaccugcgggaguucguguucaagaacaucgacggcuacuucaagaucuacagcaagcacaccccaaucaaccuggugcgggaucugccccagggcuucucagcccuggagccccugguggaccugcccaucggcaucaacaucacccgguuccagacccugcuggcccugcaccggagcuaccugaccccaggcgacagcagcagcggguggacagcaggcgcggcugcuuacuacgugggcuaccugcagccccggaccuuccugcugaaguacaacgagaacggcaccaucaccgacgccguggacugcgcccuggacccucugagcgagaccaagugcacccugaagagcuucaccguggagaagggcaucuaccagaccagcaacuuccgggugcagcccaccgagagcaucgugcgguuccccaacaucaccaaccugugccccuucggcgagguguucaacgccacccgguucgccagcguguacgccuggaaccggaagcggaucagcaacugcguggccgacuacagcgugcuguacaacagcgccagcuucagcaccuucaagugcuacggcgugagccccaccaagcugaacgaccugugcuucaccaacguguacgccgacagcuucgugauccguggcgacgaggugcggcagaucgcacccggccagacaggcaagaucgccgacuacaacuacaagcugcccgacgacuucaccggcugcgugaucgccuggaacagcaacaaccucgacagcaaggugggcggcaacuacaacuaccuguaccggcuguuccggaagagcaaccugaagcccuucgagcgggacaucagcaccgagaucuaccaagccggcuccaccccuugcaacggcguggagggcuucaacugcuacuucccucugcagagcuacggcuuccagcccaccaacggcgugggcuaccagcccuaccgggugguggugcugagcuucgagcugcugcacgccccagccaccguguguggccccaagaagagcaccaaccuggugaagaacaagugcgugaacuucaacuucaacggccuuaccggcaccggcgugcugaccgagagcaacaagaaauuccugcccuuucagcaguucggccgggacaucgccgacaccaccgacgcugugcgggauccccagacccuggagauccuggacaucaccccuugcagcuucggcggcgugagcgugaucaccccaggcaccaacaccagcaaccagguggccgugcuguaccagggcgugaacugcaccgaggugcccguggccauccacgccgaccagcugacacccaccuggcgggucuacagcaccggcagcaacguguuccagacccgggccgguugccugaucggcgccgagcacgugaacaacagcuacgagugcgacauccccaucggcgccggcaucugugccagcuaccagacccagaccaauucaccccggagggcaaggagcguggccagccagagcaucaucgccuacaccaugagccugggcgccgagaacagcguggccuacagcaacaacagcaucgccauccccaccaacuucaccaucagcgugaccaccgagauucugcccgugagcaugaccaagaccagcguggacugcaccauguacaucugcggcgacagcaccgagugcagcaaccugcugcugcaguacggcagcuucugcacccagcugaaccgggcccugaccggcaucgccguggagcaggacaagaacacccaggagguguucgcccaggugaagcagaucuacaagaccccucccaucaaggacuucggcggcuucaacuucagccagauccugcccgaccccagcaagcccagcaagcggagcuucaucgaggaccugcuguucaacaaggugacccuagccgacgccggcuucaucaagcaguacggcgacugccucggcgacauagccgcccgggaccugaucugcgcccagaaguucaacggccugaccgugcugccuccccugcugaccgacgagaugaucgcccaguacaccagcgcccuguuagccggaaccaucaccagcggcuggacuuucggcgcuggagccgcucugcagauccccuucgccaugcagauggccuaccgguucaacggcaucggcgugacccagaacgugcuguacgagaaccagaagcugaucgccaaccaguucaacagcgccaucggcaagauccaggacagccugagcagcaccgcuagcgcccugggcaagcugcaggacguggugaaccagaacgcccaggcccugaacacccuggugaagcagcugagcagcaacuucggcgccaucagcagcgugcugaacgacauccugagccggcuggacccucccgaggccgaggugcagaucgaccggcugaucacuggccggcugcagagccugcagaccuacgugacccagcagcugauccgggccgccgagauucgggccagcgccaaccuggccgccaccaagaugagcgagugcgugcugggccagagcaagcggguggacuucugcggcaagggcuaccaccugaugagcuuuccccagagcgcaccccacggagugguguuccugcacgugaccuacgugcccgcccaggagaagaacuucaccaccgccccagccaucugccacgacggcaaggcccacuuuccccgggagggcguguucgugagcaacggcacccacugguucgugacccagcggaacuucuacgagccccagaucaucaccaccgacaacaccuucgugagcggcaacugcgacguggugaucggcaucgugaacaacaccguguacgauccccugcagcccgagcuggacagcuucaaggaggagcuggacaaguacuucaagaaucacaccagccccgacguggaccugggcgacaucagcggcaucaacgccagcguggugaacauccagaaggagaucgaucggcugaacgagguggccaagaaccugaacgagagccugaucgaccugcaggagcugggcaaguacgagcaguacaucaaguggcccugguacaucuggcugggcuucaucgccggccugaucgccaucgugaucgugaccaucaugcugugcugcaugaccagcugcugcagcugccugaagggcuguugcagcugcggcagcugcugcaaguucgacgaggacgacagcgagcccgugcugaagggcgugaagcugcacuacaccugaugacucgagcugguacugcaugcacgcaaugcuagcugccccuuucccguccuggguaccccgagucucccccgaccucgggucccagguaugcucccaccuccaccugccccacucaccaccucugcuaguuccagacaccucccaagcacgcagcaaugcagcucaaaacgcuuagccuagccacacccccacgggaaacagcagugauuaaccuuuagcaauaaacgaaaguuuaacuaagcuauacuaaccccaggguuggucaauuucgugccagccacacccuggagcuagcaaaaaaaaaaaaaaaaaaaaaaaaaaaaaagcauaugacuaaaaaaaaaaaaaaaaaaaaaaaaaaaaaaaaaaaaaaaaaaaaaaaaaaaaaaaaaaaaaaaaaaaaaa

SEQ ID NO: 26863 - RNA, 4277 nt, Artificial Sequence
  SARS-CoV-2/Wuhan/WIV05/2019__EPI_ISL_402128 spike protein mRNA gc (1-1273)(K986P_V987P_H69del_V70del_A222V_Y453F_S477N_D614G_I692V)
agaauaaacuaguauucuucugguccccacagacucagagagaacccgccaccauguucguguuccuggugcugcugccccuggugagcagccagugcgugaaccugaccacccggacccagcugccaccagccuacaccaacagcuucacccggggcgucuacuaccccgacaagguguuccggagcagcguccugcacagcacccaggaccuguuccugcccuucuucagcaacgugaccugguuccacgccaucagcggcaccaacggcaccaagcgguucgacaaccccgugcugcccuucaacgacggcguguacuucgccagcaccgagaagagcaacaucauccggggcuggaucuucggcaccacccuggacagcaagacccagagccugcugaucgugaauaacgccaccaacguggugaucaaggugugcgaguuccaguucugcaacgaccccuuccugggcguguacuaccacaagaacaacaagagcuggauggagagcgaguuccggguguacagcagcgccaacaacugcaccuucgaguacgugagccagcccuuccugauggaccuggagggcaagcagggcaacuucaagaaccugcgggaguucguguucaagaacaucgacggcuacuucaagaucuacagcaagcacaccccaaucaaccuggugcgggaucugccccagggcuucucagugcuggagccccugguggaccugcccaucggcaucaacaucacccgguuccagacccugcuggcccugcaccggagcuaccugaccccaggcgacagcagcagcggguggacagcaggcgcggcugcuuacuacgugggcuaccugcagccccggaccuuccugcugaaguacaacgagaacggcaccaucaccgacgccguggacugcgcccuggacccucugagcgagaccaagugcacccugaagagcuucaccguggagaagggcaucuaccagaccagcaacuuccgggugcagcccaccgagagcaucgugcgguuccccaacaucaccaaccugugccccuucggcgagguguucaacgccacccgguucgccagcguguacgccuggaaccggaagcggaucagcaacugcguggccgacuacagcgugcuguacaacagcgccagcuucagcaccuucaagugcuacggcgugagccccaccaagcugaacgaccugugcuucaccaacguguacgccgacagcuucgugauccguggcgacgaggugcggcagaucgcacccggccagacaggcaagaucgccgacuacaacuacaagcugcccgacgacuucaccggcugcgugaucgccuggaacagcaacaaccucgacagcaaggugggcggcaacuacaacuaccuguuccggcuguuccggaagagcaaccugaagcccuucgagcgggacaucagcaccgagaucuaccaagccggcaacaccccuugcaacggcguggagggcuucaacugcuacuucccucugcagagcuacggcuuccagcccaccaacggcgugggcuaccagcccuaccgggugguggugcugagcuucgagcugcugcacgccccagccaccguguguggccccaagaagagcaccaaccuggugaagaacaagugcgugaacuucaacuucaacggccuuaccggcaccggcgugcugaccgagagcaacaagaaauuccugcccuuucagcaguucggccgggacaucgccgacaccaccgacgcugugcgggauccccagacccuggagauccuggacaucaccccuugcagcuucggcggcgugagcgugaucaccccaggcaccaacaccagcaaccagguggccgugcuguaccagggcgugaacugcaccgaggugcccguggccauccacgccgaccagcugacacccaccuggcgggucuacagcaccggcagcaacguguuccagacccgggccgguugccugaucggcgccgagcacgugaacaacagcuacgagugcgacauccccaucggcgccggcaucugugccagcuaccagacccagaccaauucaccccggagggcaaggagcguggccagccagagcgugaucgccuacaccaugagccugggcgccgagaacagcguggccuacagcaacaacagcaucgccauccccaccaacuucaccaucagcgugaccaccgagauucugcccgugagcaugaccaagaccagcguggacugcaccauguacaucugcggcgacagcaccgagugcagcaaccugcugcugcaguacggcagcuucugcacccagcugaaccgggcccugaccggcaucgccguggagcaggacaagaacacccaggagguguucgcccaggugaagcagaucuacaagaccccucccaucaaggacuucggcggcuucaacuucagccagauccugcccgaccccagcaagcccagcaagcggagcuucaucgaggaccugcuguucaacaaggugacccuagccgacgccggcuucaucaagcaguacggcgacugccucggcgacauagccgcccgggaccugaucugcgcccagaaguucaacggccugaccgugcugccuccccugcugaccgacgagaugaucgcccaguacaccagcgcccuguuagccggaaccaucaccagcggcuggacuuucggcgcuggagccgcucugcagauccccuucgccaugcagauggccuaccgguucaacggcaucggcgugacccagaacgugcuguacgagaaccagaagcugaucgccaaccaguucaacagcgccaucggcaagauccaggacagccugagcagcaccgcuagcgcccugggcaagcugcaggacguggugaaccagaacgcccaggcccugaacacccuggugaagcagcugagcagcaacuucggcgccaucagcagcgugcugaacgacauccugagccggcuggacccucccgaggccgaggugcagaucgaccggcugaucacuggccggcugcagagccugcagaccuacgugacccagcagcugauccgggccgccgagauucgggccagcgccaaccuggccgccaccaagaugagcgagugcgugcugggccagagcaagcggguggacuucugcggcaagggcuaccaccugaugagcuuuccccagagcgcaccccacggagugguguuccugcacgugaccuacgugcccgcccaggagaagaacuucaccaccgccccagccaucugccacgacggcaaggcccacuuuccccgggagggcguguucgugagcaacggcacccacugguucgugacccagcggaacuucuacgagccccagaucaucaccaccgacaacaccuucgugagcggcaacugcgacguggugaucggcaucgugaacaacaccguguacgauccccugcagcccgagcuggacagcuucaaggaggagcuggacaaguacuucaagaaucacaccagccccgacguggaccugggcgacaucagcggcaucaacgccagcguggugaacauccagaaggagaucgaucggcugaacgagguggccaagaaccugaacgagagccugaucgaccugcaggagcugggcaaguacgagcaguacaucaaguggcccugguacaucuggcugggcuucaucgccggccugaucgccaucgugauggugaccaucaugcugugcugcaugaccagcugcugcagcugccugaagggcuguugcagcugcggcagcugcugcaaguucgacgaggacgacagcgagcccgugcugaagggcgugaagcugcacuacaccugaugacucgagcugguacugcaugcacgcaaugcuagcugccccuuucccguccuggguaccccgagucucccccgaccucgggucccagguaugcucccaccuccaccugccccacucaccaccucugcuaguuccagacaccucccaagcacgcagcaaugcagcucaaaacgcuuagccuagccacacccccacgggaaacagcagugauuaaccuuuagcaauaaacgaaaguuuaacuaagcuauacuaaccccaggguuggucaauuucgugccagccacacccuggagcuagcaaaaaaaaaaaaaaaaaaaaaaaaaaaaaagcauaugacuaaaaaaaaaaaaaaaaaaaaaaaaaaaaaaaaaaaaaaaaaaaaaaaaaaaaaaaaaaaaaaaaaaaaaa

SEQ ID NO: 26864 - RNA, 4277 nt, Artificial Sequence
  SARS-CoV-2/Wuhan/WIV05/2019__EPI_ISL_402128 spike protein mRNA gc (1-1273)(K986P_V987P_H69del_V70del_Y453F_D614G_I692V_M1229I)
agaauaaacuaguauucuucugguccccacagacucagagagaacccgccaccauguucguguuccuggugcugcugccccuggugagcagccagugcgugaaccugaccacccggacccagcugccaccagccuacaccaacagcuucacccggggcgucuacuaccccgacaagguguuccggagcagcguccugcacagcacccaggaccuguuccugcccuucuucagcaacgugaccugguuccacgccaucagcggcaccaacggcaccaagcgguucgacaaccccgugcugcccuucaacgacggcguguacuucgccagcaccgagaagagcaacaucauccggggcuggaucuucggcaccacccuggacagcaagacccagagccugcugaucgugaauaacgccaccaacguggugaucaaggugugcgaguuccaguucugcaacgaccccuuccugggcguguacuaccacaagaacaacaagagcuggauggagagcgaguuccggguguacagcagcgccaacaacugcaccuucgaguacgugagccagcccuuccugauggaccuggagggcaagcagggcaacuucaagaaccugcgggaguucguguucaagaacaucgacggcuacuucaagaucuacagcaagcacaccccaaucaaccuggugcgggaucugccccagggcuucucagcccuggagccccugguggaccugcccaucggcaucaacaucacccgguuccagacccugcuggcccugcaccggagcuaccugaccccaggcgacagcagcagcggguggacagcaggcgcggcugcuuacuacgugggcuaccugcagccccggaccuuccugcugaaguacaacgagaacggcaccaucaccgacgccguggacugcgcccuggacccucugagcgagaccaagugcacccugaagagcuucaccguggagaagggcaucuaccagaccagcaacuuccgggugcagcccaccgagagcaucgugcgguuccccaacaucaccaaccugugccccuucggcgagguguucaacgccacccgguucgccagcguguacgccuggaaccggaagcggaucagcaacugcguggccgacuacagcgugcuguacaacagcgccagcuucagcaccuucaagugcuacggcgugagccccaccaagcugaacgaccugugcuucaccaacguguacgccgacagcuucgugauccguggcgacgaggugcggcagaucgcacccggccagacaggcaagaucgccgacuacaacuacaagcugcccgacgacuucaccggcugcgugaucgccuggaacagcaacaaccucgacagcaaggugggcggcaacuacaacuaccuguuccggcuguuccggaagagcaaccugaagcccuucgagcgggacaucagcaccgagaucuaccaagccggcuccaccccuugcaacggcguggagggcuucaacugcuacuucccucugcagagcuacggcuuccagcccaccaacggcgugggcuaccagcccuaccgggugguggugcugagcuucgagcugcugcacgccccagccaccguguguggccccaagaagagcaccaaccuggugaagaacaagugcgugaacuucaacuucaacggccuuaccggcaccggcgugcugaccgagagcaacaagaaauuccugcccuuucagcaguucggccgggacaucgccgacaccaccgacgcugugcgggauccccagacccuggagauccuggacaucaccccuugcagcuucggcggcgugagcgugaucaccccaggcaccaacaccagcaaccagguggccgugcuguaccagggcgugaacugcaccgaggugcccguggccauccacgccgaccagcugacacccaccuggcgggucuacagcaccggcagcaacguguuccagacccgggccgguugccugaucggcgccgagcacgugaacaacagcuacgagugcgacauccccaucggcgccggcaucugugccagcuaccagacccagaccaauucaccccggagggcaaggagcguggccagccagagcgugaucgccuacaccaugagccugggcgccgagaacagcguggccuacagcaacaacagcaucgccauccccaccaacuucaccaucagcgugaccaccgagauucugcccgugagcaugaccaagaccagcguggacugcaccauguacaucugcggcgacagcaccgagugcagcaaccugcugcugcaguacggcagcuucugcacccagcugaaccgggcccugaccggcaucgccguggagcaggacaagaacacccaggagguguucgcccaggugaagcagaucuacaagaccccucccaucaaggacuucggcggcuucaacuucagccagauccugcccgaccccagcaagcccagcaagcggagcuucaucgaggaccugcuguucaacaaggugacccuagccgacgccggcuucaucaagcaguacggcgacugccucggcgacauagccgcccgggaccugaucugcgcccagaaguucaacggccugaccgugcugccuccccugcugaccgacgagaugaucgcccaguacaccagcgcccuguuagccggaaccaucaccagcggcuggacuuucggcgcuggagccgcucugcagauccccuucgccaugcagauggccuaccgguucaacggcaucggcgugacccagaacgugcuguacgagaaccagaagcugaucgccaaccaguucaacagcgccaucggcaagauccaggacagccugagcagcaccgcuagcgcccugggcaagcugcaggacguggugaaccagaacgcccaggcccugaacacccuggugaagcagcugagcagcaacuucggcgccaucagcagcgugcugaacgacauccugagccggcuggacccucccgaggccgaggugcagaucgaccggcugaucacuggccggcugcagagccugcagaccuacgugacccagcagcugauccgggccgccgagauucgggccagcgccaaccuggccgccaccaagaugagcgagugcgugcugggccagagcaagcggguggacuucugcggcaagggcuaccaccugaugagcuuuccccagagcgcaccccacggagugguguuccugcacgugaccuacgugcccgcccaggagaagaacuucaccaccgccccagccaucugccacgacggcaaggcccacuuuccccgggagggcguguucgugagcaacggcacccacugguucgugacccagcggaacuucuacgagccccagaucaucaccaccgacaacaccuucgugagcggcaacugcgacguggugaucggcaucgugaacaacaccguguacgauccccugcagcccgagcuggacagcuucaaggaggagcuggacaaguacuucaagaaucacaccagccccgacguggaccugggcgacaucagcggcaucaacgccagcguggugaacauccagaaggagaucgaucggcugaacgagguggccaagaaccugaacgagagccugaucgaccugcaggagcugggcaaguacgagcaguacaucaaguggcccugguacaucuggcugggcuucaucgccggccugaucgccaucgugaucgugaccaucaugcugugcugcaugaccagcugcugcagcugccugaagggcuguugcagcugcggcagcugcugcaaguucgacgaggacgacagcgagcccgugcugaagggcgugaagcugcacuacaccugaugacucgagcugguacugcaugcacgcaaugcuagcugccccuuucccguccuggguaccccgagucucccccgaccucgggucccagguaugcucccaccuccaccugccccacucaccaccucugcuaguuccagacaccucccaagcacgcagcaaugcagcucaaaacgcuuagccuagccacacccccacgggaaacagcagugauuaaccuuuagcaauaaacgaaaguuuaacuaagcuauacuaaccccaggguuggucaauuucgugccagccacacccuggagcuagcaaaaaaaaaaaaaaaaaaaaaaaaaaaaaagcauaugacuaaaaaaaaaaaaaaaaaaaaaaaaaaaaaaaaaaaaaaaaaaaaaaaaaaaaaaaaaaaaaaaaaaaaaa

SEQ ID NO: 26865 - RNA, 4274 nt, Artificial Sequence
  SARS-CoV-2/Wuhan/WIV05/2019__EPI_ISL_402128 spike protein mRNA gc (1-1273)(K986P_V987P_K986P_V987P_H69del_V70del_Y144del_N501Y_A570 D_D614G_P681H_T716I_S982A_D1118H)
agaauaaacuaguauucuucugguccccacagacucagagagaacccgccaccauguucguguuccuggugcugcugccccuggugagcagccagugcgugaaccugaccacccggacccagcugccaccagccuacaccaacagcuucacccggggcgucuacuaccccgacaagguguuccggagcagcguccugcacagcacccaggaccuguuccugcccuucuucagcaacgugaccugguuccacgccaucagcggcaccaacggcaccaagcgguucgacaaccccgugcugcccuucaacgacggcguguacuucgccagcaccgagaagagcaacaucauccggggcuggaucuucggcaccacccuggacagcaagacccagagccugcugaucgugaauaacgccaccaacguggugaucaaggugugcgaguuccaguucugcaacgaccccuuccugggcguguaccacaagaacaacaagagcuggauggagagcgaguuccggguguacagcagcgccaacaacugcaccuucgaguacgugagccagcccuuccugauggaccuggagggcaagcagggcaacuucaagaaccugcgggaguucguguucaagaacaucgacggcuacuucaagaucuacagcaagcacaccccaaucaaccuggugcgggaucugccccagggcuucucagcccuggagccccugguggaccugcccaucggcaucaacaucacccgguuccagacccugcuggcccugcaccggagcuaccugaccccaggcgacagcagcagcggguggacagcaggcgcggcugcuuacuacgugggcuaccugcagccccggaccuuccugcugaaguacaacgagaacggcaccaucaccgacgccguggacugcgcccuggacccucugagcgagaccaagugcacccugaagagcuucaccguggagaagggcaucuaccagaccagcaacuuccgggugcagcccaccgagagcaucgugcgguuccccaacaucaccaaccugugccccuucggcgagguguucaacgccacccgguucgccagcguguacgccuggaaccggaagcggaucagcaacugcguggccgacuacagcgugcuguacaacagcgccagcuucagcaccuucaagugcuacggcgugagccccaccaagcugaacgaccugugcuucaccaacguguacgccgacagcuucgugauccguggcgacgaggugcggcagaucgcacccggccagacaggcaagaucgccgacuacaacuacaagcugcccgacgacuucaccggcugcgugaucgccuggaacagcaacaaccucgacagcaaggugggcggcaacuacaacuaccuguaccggcuguuccggaagagcaaccugaagcccuucgagcgggacaucagcaccgagaucuaccaagccggcuccaccccuugcaacggcguggagggcuucaacugcuacuucccucugcagagcuacggcuuccagcccaccuacggcgugggcuaccagcccuaccgggugguggugcugagcuucgagcugcugcacgccccagccaccguguguggccccaagaagagcaccaaccuggugaagaacaagugcgugaacuucaacuucaacggccuuaccggcaccggcgugcugaccgagagcaacaagaaauuccugcccuuucagcaguucggccgggacaucgacgacaccaccgacgcugugcgggauccccagacccuggagauccuggacaucaccccuugcagcuucggcggcgugagcgugaucaccccaggcaccaacaccagcaaccagguggccgugcuguaccagggcgugaacugcaccgaggugcccguggccauccacgccgaccagcugacacccaccuggcgggucuacagcaccggcagcaacguguuccagacccgggccgguugccugaucggcgccgagcacgugaacaacagcuacgagugcgacauccccaucggcgccggcaucugugccagcuaccagacccagaccaauucacaccggagggcaaggagcguggccagccagagcaucaucgccuacaccaugagccugggcgccgagaacagcguggccuacagcaacaacagcaucgccauccccaucaacuucaccaucagcgugaccaccgagauucugcccgugagcaugaccaagaccagcguggacugcaccauguacaucugcggcgacagcaccgagugcagcaaccugcugcugcaguacggcagcuucugcacccagcugaaccgggcccugaccggcaucgccguggagcaggacaagaacacccaggagguguucgcccaggugaagcagaucuacaagaccccucccaucaaggacuucggcggcuucaacuucagccagauccugcccgaccccagcaagcccagcaagcggagcuucaucgaggaccugcuguucaacaaggugacccuagccgacgccggcuucaucaagcaguacggcgacugccucggcgacauagccgcccgggaccugaucugcgcccagaaguucaacggccugaccgugcugccuccccugcugaccgacgagaugaucgcccaguacaccagcgcccuguuagccggaaccaucaccagcggcuggacuuucggcgcuggagccgcucugcagauccccuucgccaugcagauggccuaccgguucaacggcaucggcgugacccagaacgugcuguacgagaaccagaagcugaucgccaaccaguucaacagcgccaucggcaagauccaggacagccugagcagcaccgcuagcgcccugggcaagcugcaggacguggugaaccagaacgcccaggcccugaacacccuggugaagcagcugagcagcaacuucggcgccaucagcagcgugcugaacgacauccuggcccggcuggacccucccgaggccgaggugcagaucgaccggcugaucacuggccggcugcagagccugcagaccuacgugacccagcagcugauccgggccgccgagauucgggccagcgccaaccuggccgccaccaagaugagcgagugcgugcugggccagagcaagcggguggacuucugcggcaagggcuaccaccugaugagcuuuccccagagcgcaccccacggagugguguuccugcacgugaccuacgugcccgcccaggagaagaacuucaccaccgccccagccaucugccacgacggcaaggcccacuuuccccgggagggcguguucgugagcaacggcacccacugguucgugacccagcggaacuucuacgagccccagaucaucaccacccacaacaccuucgugagcggcaacugcgacguggugaucggcaucgugaacaacaccguguacgauccccugcagcccgagcuggacagcuucaaggaggagcuggacaaguacuucaagaaucacaccagccccgacguggaccugggcgacaucagcggcaucaacgccagcguggugaacauccagaaggagaucgaucggcugaacgagguggccaagaaccugaacgagagccugaucgaccugcaggagcugggcaaguacgagcaguacaucaaguggcccugguacaucuggcugggcuucaucgccggccugaucgccaucgugauggugaccaucaugcugugcugcaugaccagcugcugcagcugccugaagggcuguugcagcugcggcagcugcugcaaguucgacgaggacgacagcgagcccgugcugaagggcgugaagcugcacuacaccugaugacucgagcugguacugcaugcacgcaaugcuagcugccccuuucccguccuggguaccccgagucucccccgaccucgggucccagguaugcucccaccuccaccugccccacucaccaccucugcuaguuccagacaccucccaagcacgcagcaaugcagcucaaaacgcuuagccuagccacacccccacgggaaacagcagugauuaaccuuuagcaauaaacgaaaguuuaacuaagcuauacuaaccccaggguuggucaauuucgugccagccacacccuggagcuagcaaaaaaaaaaaaaaaaaaaaaaaaaaaaaagcauaugacuaaaaaaaaaaaaaaaaaaaaaaaaaaaaaaaaaaaaaaaaaaaaaaaaaaaaaaaaaaaaaaaaaaaaaa

SEQ ID NO: 26866 - RNA, 4283 nt, Artificial Sequence
  SARS-CoV-2/Wuhan/WIV05/2019__EPI_ISL_402128 spike protein mRNA gc (1-1273)(K986P_V987P_K986P_V987P_K417N_E484K_N501Y_D614G)
agaauaaacuaguauucuucugguccccacagacucagagagaacccgccaccauguucguguuccuggugcugcugccccuggugagcagccagugcgugaaccugaccacccggacccagcugccaccagccuacaccaacagcuucacccggggcgucuacuaccccgacaagguguuccggagcagcguccugcacagcacccaggaccuguuccugcccuucuucagcaacgugaccugguuccacgccauccacgugagcggcaccaacggcaccaagcgguucgacaaccccgugcugcccuucaacgacggcguguacuucgccagcaccgagaagagcaacaucauccggggcuggaucuucggcaccacccuggacagcaagacccagagccugcugaucgugaauaacgccaccaacguggugaucaaggugugcgaguuccaguucugcaacgaccccuuccugggcguguacuaccacaagaacaacaagagcuggauggagagcgaguuccggguguacagcagcgccaacaacugcaccuucgaguacgugagccagcccuuccugauggaccuggagggcaagcagggcaacuucaagaaccugcgggaguucguguucaagaacaucgacggcuacuucaagaucuacagcaagcacaccccaaucaaccuggugcgggaucugccccagggcuucucagcccuggagccccugguggaccugcccaucggcaucaacaucacccgguuccagacccugcuggcccugcaccggagcuaccugaccccaggcgacagcagcagcggguggacagcaggcgcggcugcuuacuacgugggcuaccugcagccccggaccuuccugcugaaguacaacgagaacggcaccaucaccgacgccguggacugcgcccuggacccucugagcgagaccaagugcacccugaagagcuucaccguggagaagggcaucuaccagaccagcaacuuccgggugcagcccaccgagagcaucgugcgguuccccaacaucaccaaccugugccccuucggcgagguguucaacgccacccgguucgccagcguguacgccuggaaccggaagcggaucagcaacugcguggccgacuacagcgugcuguacaacagcgccagcuucagcaccuucaagugcuacggcgugagccccaccaagcugaacgaccugugcuucaccaacguguacgccgacagcuucgugauccguggcgacgaggugcggcagaucgcacccggccagacaggcaacaucgccgacuacaacuacaagcugcccgacgacuucaccggcugcgugaucgccuggaacagcaacaaccucgacagcaaggugggcggcaacuacaacuaccuguaccggcuguuccggaagagcaaccugaagcccuucgagcgggacaucagcaccgagaucuaccaagccggcuccaccccuugcaacggcgugaagggcuucaacugcuacuucccucugcagagcuacggcuuccagcccaccuacggcgugggcuaccagcccuaccgggugguggugcugagcuucgagcugcugcacgccccagccaccguguguggccccaagaagagcaccaaccuggugaagaacaagugcgugaacuucaacuucaacggccuuaccggcaccggcgugcugaccgagagcaacaagaaauuccugcccuuucagcaguucggccgggacaucgccgacaccaccgacgcugugcgggauccccagacccuggagauccuggacaucaccccuugcagcuucggcggcgugagcgugaucaccccaggcaccaacaccagcaaccagguggccgugcuguaccagggcgugaacugcaccgaggugcccguggccauccacgccgaccagcugacacccaccuggcgggucuacagcaccggcagcaacguguuccagacccgggccgguugccugaucggcgccgagcacgugaacaacagcuacgagugcgacauccccaucggcgccggcaucugugccagcuaccagacccagaccaauucaccccggagggcaaggagcguggccagccagagcaucaucgccuacaccaugagccugggcgccgagaacagcguggccuacagcaacaacagcaucgccauccccaccaacuucaccaucagcgugaccaccgagauucugcccgugagcaugaccaagaccagcguggacugcaccauguacaucugcggcgacagcaccgagugcagcaaccugcugcugcaguacggcagcuucugcacccagcugaaccgggcccugaccggcaucgccguggagcaggacaagaacacccaggagguguucgcccaggugaagcagaucuacaagaccccucccaucaaggacuucggcggcuucaacuucagccagauccugcccgaccccagcaagcccagcaagcggagcuucaucgaggaccugcuguucaacaaggugacccuagccgacgccggcuucaucaagcaguacggcgacugccucggcgacauagccgcccgggaccugaucugcgcccagaaguucaacggccugaccgugcugccuccccugcugaccgacgagaugaucgcccaguacaccagcgcccuguuagccggaaccaucaccagcggcuggacuuucggcgcuggagccgcucugcagauccccuucgccaugcagauggccuaccgguucaacggcaucggcgugacccagaacgugcuguacgagaaccagaagcugaucgccaaccaguucaacagcgccaucggcaagauccaggacagccugagcagcaccgcuagcgcccugggcaagcugcaggacguggugaaccagaacgcccaggcccugaacacccuggugaagcagcugagcagcaacuucggcgccaucagcagcgugcugaacgacauccugagccggcuggacccucccgaggccgaggugcagaucgaccggcugaucacuggccggcugcagagccugcagaccuacgugacccagcagcugauccgggccgccgagauucgggccagcgccaaccuggccgccaccaagaugagcgagugcgugcugggccagagcaagcggguggacuucugcggcaagggcuaccaccugaugagcuuuccccagagcgcaccccacggagugguguuccugcacgugaccuacgugcccgcccaggagaagaacuucaccaccgccccagccaucugccacgacggcaaggcccacuuuccccgggagggcguguucgugagcaacggcacccacugguucgugacccagcggaacuucuacgagccccagaucaucaccaccgacaacaccuucgugagcggcaacugcgacguggugaucggcaucgugaacaacaccguguacgauccccugcagcccgagcuggacagcuucaaggaggagcuggacaaguacuucaagaaucacaccagccccgacguggaccugggcgacaucagcggcaucaacgccagcguggugaacauccagaaggagaucgaucggcugaacgagguggccaagaaccugaacgagagccugaucgaccugcaggagcugggcaaguacgagcaguacaucaaguggcccugguacaucuggcugggcuucaucgccggccugaucgccaucgugauggugaccaucaugcugugcugcaugaccagcugcugcagcugccugaagggcuguugcagcugcggcagcugcugcaaguucgacgaggacgacagcgagcccgugcugaagggcgugaagcugcacuacaccugaugacucgagcugguacugcaugcacgcaaugcuagcugccccuuucccguccuggguaccccgagucucccccgaccucgggucccagguaugcucccaccuccaccugccccacucaccaccucugcuaguuccagacaccucccaagcacgcagcaaugcagcucaaaacgcuuagccuagccacacccccacgggaaacagcagugauuaaccuuuagcaauaaacgaaaguuuaacuaagcuauacuaaccccaggguuggucaauuucgugccagccacacccuggagcuagcaaaaaaaaaaaaaaaaaaaaaaaaaaaaaagcauaugacuaaaaaaaaaaaaaaaaaaaaaaaaaaaaaaaaaaaaaaaaaaaaaaaaaaaaaaaaaaaaaaaaaaaaaa

SEQ ID NO: 26867 - RNA, 4274 nt, Artificial Sequence
  SARS-CoV-2/Wuhan/WIV05/2019__EPI_ISL_402128 spike protein mRNA gc (1-1273)(K986P_V987P_K986P_V987P_L18F_D80A_D215G_L242del_A243del_ L244del_R246I_K417N_E484K_N501Y_D614G_A701V)
agaauaaacuaguauucuucugguccccacagacucagagagaacccgccaccauguucguguuccuggugcugcugccccuggugagcagccagugcgugaacuucaccacccggacccagcugccaccagccuacaccaacagcuucacccggggcgucuacuaccccgacaagguguuccggagcagcguccugcacagcacccaggaccuguuccugcccuucuucagcaacgugaccugguuccacgccauccacgugagcggcaccaacggcaccaagcgguucgccaaccccgugcugcccuucaacgacggcguguacuucgccagcaccgagaagagcaacaucauccggggcuggaucuucggcaccacccuggacagcaagacccagagccugcugaucgugaauaacgccaccaacguggugaucaaggugugcgaguuccaguucugcaacgaccccuuccugggcguguacuaccacaagaacaacaagagcuggauggagagcgaguuccggguguacagcagcgccaacaacugcaccuucgaguacgugagccagcccuuccugauggaccuggagggcaagcagggcaacuucaagaaccugcgggaguucguguucaagaacaucgacggcuacuucaagaucuacagcaagcacaccccaaucaaccuggugcggggccugccccagggcuucucagcccuggagccccugguggaccugcccaucggcaucaacaucacccgguuccagacccugcacaucagcuaccugaccccaggcgacagcagcagcggguggacagcaggcgcggcugcuuacuacgugggcuaccugcagccccggaccuuccugcugaaguacaacgagaacggcaccaucaccgacgccguggacugcgcccuggacccucugagcgagaccaagugcacccugaagagcuucaccguggagaagggcaucuaccagaccagcaacuuccgggugcagcccaccgagagcaucgugcgguuccccaacaucaccaaccugugccccuucggcgagguguucaacgccacccgguucgccagcguguacgccuggaaccggaagcggaucagcaacugcguggccgacuacagcgugcuguacaacagcgccagcuucagcaccuucaagugcuacggcgugagccccaccaagcugaacgaccugugcuucaccaacguguacgccgacagcuucgugauccguggcgacgaggugcggcagaucgcacccggccagacaggcaacaucgccgacuacaacuacaagcugcccgacgacuucaccggcugcgugaucgccuggaacagcaacaaccucgacagcaaggugggcggcaacuacaacuaccuguaccggcuguuccggaagagcaaccugaagcccuucgagcgggacaucagcaccgagaucuaccaagccggcuccaccccuugcaacggcgugaagggcuucaacugcuacuucccucugcagagcuacggcuuccagcccaccuacggcgugggcuaccagcccuaccgggugguggugcugagcuucgagcugcugcacgccccagccaccguguguggccccaagaagagcaccaaccuggugaagaacaagugcgugaacuucaacuucaacggccuuaccggcaccggcgugcugaccgagagcaacaagaaauuccugcccuuucagcaguucggccgggacaucgccgacaccaccgacgcugugcgggauccccagacccuggagauccuggacaucaccccuugcagcuucggcggcgugagcgugaucaccccaggcaccaacaccagcaaccagguggccgugcuguaccagggcgugaacugcaccgaggugcccguggccauccacgccgaccagcugacacccaccuggcgggucuacagcaccggcagcaacguguuccagacccgggccgguugccugaucggcgccgagcacgugaacaacagcuacgagugcgacauccccaucggcgccggcaucugugccagcuaccagacccagaccaauucaccccggagggcaaggagcguggccagccagagcaucaucgccuacaccaugagccugggcguggagaacagcguggccuacagcaacaacagcaucgccauccccaccaacuucaccaucagcgugaccaccgagauucugcccgugagcaugaccaagaccagcguggacugcaccauguacaucugcggcgacagcaccgagugcagcaaccugcugcugcaguacggcagcuucugcacccagcugaaccgggcccugaccggcaucgccguggagcaggacaagaacacccaggagguguucgcccaggugaagcagaucuacaagaccccucccaucaaggacuucggcggcuucaacuucagccagauccugcccgaccccagcaagcccagcaagcggagcuucaucgaggaccugcuguucaacaaggugacccuagccgacgccggcuucaucaagcaguacggcgacugccucggcgacauagccgcccgggaccugaucugcgcccagaaguucaacggccugaccgugcugccuccccugcugaccgacgagaugaucgcccaguacaccagcgcccuguuagccggaaccaucaccagcggcuggacuuucggcgcuggagccgcucugcagauccccuucgccaugcagauggccuaccgguucaacggcaucggcgugacccagaacgugcuguacgagaaccagaagcugaucgccaaccaguucaacagcgccaucggcaagauccaggacagccugagcagcaccgcuagcgcccugggcaagcugcaggacguggugaaccagaacgcccaggcccugaacacccuggugaagcagcugagcagcaacuucggcgccaucagcagcgugcugaacgacauccugagccggcuggacccucccgaggccgaggugcagaucgaccggcugaucacuggccggcugcagagccugcagaccuacgugacccagcagcugauccgggccgccgagauucgggccagcgccaaccuggccgccaccaagaugagcgagugcgugcugggccagagcaagcggguggacuucugcggcaagggcuaccaccugaugagcuuuccccagagcgcaccccacggagugguguuccugcacgugaccuacgugcccgcccaggagaagaacuucaccaccgccccagccaucugccacgacggcaaggcccacuuuccccgggagggcguguucgugagcaacggcacccacugguucgugacccagcggaacuucuacgagccccagaucaucaccaccgacaacaccuucgugagcggcaacugcgacguggugaucggcaucgugaacaacaccguguacgauccccugcagcccgagcuggacagcuucaaggaggagcuggacaaguacuucaagaaucacaccagccccgacguggaccugggcgacaucagcggcaucaacgccagcguggugaacauccagaaggagaucgaucggcugaacgagguggccaagaaccugaacgagagccugaucgaccugcaggagcugggcaaguacgagcaguacaucaaguggcccugguacaucuggcugggcuucaucgccggccugaucgccaucgugauggugaccaucaugcugugcugcaugaccagcugcugcagcugccugaagggcuguugcagcugcggcagcugcugcaaguucgacgaggacgacagcgagcccgugcugaagggcgugaagcugcacuacaccugaugacucgagcugguacugcaugcacgcaaugcuagcugccccuuucccguccuggguaccccgagucucccccgaccucgggucccagguaugcucccaccuccaccugccccacucaccaccucugcuaguuccagacaccucccaagcacgcagcaaugcagcucaaaacgcuuagccuagccacacccccacgggaaacagcagugauuaaccuuuagcaauaaacgaaaguuuaacuaagcuauacuaaccccaggguuggucaauuucgugccagccacacccuggagcuagcaaaaaaaaaaaaaaaaaaaaaaaaaaaaaagcauaugacuaaaaaaaaaaaaaaaaaaaaaaaaaaaaaaaaaaaaaaaaaaaaaaaaaaaaaaaaaaaaaaaaaaaaaa

SEQ ID NO: 26868 - RNA, 4283 nt, Artificial Sequence
  SARS-CoV-2/Wuhan/WIV05/2019__EPI_ISL_402128 spike protein mRNA gc (1-1273)(K986P_V987P_K986P_V987P_E484K_D614G)
agaauaaacuaguauucuucugguccccacagacucagagagaacccgccaccauguucguguuccuggugcugcugccccuggugagcagccagugcgugaaccugaccacccggacccagcugccaccagccuacaccaacagcuucacccggggcgucuacuaccccgacaagguguuccggagcagcguccugcacagcacccaggaccuguuccugcccuucuucagcaacgugaccugguuccacgccauccacgugagcggcaccaacggcaccaagcgguucgacaaccccgugcugcccuucaacgacggcguguacuucgccagcaccgagaagagcaacaucauccggggcuggaucuucggcaccacccuggacagcaagacccagagccugcugaucgugaauaacgccaccaacguggugaucaaggugugcgaguuccaguucugcaacgaccccuuccugggcguguacuaccacaagaacaacaagagcuggauggagagcgaguuccggguguacagcagcgccaacaacugcaccuucgaguacgugagccagcccuuccugauggaccuggagggcaagcagggcaacuucaagaaccugcgggaguucguguucaagaacaucgacggcuacuucaagaucuacagcaagcacaccccaaucaaccuggugcgggaucugccccagggcuucucagcccuggagccccugguggaccugcccaucggcaucaacaucacccgguuccagacccugcuggcccugcaccggagcuaccugaccccaggcgacagcagcagcggguggacagcaggcgcggcugcuuacuacgugggcuaccugcagccccggaccuuccugcugaaguacaacgagaacggcaccaucaccgacgccguggacugcgcccuggacccucugagcgagaccaagugcacccugaagagcuucaccguggagaagggcaucuaccagaccagcaacuuccgggugcagcccaccgagagcaucgugcgguuccccaacaucaccaaccugugccccuucggcgagguguucaacgccacccgguucgccagcguguacgccuggaaccggaagcggaucagcaacugcguggccgacuacagcgugcuguacaacagcgccagcuucagcaccuucaagugcuacggcgugagccccaccaagcugaacgaccugugcuucaccaacguguacgccgacagcuucgugauccguggcgacgaggugcggcagaucgcacccggccagacaggcaagaucgccgacuacaacuacaagcugcccgacgacuucaccggcugcgugaucgccuggaacagcaacaaccucgacagcaaggugggcggcaacuacaacuaccuguaccggcuguuccggaagagcaaccugaagcccuucgagcgggacaucagcaccgagaucuaccaagccggcuccaccccuugcaacggcgugaagggcuucaacugcuacuucccucugcagagcuacggcuuccagcccaccaacggcgugggcuaccagcccuaccgggugguggugcugagcuucgagcugcugcacgccccagccaccguguguggccccaagaagagcaccaaccuggugaagaacaagugcgugaacuucaacuucaacggccuuaccggcaccggcgugcugaccgagagcaacaagaaauuccugcccuuucagcaguucggccgggacaucgccgacaccaccgacgcugugcgggauccccagacccuggagauccuggacaucaccccuugcagcuucggcggcgugagcgugaucaccccaggcaccaacaccagcaaccagguggccgugcuguaccagggcgugaacugcaccgaggugcccguggccauccacgccgaccagcugacacccaccuggcgggucuacagcaccggcagcaacguguuccagacccgggccgguugccugaucggcgccgagcacgugaacaacagcuacgagugcgacauccccaucggcgccggcaucugugccagcuaccagacccagaccaauucaccccggagggcaaggagcguggccagccagagcaucaucgccuacaccaugagccugggcgccgagaacagcguggccuacagcaacaacagcaucgccauccccaccaacuucaccaucagcgugaccaccgagauucugcccgugagcaugaccaagaccagcguggacugcaccauguacaucugcggcgacagcaccgagugcagcaaccugcugcugcaguacggcagcuucugcacccagcugaaccgggcccugaccggcaucgccguggagcaggacaagaacacccaggagguguucgcccaggugaagcagaucuacaagaccccucccaucaaggacuucggcggcuucaacuucagccagauccugcccgaccccagcaagcccagcaagcggagcuucaucgaggaccugcuguucaacaaggugacccuagccgacgccggcuucaucaagcaguacggcgacugccucggcgacauagccgcccgggaccugaucugcgcccagaaguucaacggccugaccgugcugccuccccugcugaccgacgagaugaucgcccaguacaccagcgcccuguuagccggaaccaucaccagcggcuggacuuucggcgcuggagccgcucugcagauccccuucgccaugcagauggccuaccgguucaacggcaucggcgugacccagaacgugcuguacgagaaccagaagcugaucgccaaccaguucaacagcgccaucggcaagauccaggacagccugagcagcaccgcuagcgcccugggcaagcugcaggacguggugaaccagaacgcccaggcccugaacacccuggugaagcagcugagcagcaacuucggcgccaucagcagcgugcugaacgacauccugagccggcuggacccucccgaggccgaggugcagaucgaccggcugaucacuggccggcugcagagccugcagaccuacgugacccagcagcugauccgggccgccgagauucgggccagcgccaaccuggccgccaccaagaugagcgagugcgugcugggccagagcaagcggguggacuucugcggcaagggcuaccaccugaugagcuuuccccagagcgcaccccacggagugguguuccugcacgugaccuacgugcccgcccaggagaagaacuucaccaccgccccagccaucugccacgacggcaaggcccacuuuccccgggagggcguguucgugagcaacggcacccacugguucgugacccagcggaacuucuacgagccccagaucaucaccaccgacaacaccuucgugagcggcaacugcgacguggugaucggcaucgugaacaacaccguguacgauccccugcagcccgagcuggacagcuucaaggaggagcuggacaaguacuucaagaaucacaccagccccgacguggaccugggcgacaucagcggcaucaacgccagcguggugaacauccagaaggagaucgaucggcugaacgagguggccaagaaccugaacgagagccugaucgaccugcaggagcugggcaaguacgagcaguacaucaaguggcccugguacaucuggcugggcuucaucgccggccugaucgccaucgugauggugaccaucaugcugugcugcaugaccagcugcugcagcugccugaagggcuguugcagcugcggcagcugcugcaaguucgacgaggacgacagcgagcccgugcugaagggcgugaagcugcacuacaccugaugacucgagcugguacugcaugcacgcaaugcuagcugccccuuucccguccuggguaccccgagucucccccgaccucgggucccagguaugcucccaccuccaccugccccacucaccaccucugcuaguuccagacaccucccaagcacgcagcaaugcagcucaaaacgcuuagccuagccacacccccacgggaaacagcagugauuaaccuuuagcaauaaacgaaaguuuaacuaagcuauacuaaccccaggguuggucaauuucgugccagccacacccuggagcuagcaaaaaaaaaaaaaaaaaaaaaaaaaaaaaagcauaugacuaaaaaaaaaaaaaaaaaaaaaaaaaaaaaaaaaaaaaaaaaaaaaaaaaaaaaaaaaaaaaaaaaaaaaa

SEQ ID NO: 26869 - RNA, 4283 nt, Artificial Sequence
  SARS-CoV-2/Wuhan/WIV05/2019__EPI_ISL_402128 spike protein mRNA gc (1-1273)(K986P_V987P_K986P_V987P_L18F_T20N_P26S_D138Y_R190S_K417T _E484K_N501Y_D614G_H655Y_T1027I)
agaauaaacuaguauucuucugguccccacagacucagagagaacccgccaccauguucguguuccuggugcugcugccccuggugagcagccagugcgugaacuucaccaaccggacccagcugccaagcgccuacaccaacagcuucacccggggcgucuacuaccccgacaagguguuccggagcagcguccugcacagcacccaggaccuguuccugcccuucuucagcaacgugaccugguuccacgccauccacgugagcggcaccaacggcaccaagcgguucgacaaccccgugcugcccuucaacgacggcguguacuucgccagcaccgagaagagcaacaucauccggggcuggaucuucggcaccacccuggacagcaagacccagagccugcugaucgugaauaacgccaccaacguggugaucaaggugugcgaguuccaguucugcaacuaccccuuccugggcguguacuaccacaagaacaacaagagcuggauggagagcgaguuccggguguacagcagcgccaacaacugcaccuucgaguacgugagccagcccuuccugauggaccuggagggcaagcagggcaacuucaagaaccugagcgaguucguguucaagaacaucgacggcuacuucaagaucuacagcaagcacaccccaaucaaccuggugcgggaucugccccagggcuucucagcccuggagccccugguggaccugcccaucggcaucaacaucacccgguuccagacccugcuggcccugcaccggagcuaccugaccccaggcgacagcagcagcggguggacagcaggcgcggcugcuuacuacgugggcuaccugcagccccggaccuuccugcugaaguacaacgagaacggcaccaucaccgacgccguggacugcgcccuggacccucugagcgagaccaagugcacccugaagagcuucaccguggagaagggcaucuaccagaccagcaacuuccgggugcagcccaccgagagcaucgugcgguuccccaacaucaccaaccugugccccuucggcgagguguucaacgccacccgguucgccagcguguacgccuggaaccggaagcggaucagcaacugcguggccgacuacagcgugcuguacaacagcgccagcuucagcaccuucaagugcuacggcgugagccccaccaagcugaacgaccugugcuucaccaacguguacgccgacagcuucgugauccguggcgacgaggugcggcagaucgcacccggccagacaggcaccaucgccgacuacaacuacaagcugcccgacgacuucaccggcugcgugaucgccuggaacagcaacaaccucgacagcaaggugggcggcaacuacaacuaccuguaccggcuguuccggaagagcaaccugaagcccuucgagcgggacaucagcaccgagaucuaccaagccggcuccaccccuugcaacggcgugaagggcuucaacugcuacuucccucugcagagcuacggcuuccagcccaccuacggcgugggcuaccagcccuaccgggugguggugcugagcuucgagcugcugcacgccccagccaccguguguggccccaagaagagcaccaaccuggugaagaacaagugcgugaacuucaacuucaacggccuuaccggcaccggcgugcugaccgagagcaacaagaaauuccugcccuuucagcaguucggccgggacaucgccgacaccaccgacgcugugcgggauccccagacccuggagauccuggacaucaccccuugcagcuucggcggcgugagcgugaucaccccaggcaccaacaccagcaaccagguggccgugcuguaccagggcgugaacugcaccgaggugcccguggccauccacgccgaccagcugacacccaccuggcgggucuacagcaccggcagcaacguguuccagacccgggccgguugccugaucggcgccgaguacgugaacaacagcuacgagugcgacauccccaucggcgccggcaucugugccagcuaccagacccagaccaauucaccccggagggcaaggagcguggccagccagagcaucaucgccuacaccaugagccugggcgccgagaacagcguggccuacagcaacaacagcaucgccauccccaccaacuucaccaucagcgugaccaccgagauucugcccgugagcaugaccaagaccagcguggacugcaccauguacaucugcggcgacagcaccgagugcagcaaccugcugcugcaguacggcagcuucugcacccagcugaaccgggcccugaccggcaucgccguggagcaggacaagaacacccaggagguguucgcccaggugaagcagaucuacaagaccccucccaucaaggacuucggcggcuucaacuucagccagauccugcccgaccccagcaagcccagcaagcggagcuucaucgaggaccugcuguucaacaaggugacccuagccgacgccggcuucaucaagcaguacggcgacugccucggcgacauagccgcccgggaccugaucugcgcccagaaguucaacggccugaccgugcugccuccccugcugaccgacgagaugaucgcccaguacaccagcgcccuguuagccggaaccaucaccagcggcuggacuuucggcgcuggagccgcucugcagauccccuucgccaugcagauggccuaccgguucaacggcaucggcgugacccagaacgugcuguacgagaaccagaagcugaucgccaaccaguucaacagcgccaucggcaagauccaggacagccugagcagcaccgcuagcgcccugggcaagcugcaggacguggugaaccagaacgcccaggcccugaacacccuggugaagcagcugagcagcaacuucggcgccaucagcagcgugcugaacgacauccugagccggcuggacccucccgaggccgaggugcagaucgaccggcugaucacuggccggcugcagagccugcagaccuacgugacccagcagcugauccgggccgccgagauucgggccagcgccaaccuggccgccaucaagaugagcgagugcgugcugggccagagcaagcggguggacuucugcggcaagggcuaccaccugaugagcuuuccccagagcgcaccccacggagugguguuccugcacgugaccuacgugcccgcccaggagaagaacuucaccaccgccccagccaucugccacgacggcaaggcccacuuuccccgggagggcguguucgugagcaacggcacccacugguucgugacccagcggaacuucuacgagccccagaucaucaccaccgacaacaccuucgugagcggcaacugcgacguggugaucggcaucgugaacaacaccguguacgauccccugcagcccgagcuggacagcuucaaggaggagcuggacaaguacuucaagaaucacaccagccccgacguggaccugggcgacaucagcggcaucaacgccagcguggugaacauccagaaggagaucgaucggcugaacgagguggccaagaaccugaacgagagccugaucgaccugcaggagcugggcaaguacgagcaguacaucaaguggcccugguacaucuggcugggcuucaucgccggccugaucgccaucgugauggugaccaucaugcugugcugcaugaccagcugcugcagcugccugaagggcuguugcagcugcggcagcugcugcaaguucgacgaggacgacagcgagcccgugcugaagggcgugaagcugcacuacaccugaugacucgagcugguacugcaugcacgcaaugcuagcugccccuuucccguccuggguaccccgagucucccccgaccucgggucccagguaugcucccaccuccaccugccccacucaccaccucugcuaguuccagacaccucccaagcacgcagcaaugcagcucaaaacgcuuagccuagccacacccccacgggaaacagcagugauuaaccuuuagcaauaaacgaaaguuuaacuaagcuauacuaaccccaggguuggucaauuucgugccagccacacccuggagcuagcaaaaaaaaaaaaaaaaaaaaaaaaaaaaaagcauaugacuaaaaaaaaaaaaaaaaaaaaaaaaaaaaaaaaaaaaaaaaaaaaaaaaaaaaaaaaaaaaaaaaaaaaaa

SEQ ID NO: 26870 - RNA, 4283 nt, Artificial Sequence
  SARS-CoV-2/Wuhan/WIV05/2019__EPI_ISL_402128 spike protein mRNA gc (1-1273)(K986P_V987P_K986P_V987P_S13I_W152C_L452R_D614G)
agaauaaacuaguauucuucugguccccacagacucagagagaacccgccaccauguucguguuccuggugcugcugccccuggugagcauccagugcgugaaccugaccacccggacccagcugccaccagccuacaccaacagcuucacccggggcgucuacuaccccgacaagguguuccggagcagcguccugcacagcacccaggaccuguuccugcccuucuucagcaacgugaccugguuccacgccauccacgugagcggcaccaacggcaccaagcgguucgacaaccccgugcugcccuucaacgacggcguguacuucgccagcaccgagaagagcaacaucauccggggcuggaucuucggcaccacccuggacagcaagacccagagccugcugaucgugaauaacgccaccaacguggugaucaaggugugcgaguuccaguucugcaacgaccccuuccugggcguguacuaccacaagaacaacaagagcugcauggagagcgaguuccggguguacagcagcgccaacaacugcaccuucgaguacgugagccagcccuuccugauggaccuggagggcaagcagggcaacuucaagaaccugcgggaguucguguucaagaacaucgacggcuacuucaagaucuacagcaagcacaccccaaucaaccuggugcgggaucugccccagggcuucucagcccuggagccccugguggaccugcccaucggcaucaacaucacccgguuccagacccugcuggcccugcaccggagcuaccugaccccaggcgacagcagcagcggguggacagcaggcgcggcugcuuacuacgugggcuaccugcagccccggaccuuccugcugaaguacaacgagaacggcaccaucaccgacgccguggacugcgcccuggacccucugagcgagaccaagugcacccugaagagcuucaccguggagaagggcaucuaccagaccagcaacuuccgggugcagcccaccgagagcaucgugcgguuccccaacaucaccaaccugugccccuucggcgagguguucaacgccacccgguucgccagcguguacgccuggaaccggaagcggaucagcaacugcguggccgacuacagcgugcuguacaacagcgccagcuucagcaccuucaagugcuacggcgugagccccaccaagcugaacgaccugugcuucaccaacguguacgccgacagcuucgugauccguggcgacgaggugcggcagaucgcacccggccagacaggcaagaucgccgacuacaacuacaagcugcccgacgacuucaccggcugcgugaucgccuggaacagcaacaaccucgacagcaaggugggcggcaacuacaacuaccgcuaccggcuguuccggaagagcaaccugaagcccuucgagcgggacaucagcaccgagaucuaccaagccggcuccaccccuugcaacggcguggagggcuucaacugcuacuucccucugcagagcuacggcuuccagcccaccaacggcgugggcuaccagcccuaccgggugguggugcugagcuucgagcugcugcacgccccagccaccguguguggccccaagaagagcaccaaccuggugaagaacaagugcgugaacuucaacuucaacggccuuaccggcaccggcgugcugaccgagagcaacaagaaauuccugcccuuucagcaguucggccgggacaucgccgacaccaccgacgcugugcgggauccccagacccuggagauccuggacaucaccccuugcagcuucggcggcgugagcgugaucaccccaggcaccaacaccagcaaccagguggccgugcuguaccagggcgugaacugcaccgaggugcccguggccauccacgccgaccagcugacacccaccuggcgggucuacagcaccggcagcaacguguuccagacccgggccgguugccugaucggcgccgagcacgugaacaacagcuacgagugcgacauccccaucggcgccggcaucugugccagcuaccagacccagaccaauucaccccggagggcaaggagcguggccagccagagcaucaucgccuacaccaugagccugggcgccgagaacagcguggccuacagcaacaacagcaucgccauccccaccaacuucaccaucagcgugaccaccgagauucugcccgugagcaugaccaagaccagcguggacugcaccauguacaucugcggcgacagcaccgagugcagcaaccugcugcugcaguacggcagcuucugcacccagcugaaccgggcccugaccggcaucgccguggagcaggacaagaacacccaggagguguucgcccaggugaagcagaucuacaagaccccucccaucaaggacuucggcggcuucaacuucagccagauccugcccgaccccagcaagcccagcaagcggagcuucaucgaggaccugcuguucaacaaggugacccuagccgacgccggcuucaucaagcaguacggcgacugccucggcgacauagccgcccgggaccugaucugcgcccagaaguucaacggccugaccgugcugccuccccugcugaccgacgagaugaucgcccaguacaccagcgcccuguuagccggaaccaucaccagcggcuggacuuucggcgcuggagccgcucugcagauccccuucgccaugcagauggccuaccgguucaacggcaucggcgugacccagaacgugcuguacgagaaccagaagcugaucgccaaccaguucaacagcgccaucggcaagauccaggacagccugagcagcaccgcuagcgcccugggcaagcugcaggacguggugaaccagaacgcccaggcccugaacacccuggugaagcagcugagcagcaacuucggcgccaucagcagcgugcugaacgacauccugagccggcuggacccucccgaggccgaggugcagaucgaccggcugaucacuggccggcugcagagccugcagaccuacgugacccagcagcugauccgggccgccgagauucgggccagcgccaaccuggccgccaccaagaugagcgagugcgugcugggccagagcaagcggguggacuucugcggcaagggcuaccaccugaugagcuuuccccagagcgcaccccacggagugguguuccugcacgugaccuacgugcccgcccaggagaagaacuucaccaccgccccagccaucugccacgacggcaaggcccacuuuccccgggagggcguguucgugagcaacggcacccacugguucgugacccagcggaacuucuacgagccccagaucaucaccaccgacaacaccuucgugagcggcaacugcgacguggugaucggcaucgugaacaacaccguguacgauccccugcagcccgagcuggacagcuucaaggaggagcuggacaaguacuucaagaaucacaccagccccgacguggaccugggcgacaucagcggcaucaacgccagcguggugaacauccagaaggagaucgaucggcugaacgagguggccaagaaccugaacgagagccugaucgaccugcaggagcugggcaaguacgagcaguacaucaaguggcccugguacaucuggcugggcuucaucgccggccugaucgccaucgugauggugaccaucaugcugugcugcaugaccagcugcugcagcugccugaagggcuguugcagcugcggcagcugcugcaaguucgacgaggacgacagcgagcccgugcugaagggcgugaagcugcacuacaccugaugacucgagcugguacugcaugcacgcaaugcuagcugccccuuucccguccuggguaccccgagucucccccgaccucgggucccagguaugcucccaccuccaccugccccacucaccaccucugcuaguuccagacaccucccaagcacgcagcaaugcagcucaaaacgcuuagccuagccacacccccacgggaaacagcagugauuaaccuuuagcaauaaacgaaaguuuaacuaagcuauacuaaccccaggguuggucaauuucgugccagccacacccuggagcuagcaaaaaaaaaaaaaaaaaaaaaaaaaaaaaagcauaugacuaaaaaaaaaaaaaaaaaaaaaaaaaaaaaaaaaaaaaaaaaaaaaaaaaaaaaaaaaaaaaaaaaaaaaa

SEQ ID NO: 26871 - RNA, 4283 nt, Artificial Sequence
  SARS-CoV-2/Wuhan/WIV05/2019__EPI_ISL_402128 spike protein mRNA gc (1-1273)(K986P_V987P)
agaauaaacuaguauucuucugguccccacagacucagagagaacccgccaccauguucguguuccuggugcugcugccccuggugagcagccagugcgugaaccugaccacccggacccagcugcccccugccuacaccaacagcuucacccggggcguguacuaccccgacaagguguuccggagcagcgugcugcacagcacccaggaccuguuccugcccuucuucagcaacgugaccugguuccacgccauccacgugagcggcaccaacggcaccaagcgguucgacaacccagugcugcccuucaacgacggcguguacuucgccagcaccgagaagucaaacaucauccggggcuggaucuucggcaccacccuggacagcaagacacagagccugcugaucgugaacaacgccaccaacguggugaucaaggugugcgaguuucaguucugcaacgaccccuuccugggcguguacuaccacaagaacaacaagagcuggauggagagcgaguuccgggucuacagcagcgcuaacaauugcaccuucgaguacgugagccagcccuuccugauggaccucgagggcaagcagggcaacuucaagaaccugcgggaguucguguucaagaacaucgauggcuacuucaagaucuacagcaagcacacccccaucaaccuggugcgggaccugccccagggauucagcgcccuggagccucugguggaccugcccaucggcaucaacaucaccagguuccagacccugcuggcccugcaccggagcuaccugacccccggcgacagcagcagcggcuggaccgccggcgccgccgcauacuacgugggcuaccugcagccacggaccuuccugcugaaguacaacgagaacggcaccaucaccgacgccguggacugcgcccuggacccccugagcgagaccaagugcacccuaaagagcuucaccguggagaagggcaucuaccagaccagcaacuuccgggugcagcccacugagagcaucgugcgguuccccaacauuaccaaccugugucccuucggcgagguguucaacgccacccgguucgccagcguguacgccuggaaccggaagcggaucagcaacugcguggccgacuacagcgugcuguacaacagcgccagcuucagcaccuucaagugcuacggcgugagcccuaccaagcugaacgaccugugcuucaccaacguguacgcugacagcuucgugauccggggcgacgaggugcggcagaucgcccccggccagaccggcaagaucgccgacuacaacuacaagcugcccgacgacuucaccggcugcgugaucgccuggaacagcaacaaccuggacagcaaggugggcggcaacuacaacuaccuguaccggcuguuccguaagagcaaccugaagccauucgagcgggacaucagcaccgagaucuaccaggccggcagcacccccugcaacgguguggagggcuuuaacugcuacuucccccugcagagcuacggcuuccagcccaccaacggcgugggcuaccagcccuaccgggugguggugcugagcuucgagcugcugcacgcccccgccaccgugugcggcccuaaaaagagcaccaaccuggugaagaacaagugcgugaacuucaauuucaacggccugaccggcaccggcgugcugaccgagagcaacaagaaguuccugcccuuccagcaguucggccgggauaucgccgacaccaccgacgcagugcgggacccccagacccuggagauccuggacaucaccccaugcagcuucggcggcgugagcgucaucacccccggcacaaacaccagcaaccagguggccgugcuguaccaggacgugaacugcaccgaggugcccguggccauccacgccgaccagcugacccccaccuggcggguguacagcaccggaagcaacguguuccagacccgggccggcugccugaucggcgccgagcacgugaacaacuccuacgagugcgacauccccaucggcgcuggcaucugcgccagcuaccagacccagaccaacagcccccggcgggcccggagcguggccagccagagcaucaucgccuacaccaugagcuuaggcgccgagaacagcguggccuacagcaacaacagcaucgcgaucccuaccaacuucaccaucagcgugaccaccgagauacugcccgugagcaugaccaagaccagcguggacuguaccauguacaucugcggcgacagcaccgagugcagcaaccugcugcugcaguacggcagcuucugcacccagcugaaccgggcccugaccggcaucgccguggagcaggacaagaacacccaagagguguucgcccaggugaagcagaucuacaagacucccccaaucaaggacuucggcggcuucaacuucagccagauccugcccgaccccagcaagcccagcaagcggagcuucaucgaggaccugcuguucaacaaggugacccuggccgacgccggcuucaucaagcaguacggcgauugccugggcgacaucgccgcucgggaccugaucugcgcccagaaguucaacgggcugaccgugcugcccccucugcugaccgacgagaugaucgcccaguacaccagcgcccugcuugccggcaccaucaccagcggcuggaccuucggcgccggcgcagcccugcagauccccuucgccaugcagauggccuaccgguucaacggcaucggcgugacccagaacgugcuguacgagaaccagaagcugaucgccaaccaguucaacagcgccaucggcaagauccaggacagccugagcagcaccgccagcgcccugggcaagcugcaggacguggugaaccagaacgcucaggcccugaacacccuggugaagcagcugagcagcaacuucggcgccaucagcucagugcugaaugacauccugagcaggcuggaucccccagaggccgaggugcagaucgaccggcugaucaccggccggcugcagagccugcagaccuacgugacccagcagcugauccgggccgccgagauccgggccagcgccaaccuggcagccaccaagaugagcgagugcgugcugggccagagcaagcggguggacuuuugcggcaagggcuaccaccugaugagcuucccccagagcgcuccccacggcgugguguuccuccacgugacauacguccccgcccaggagaagaacuucaccaccgcccccgccauuugccacgacggcaaggcccacuucccccgggagggcguguucgugagcaacggaacccacugguucgugacccagcggaacuucuacgagccucagaucaucaccaccgacaacaccuucgugagcggcaacugcgacguggugaucggcaucgugaacaacaccguguacgacccccugcagcccgagcuggacagcuucaaggaggagcuggacaaguacuucaagaaccacaccagcccagacguggaccugggcgacaucagcggcaucaacgccagcguggugaacauccagaaggagaucgaccggcugaacgagguggccaagaaccugaacgagagccugaucgaccugcaggagcugggcaaguacgagcaguacaucaaguggcccugguacaucuggcugggcuucaucgccggccugaucgccaucgugauggugaccaucaugcugugcugcaugaccagcugcuguagcugccugaagggcugcugcagcugcggcagcugcugcaaguucgacgaggacgacagcgagcccgugcugaagggcgugaagcugcacuacaccugaugacucgagcugguacugcaugcacgcaaugcuagcugccccuuucccguccuggguaccccgagucucccccgaccucgggucccagguaugcucccaccuccaccugccccacucaccaccucugcuaguuccagacaccucccaagcacgcagcaaugcagcucaaaacgcuuagccuagccacacccccacgggaaacagcagugauuaaccuuuagcaauaaacgaaaguuuaacuaagcuauacuaaccccaggguuggucaauuucgugccagccacacccuggagcuagcaaaaaaaaaaaaaaaaaaaaaaaaaaaaaagcauaugacuaaaaaaaaaaaaaaaaaaaaaaaaaaaaaaaaaaaaaaaaaaaaaaaaaaaaaaaaaaaaaaaaaaaaaa

SEQ ID NO: 26872 - RNA, 4283 nt, Artificial Sequence
  SARS-CoV-2/Wuhan/WIV05/2019__EPI_ISL_402128 spike protein mRNA gc (1-1273)(K986P_V987P_ D614G)
agaauaaacuaguauucuucugguccccacagacucagagagaacccgccaccauguucguguuccuggugcugcugccccuggugagcagccagugcgugaaccugaccacccggacccagcugcccccugccuacaccaacagcuucacccggggcguguacuaccccgacaagguguuccggagcagcgugcugcacagcacccaggaccuguuccugcccuucuucagcaacgugaccugguuccacgccauccacgugagcggcaccaacggcaccaagcgguucgacaacccagugcugcccuucaacgacggcguguacuucgccagcaccgagaagucaaacaucauccggggcuggaucuucggcaccacccuggacagcaagacacagagccugcugaucgugaacaacgccaccaacguggugaucaaggugugcgaguuucaguucugcaacgaccccuuccugggcguguacuaccacaagaacaacaagagcuggauggagagcgaguuccgggucuacagcagcgcuaacaauugcaccuucgaguacgugagccagcccuuccugauggaccucgagggcaagcagggcaacuucaagaaccugcgggaguucguguucaagaacaucgauggcuacuucaagaucuacagcaagcacacccccaucaaccuggugcgggaccugccccagggauucagcgcccuggagccucugguggaccugcccaucggcaucaacaucaccagguuccagacccugcuggcccugcaccggagcuaccugacccccggcgacagcagcagcggcuggaccgccggcgccgccgcauacuacgugggcuaccugcagccacggaccuuccugcugaaguacaacgagaacggcaccaucaccgacgccguggacugcgcccuggacccccugagcgagaccaagugcacccuaaagagcuucaccguggagaagggcaucuaccagaccagcaacuuccgggugcagcccacugagagcaucgugcgguuccccaacauuaccaaccugugucccuucggcgagguguucaacgccacccgguucgccagcguguacgccuggaaccggaagcggaucagcaacugcguggccgacuacagcgugcuguacaacagcgccagcuucagcaccuucaagugcuacggcgugagcccuaccaagcugaacgaccugugcuucaccaacguguacgcugacagcuucgugauccggggcgacgaggugcggcagaucgcccccggccagaccggcaagaucgccgacuacaacuacaagcugcccgacgacuucaccggcugcgugaucgccuggaacagcaacaaccuggacagcaaggugggcggcaacuacaacuaccuguaccggcuguuccguaagagcaaccugaagccauucgagcgggacaucagcaccgagaucuaccaggccggcagcacccccugcaacgguguggagggcuuuaacugcuacuucccccugcagagcuacggcuuccagcccaccaacggcgugggcuaccagcccuaccgggugguggugcugagcuucgagcugcugcacgcccccgccaccgugugcggcccuaaaaagagcaccaaccuggugaagaacaagugcgugaacuucaauuucaacggccugaccggcaccggcgugcugaccgagagcaacaagaaguuccugcccuuccagcaguucggccgggauaucgccgacaccaccgacgcagugcgggacccccagacccuggagauccuggacaucaccccaugcagcuucggcggcgugagcgucaucacccccggcacaaacaccagcaaccagguggccgugcuguaccagggagugaacugcaccgaggugcccguggccauccacgccgaccagcugacccccaccuggcggguguacagcaccggcagcaacguguuccagacccgggccggcugccugaucggcgccgagcacgugaacaacuccuacgagugcgacauccccaucggcgcuggcaucugcgccagcuaccagacccagaccaacagcccccggcgggcccggagcguggccagccagagcaucaucgccuacaccaugagcuuaggcgccgagaacagcguggccuacagcaacaacagcaucgcgaucccuaccaacuucaccaucagcgugaccaccgagauacugcccgugagcaugaccaagaccagcguggacuguaccauguacaucugcggcgacagcaccgagugcagcaaccugcugcugcaguacggcagcuucugcacccagcugaaccgggcccugaccggcaucgccguggagcaggacaagaacacccaagagguguucgcccaggugaagcagaucuacaagacucccccaaucaaggacuucggcggcuucaacuucagccagauccugcccgaccccagcaagcccagcaagcggagcuucaucgaggaccugcuguucaacaaggugacccuggccgacgccggcuucaucaagcaguacggcgacugccugggggauaucgccgcucgggaccugaucugcgcccagaaguucaacggccugaccgugcugcccccucugcugaccgacgagaugaucgcccaguacaccagcgcccugcuugccggcaccaucaccagcggcuggaccuucggcgccggcgcagcccugcagauccccuucgccaugcagauggccuaccgguucaacggcaucggcgugacccagaacgugcuguacgagaaccagaagcugaucgccaaccaguucaacagcgccaucggcaagauccaggacagccugagcagcaccgccagcgcccugggcaagcugcaggacguggugaaccagaacgcucaggcccugaacacccuggugaagcagcugagcagcaacuucggcgccaucagcucagugcugaaugacauccugagcaggcuggaucccccagaggccgaggugcagaucgaccggcugaucaccggccggcugcagagccugcagaccuacgugacccagcagcugauccgggccgccgagauccgggccagcgccaaccuggcagccaccaagaugagcgagugcgugcugggccagagcaagcggguggacuuuugcggcaagggcuaccaccugaugagcuucccccagagcgcuccccacggcgugguguuccuccacgugacauacguccccgcccaggagaagaacuucaccaccgcccccgccauuugccacgacggcaaggcccacuucccccgggagggaguguucgugagcaacggcacccacugguucgugacccagcggaacuucuacgagccucagaucaucaccaccgacaacaccuucgugagcggcaacugcgacguggugaucggcaucgugaacaacaccguguacgacccccugcagcccgagcuggacagcuucaaggaggagcuggacaaguacuucaagaaccacaccagcccagacguggaccugggcgacaucagcggcaucaacgccagcguggugaacauccagaaggagaucgaccggcugaacgagguggccaagaaccugaacgagagccugaucgaccugcaggagcugggcaaguacgagcaguacaucaaguggcccugguacaucuggcugggcuucaucgccggccugaucgccaucgugauggugaccaucaugcugugcugcaugaccagcugcuguagcugccugaagggcugcugcagcugcggcagcugcugcaaguucgacgaggacgacagcgagcccgugcugaagggcgugaagcugcacuacaccugaugacucgagcugguacugcaugcacgcaaugcuagcugccccuuucccguccuggguaccccgagucucccccgaccucgggucccagguaugcucccaccuccaccugccccacucaccaccucugcuaguuccagacaccucccaagcacgcagcaaugcagcucaaaacgcuuagccuagccacacccccacgggaaacagcagugauuaaccuuuagcaauaaacgaaaguuuaacuaagcuauacuaaccccaggguuggucaauuucgugccagccacacccuggagcuagcaaaaaaaaaaaaaaaaaaaaaaaaaaaaaagcauaugacuaaaaaaaaaaaaaaaaaaaaaaaaaaaaaaaaaaaaaaaaaaaaaaaaaaaaaaaaaaaaaaaaaaaaaa

SEQ ID NO: 26873 - RNA, 4283 nt, Artificial Sequence
  SARS-CoV-2/Wuhan/WIV05/2019__EPI_ISL_402128 spike protein mRNA gc (1-1273)(K986P_V987P_A222V_D614G)
agaauaaacuaguauucuucugguccccacagacucagagagaacccgccaccauguucguguuccuggugcugcugccccuggugagcagccagugcgugaaccugaccacccggacccagcugcccccugccuacaccaacagcuucacccggggcguguacuaccccgacaagguguuccggagcagcgugcugcacagcacccaggaccuguuccugcccuucuucagcaacgugaccugguuccacgccauccacgugagcggcaccaacggcaccaagcgguucgacaacccagugcugcccuucaacgacggcguguacuucgccagcaccgagaagucaaacaucauccggggcuggaucuucggcaccacccuggacagcaagacacagagccugcugaucgugaacaacgccaccaacguggugaucaaggugugcgaguuucaguucugcaacgaccccuuccugggcguguacuaccacaagaacaacaagagcuggauggagagcgaguuccgggucuacagcagcgcuaacaauugcaccuucgaguacgugagccagcccuuccugauggaccucgagggcaagcagggcaacuucaagaaccugcgggaguucguguucaagaacaucgauggcuacuucaagaucuacagcaagcacacccccaucaaccuggugcgggaccugccccagggauucagcgugcuggagccucugguggaccugcccaucggcaucaacaucaccagguuccagacccugcuggcccugcaccggagcuaccugacccccggcgacagcagcagcggcuggaccgccggcgccgccgccuacuacgugggcuaccugcagccacggaccuuccugcugaaguacaacgagaacggcaccaucaccgacgcaguggacugcgcccuggacccccugagcgagaccaagugcacccuaaagagcuucaccguggagaagggcaucuaccagaccagcaacuuccgggugcagcccacugagagcaucgugcgguuccccaacauuaccaaccugugucccuucggcgagguguucaacgccacccgguucgccagcguguacgccuggaaccggaagcggaucagcaacugcguggccgacuacagcgugcuguacaacagcgccagcuucagcaccuucaagugcuacggcgugagcccuaccaagcugaacgaccugugcuucaccaacguguacgccgacagcuucgugauccggggcgacgaggugcggcagaucgcucccggccagaccggcaagaucgccgacuacaacuacaagcugcccgacgacuucaccggcugcgugaucgccuggaacagcaacaaccuggacagcaaggugggcggcaacuacaacuaccuguaccggcuguuccguaagagcaaccugaagccauucgagcgggacaucagcaccgagaucuaccaggccggcagcacccccugcaacgguguggagggcuuuaacugcuacuucccccugcagagcuacggcuuccagcccaccaacggcgugggcuaccagcccuaccgggugguggugcugagcuucgagcugcugcacgcccccgccaccgugugcggcccuaaaaagagcaccaaccuggugaagaacaagugcgugaacuucaauuucaacggccugaccggcaccggcgugcugaccgagagcaacaagaaguuccugcccuuccagcaguucggccgggauaucgccgacaccaccgacgccgugcgggacccccagacccuggagauccuggacaucaccccaugcagcuucggcggcgucagcgugaucacccccggcacaaacaccagcaaccagguggcagugcuguaccagggagugaacugcaccgaggugcccguggccauccacgccgaccagcugacccccaccuggcggguguacagcaccggcagcaacguguuccagacccgggccggcugccugaucggcgccgagcacgugaacaacuccuacgagugcgacauccccaucggcgccggcaucugcgcuagcuaccagacccagaccaacagcccccggcgggcccggagcguggccagccagagcaucaucgccuacaccaugagcuuaggcgccgagaacagcguggccuacagcaacaacagcaucgccaucccuaccaacuucaccaucagcgugaccaccgagauacugcccgugagcaugaccaagaccagcguggacuguaccauguacaucugcggcgacagcaccgagugcagcaaccugcugcugcaguacggcagcuucugcacccagcugaaccgggcgcugaccggcaucgccguggagcaggacaagaacacccaagagguguucgcccaggugaagcagaucuacaagacucccccaaucaaggacuucggcggcuucaacuucagccagauccugcccgaccccagcaagcccagcaagcggagcuucaucgaggaccugcuguucaacaaggugacccuggccgacgccggcuucaucaagcaguacggcgacugccugggggauaucgccgcccgggaccugaucugcgcucagaaguucaacggccugaccgugcugcccccucugcugaccgacgagaugaucgcccaguacaccagcgcccugcuugccggcaccaucaccagcggcuggaccuucggcgccggcgccgcacugcagauccccuucgccaugcagauggccuaccgguucaacggcaucggcgugacccagaacgugcuguacgagaaccagaagcugaucgccaaccaguucaacagcgccaucggcaagauccaggacagccugagcagcaccgccagcgcccugggcaagcugcaggacguggugaaccagaacgcccaggcucugaacacccuggugaagcagcugagcagcaacuucggcgccaucagcucagugcugaaugacauccugagcaggcuggaucccccagaggccgaggugcagaucgaccggcugaucaccggccggcugcagagccugcagaccuacgugacccagcagcugauccgggccgccgagauccgggccagcgccaaccuggccgcaaccaagaugagcgagugcgugcugggccagagcaagcggguggacuuuugcggcaagggcuaccaccugaugagcuucccccagagcgcuccccacggcgugguguuccuccacgucacauacgugcccgcccaggagaagaacuucaccaccgcccccgccauuugccacgacggcaaggcccacuucccccgggagggaguguucgugagcaacggcacccacugguucgugacccagcggaacuucuacgagccucagaucaucaccaccgacaacaccuucgugagcggcaacugcgacguggugaucggcaucgugaacaacaccguguacgacccccugcagcccgagcuggacagcuucaaggaggagcuggacaaguacuucaagaaccacaccagcccagacguggaccugggcgacaucagcggcaucaacgccagcguggugaacauccagaaggagaucgaccggcugaacgagguggccaagaaccugaacgagagccugaucgaccugcaggagcugggcaaguacgagcaguacaucaaguggcccugguacaucuggcugggcuucaucgccggccugaucgccaucgugauggugaccaucaugcugugcugcaugaccagcugcuguagcugccugaagggcugcugcagcugcggcagcugcugcaaguucgacgaggacgacagcgagcccgugcugaagggcgugaagcugcacuacaccugaugacucgagcugguacugcaugcacgcaaugcuagcugccccuuucccguccuggguaccccgagucucccccgaccucgggucccagguaugcucccaccuccaccugccccacucaccaccucugcuaguuccagacaccucccaagcacgcagcaaugcagcucaaaacgcuuagccuagccacacccccacgggaaacagcagugauuaaccuuuagcaauaaacgaaaguuuaacuaagcuauacuaaccccaggguuggucaauuucgugccagccacacccuggagcuagcaaaaaaaaaaaaaaaaaaaaaaaaaaaaaagcauaugacuaaaaaaaaaaaaaaaaaaaaaaaaaaaaaaaaaaaaaaaaaaaaaaaaaaaaaaaaaaaaaaaaaaaaaa

SEQ ID NO: 26874 - RNA, 4283 nt, Artificial Sequence
  SARS-CoV-2/Wuhan/WIV05/2019__EPI_ISL_402128 spike protein mRNA gc (1-1273)(K986P_V987P_N439K_D614G)
agaauaaacuaguauucuucugguccccacagacucagagagaacccgccaccauguucguguuccuggugcugcugccccuggugagcagccagugcgugaaccugaccacccggacccagcugcccccugccuacaccaacagcuucacccggggcguguacuaccccgacaagguguuccggagcagcgugcugcacagcacccaggaccuguuccugcccuucuucagcaacgugaccugguuccacgccauccacgugagcggcaccaacggcaccaagcgguucgacaacccagugcugcccuucaacgacggcguguacuucgccagcaccgagaagucaaacaucauccggggcuggaucuucggcaccacccuggacagcaagacacagagccugcugaucgugaacaacgccaccaacguggugaucaaggugugcgaguuucaguucugcaacgaccccuuccugggcguguacuaccacaagaacaacaagagcuggauggagagcgaguuccgggucuacagcagcgcuaacaauugcaccuucgaguacgugagccagcccuuccugauggaccucgagggcaagcagggcaacuucaagaaccugcgggaguucguguucaagaacaucgauggcuacuucaagaucuacagcaagcacacccccaucaaccuggugcgggaccugccccagggauucagcgcccuggagccucugguggaccugcccaucggcaucaacaucaccagguuccagacccugcuggcccugcaccggagcuaccugacccccggcgacagcagcagcggcuggaccgccggcgccgccgcauacuacgugggcuaccugcagccacggaccuuccugcugaaguacaacgagaacggcaccaucaccgacgccguggacugcgcccuggacccccugagcgagaccaagugcacccuaaagagcuucaccguggagaagggcaucuaccagaccagcaacuuccgggugcagcccacugagagcaucgugcgguuccccaacauuaccaaccugugucccuucggcgagguguucaacgccacccgguucgccagcguguacgccuggaaccggaagcggaucagcaacugcguggccgacuacagcgugcuguacaacagcgccagcuucagcaccuucaagugcuacggcgugagcccuaccaagcugaacgaccugugcuucaccaacguguacgcugacagcuucgugauccggggcgacgaggugcggcagaucgcccccggccagaccggcaagaucgccgacuacaacuacaagcugcccgacgacuucaccggcugcgugaucgccuggaacagcaagaaccuggacagcaaggugggcggcaacuacaacuaccuguaccggcuguuccguaagagcaaccugaagccauucgagcgggacaucagcaccgagaucuaccaggccggcagcacccccugcaacgguguggagggcuuuaacugcuacuucccccugcagagcuacggcuuccagcccaccaacggcgugggcuaccagcccuaccgggugguggugcugagcuucgagcugcugcacgcccccgccaccgugugcggcccuaaaaagagcaccaaccuggugaagaacaagugcgugaacuucaacuucaauggccugaccggcaccggcgugcugaccgagagcaacaagaaguuccugcccuuccagcaguucggccgggauaucgccgacaccaccgacgcagugcgggacccccagacccuggagauccuggacaucaccccaugcagcuucggcggcgugagcgucaucacccccggcacaaacaccagcaaccagguggccgugcuguaccagggagugaacugcaccgaggugcccguggccauccacgccgaccagcugacccccaccuggcggguguacagcaccggcagcaacguguuccagacccgggccggcugccugaucggcgccgagcacgugaacaacuccuacgagugcgacauccccaucggcgcuggcaucugcgccagcuaccagacccagaccaacagcccccggcgggcccggagcguggccagccagagcaucaucgccuacaccaugagcuuaggcgccgagaacagcguggccuacagcaacaacagcaucgcgaucccuaccaacuucaccaucagcgugaccaccgagauacugcccgugagcaugaccaagaccagcguggacuguaccauguacaucugcggcgacagcaccgagugcagcaaccugcugcugcaguacggcagcuucugcacccagcugaaccgggcccugaccggcaucgccguggagcaggacaagaacacccaagagguguucgcccaggugaagcagaucuacaagacucccccaaucaaggacuucggcggcuucaacuucagccagauccugcccgaccccagcaagcccagcaagcggagcuucaucgaggaccugcuguucaacaaggugacccuggccgacgccggcuucaucaagcaguacggcgacugccugggggauaucgccgcucgggaccugaucugcgcccagaaguucaacggccugaccgugcugcccccucugcugaccgacgagaugaucgcccaguacaccagcgcccugcuugccggcaccaucaccagcggcuggaccuucggcgccggcgcagcccugcagauccccuucgccaugcagauggccuaccgguucaacggcaucggcgugacccagaacgugcuguacgagaaccagaagcugaucgccaaccaguucaacagcgccaucggcaagauccaggacagccugagcagcaccgccagcgcccugggcaagcugcaggacguggugaaccagaacgcucaggcccugaacacccuggugaagcagcugagcagcaacuucggcgccaucagcucagugcugaacgacauccugagcaggcuggaucccccagaggccgaggugcagaucgaccggcugaucaccggccggcugcagagccugcagaccuacgugacccagcagcugauccgggccgccgagauccgggccagcgccaaucuggcagccaccaagaugagcgagugcgugcugggccagagcaagcggguggacuuuugcggcaagggcuaccaccugaugagcuucccccagagcgcuccccacggcgugguguuccuccacgugacauacguccccgcccaggagaagaacuucaccaccgcccccgccauuugccacgacggcaaggcccacuucccccgggagggaguguucgugagcaacggcacccacugguucgugacccagcggaacuucuacgagccucagaucaucaccaccgacaacaccuucgugagcggcaacugcgacguggugaucggcaucgugaacaacaccguguacgacccccugcagcccgagcuggacagcuucaaggaggagcuggacaaguacuucaagaaccacaccagcccagacguggaccugggcgacaucagcggcaucaacgccagcguggugaacauccagaaggagaucgaccggcugaacgagguggccaagaaccugaacgagagccugaucgaccugcaggagcugggcaaguacgagcaguacaucaaguggcccugguacaucuggcugggcuucaucgccggccugaucgccaucgugauggugaccaucaugcugugcugcaugaccagcugcuguagcugccugaagggcugcugcagcugcggcagcugcugcaaguucgacgaggacgacagcgagcccgugcugaagggcgugaagcugcacuacaccugaugacucgagcugguacugcaugcacgcaaugcuagcugccccuuucccguccuggguaccccgagucucccccgaccucgggucccagguaugcucccaccuccaccugccccacucaccaccucugcuaguuccagacaccucccaagcacgcagcaaugcagcucaaaacgcuuagccuagccacacccccacgggaaacagcagugauuaaccuuuagcaauaaacgaaaguuuaacuaagcuauacuaaccccaggguuggucaauuucgugccagccacacccuggagcuagcaaaaaaaaaaaaaaaaaaaaaaaaaaaaaagcauaugacuaaaaaaaaaaaaaaaaaaaaaaaaaaaaaaaaaaaaaaaaaaaaaaaaaaaaaaaaaaaaaaaaaaaaaa

SEQ ID NO: 26875 - RNA, 4283 nt, Artificial Sequence
  SARS-CoV-2/Wuhan/WIV05/2019__EPI_ISL_402128 spike protein mRNA gc (1-1273)(K986P_V987P_S477N_D614G)
agaauaaacuaguauucuucugguccccacagacucagagagaacccgccaccauguucguguuccuggugcugcugccccuggugagcagccagugcgugaaccugaccacccggacccagcugcccccugccuacaccaacagcuucacccggggcguguacuaccccgacaagguguuccggagcagcgugcugcacagcacccaggaccuguuccugcccuucuucagcaacgugaccugguuccacgccauccacgugagcggcaccaacggcaccaagcgguucgacaacccagugcugcccuucaacgacggcguguacuucgccagcaccgagaagucaaacaucauccggggcuggaucuucggcaccacccuggacagcaagacacagagccugcugaucgugaacaacgccaccaacguggugaucaaggugugcgaguuucaguucugcaacgaccccuuccugggcguguacuaccacaagaacaacaagagcuggauggagagcgaguuccgggucuacagcagcgcuaacaauugcaccuucgaguacgugagccagcccuuccugauggaccucgagggcaagcagggcaacuucaagaaccugcgggaguucguguucaagaacaucgauggcuacuucaagaucuacagcaagcacacccccaucaaccuggugcgggaccugccccagggauucagcgcccuggagccucugguggaccugcccaucggcaucaacaucaccagguuccagacccugcuggcccugcaccggagcuaccugacccccggcgacagcagcagcggcuggaccgccggcgccgccgcauacuacgugggcuaccugcagccacggaccuuccugcugaaguacaacgagaacggcaccaucaccgacgccguggacugcgcccuggacccccugagcgagaccaagugcacccuaaagagcuucaccguggagaagggcaucuaccagaccagcaacuuccgggugcagcccacugagagcaucgugcgguuccccaacauuaccaaccugugucccuucggcgagguguucaacgccacccgguucgccagcguguacgccuggaaccggaagcggaucagcaacugcguggccgacuacagcgugcuguacaacagcgccagcuucagcaccuucaagugcuacggcgugagcccuaccaagcugaacgaccugugcuucaccaacguguacgcugacagcuucgugauccggggcgacgaggugcggcagaucgcccccggccagaccggcaagaucgccgacuacaacuacaagcugcccgacgacuucaccggcugcgugaucgccuggaacagcaacaaccuggacagcaaggugggcggcaacuacaacuaccuguaccggcuguuccguaagagcaaccugaagccauucgagcgggacaucagcaccgagaucuaccaggccggcaacacccccugcaacgguguggagggcuuuaacugcuacuucccccugcagagcuacggcuuccagcccaccaacggcgugggcuaccagcccuaccgggugguggugcugagcuucgagcugcugcacgcccccgccaccgugugcggcccuaaaaagagcaccaaccuggugaagaacaagugcgugaauuucaacuucaacggccugaccggcaccggcgugcugaccgagagcaacaagaaguuccugcccuuccagcaguucggccgggauaucgccgacaccaccgacgcagugcgggacccccagacccuggagauccuggacaucaccccaugcagcuucggcggcgugagcgucaucacccccggcacaaacaccagcaaccagguggccgugcuguaccagggagugaacugcaccgaggugcccguggccauccacgccgaccagcugacccccaccuggcggguguacagcaccggcagcaacguguuccagacccgggccggcugccugaucggcgccgagcacgugaacaacagcuacgagugcgacauccccaucggcgcuggcaucugcgccuccuaccagacccagaccaacagcccccggcgggcccggagcguggccagccagagcaucaucgccuacaccaugagcuuaggcgccgagaacagcguggccuacagcaacaacagcaucgcgaucccuaccaacuucaccaucagcgugaccaccgagauacugcccgugagcaugaccaagaccagcguggacuguaccauguacaucugcggcgacagcaccgagugcagcaaccugcugcugcaguacggcagcuucugcacccagcugaaccgggcccugaccggcaucgccguggagcaggacaagaacacccaagagguguucgcccaggugaagcagaucuacaagacucccccaaucaaggacuucggcggcuucaacuucagccagauccugcccgaccccagcaagcccagcaagcggagcuucaucgaggaccugcuguucaacaaggugacccuggccgacgccggcuucaucaagcaguacggcgacugccugggggauaucgccgcucgggaccugaucugcgcccagaaguucaacggccugaccgugcugcccccucugcugaccgacgagaugaucgcccaguacaccagcgcccugcuugccggcaccaucaccagcggcuggaccuucggcgccggcgcagcccugcagauccccuucgccaugcagauggccuaccgguucaacggcaucggcgugacccagaacgugcuguacgagaaccagaagcugaucgccaaccaguucaacagcgccaucggcaagauccaggacagccugagcagcaccgccagcgcccugggcaagcugcaggacguggugaaccagaacgcucaggcccugaacacccuggugaagcagcugagcagcaauuucggcgccaucagcagcgugcugaacgacauccugucaaggcuggaucccccagaggccgaggugcagaucgaccggcugaucaccggccggcugcagagccugcagaccuacgugacccagcagcugauccgggccgccgagauccgggccagcgccaaccuggcagccaccaagaugagcgagugcgugcugggccagagcaagcggguggacuuuugcggcaagggcuaccaccugaugagcuucccccagagcgcuccccacggcgugguguuccuccacgugacauacguccccgcccaggagaagaacuucaccaccgcccccgccauuugccacgacggcaaggcccacuucccccgggagggaguguucgugagcaacggcacccacugguucgugacccagcggaacuucuacgagccucagaucaucaccaccgacaacaccuucgugagcggcaacugcgacguggugaucggcaucgugaacaacaccguguacgacccccugcagcccgagcuggacagcuucaaggaggagcuggacaaguacuucaagaaccacaccagcccagacguggaccugggcgacaucagcggcaucaacgccagcguggugaacauccagaaggagaucgaccggcugaacgagguggccaagaaccugaacgagagccugaucgaccugcaggagcugggcaaguacgagcaguacaucaaguggcccugguacaucuggcugggcuucaucgccggccugaucgccaucgugauggugaccaucaugcugugcugcaugaccagcugcuguagcugccugaagggcugcugcagcugcggcagcugcugcaaguucgacgaggacgacagcgagcccgugcugaagggcgugaagcugcacuacaccugaugacucgagcugguacugcaugcacgcaaugcuagcugccccuuucccguccuggguaccccgagucucccccgaccucgggucccagguaugcucccaccuccaccugccccacucaccaccucugcuaguuccagacaccucccaagcacgcagcaaugcagcucaaaacgcuuagccuagccacacccccacgggaaacagcagugauuaaccuuuagcaauaaacgaaaguuuaacuaagcuauacuaaccccaggguuggucaauuucgugccagccacacccuggagcuagcaaaaaaaaaaaaaaaaaaaaaaaaaaaaaagcauaugacuaaaaaaaaaaaaaaaaaaaaaaaaaaaaaaaaaaaaaaaaaaaaaaaaaaaaaaaaaaaaaaaaaaaaaa

SEQ ID NO: 26876 - RNA, 4283 nt, Artificial Sequence
  SARS-CoV-2/Wuhan/WIV05/2019__EPI_ISL_402128 spike protein mRNA gc (1-1273)(K986P_V987P_N501Y_D614G)
agaauaaacuaguauucuucugguccccacagacucagagagaacccgccaccauguucguguuccuggugcugcugccccuggugagcagccagugcgugaaccugaccacccggacccagcugcccccugccuacaccaacagcuucacccggggcguguacuaccccgacaagguguuccggagcagcgugcugcacagcacccaggaccuguuccugcccuucuucagcaacgugaccugguuccacgccauccacgugagcggcaccaacggcaccaagcgguucgacaacccagugcugcccuucaacgacggcguguacuucgccagcaccgagaagucaaacaucauccggggcuggaucuucggcaccacccuggacagcaagacacagagccugcugaucgugaacaacgccaccaacguggugaucaaggugugcgaguuucaguucugcaacgaccccuuccugggcguguacuaccacaagaacaacaagagcuggauggagagcgaguuccgggucuacagcagcgcuaacaauugcaccuucgaguacgugagccagcccuuccugauggaccucgagggcaagcagggcaacuucaagaaccugcgggaguucguguucaagaacaucgauggcuacuucaagaucuacagcaagcacacccccaucaaccuggugcgggaccugccccagggauucagcgcccuggagccucugguggaccugcccaucggcaucaacaucaccagguuccagacccugcuggcccugcaccggagcuaccugacccccggcgacagcagcagcggcuggaccgccggcgccgccgcauacuacgugggcuaccugcagccacggaccuuccugcugaaguacaacgagaacggcaccaucaccgacgccguggacugcgcccuggacccccugagcgagaccaagugcacccuaaagagcuucaccguggagaagggcaucuaccagaccagcaacuuccgggugcagcccacugagagcaucgugcgguuccccaacauuaccaaccugugucccuucggcgagguguucaacgccacccgguucgccagcguguacgccuggaaccggaagcggaucagcaacugcguggccgacuacagcgugcuguacaacagcgccagcuucagcaccuucaagugcuacggcgugagcccuaccaagcugaacgaccugugcuucaccaacguguacgcugacagcuucgugauccggggcgacgaggugcggcagaucgcccccggccagaccggcaagaucgccgacuacaacuacaagcugcccgacgacuucaccggcugcgugaucgccuggaacagcaacaaccuggacagcaaggugggcggcaacuacaacuaccuguaccggcuguuccguaagagcaaccugaagccauucgagcgggacaucagcaccgagaucuaccaggccggcagcacccccugcaacgguguggagggcuuuaacugcuacuucccccugcagagcuacggcuuccagcccaccuacggcgugggcuaccagcccuaccgggugguggugcugagcuucgagcugcugcacgcccccgccaccgugugcggcccuaaaaagagcaccaaccuggugaagaacaagugcgugaacuucaacuucaauggccugaccggcaccggcgugcugaccgagagcaacaagaaguuccugcccuuccagcaguucggccgggauaucgccgacaccaccgacgcagugcgggacccccagacccuggagauccuggacaucaccccaugcagcuucggcggcgugagcgucaucacccccggcacaaacaccagcaaccagguggccgugcuguaccagggagugaacugcaccgaggugcccguggccauccacgccgaccagcugacccccaccuggcggguguacagcaccggcagcaacguguuccagacccgggccggcugccugaucggcgccgagcacgugaacaacuccuacgagugcgacauccccaucggcgcuggcaucugcgccagcuaccagacccagaccaacagcccccggcgggcccggagcguggccagccagagcaucaucgccuacaccaugagcuuaggcgccgagaacagcguggccuacagcaacaacagcaucgcgaucccuaccaacuucaccaucagcgugaccaccgagauacugcccgugagcaugaccaagaccagcguggacuguaccauguacaucugcggcgacagcaccgagugcagcaaccugcugcugcaguacggcagcuucugcacccagcugaaccgggcccugaccggcaucgccguggagcaggacaagaacacccaagagguguucgcccaggugaagcagaucuacaagacucccccaaucaaggacuucggcggcuucaacuucagccagauccugcccgaccccagcaagcccagcaagcggagcuucaucgaggaccugcuguucaacaaggugacccuggccgacgccggcuucaucaagcaguacggcgacugccugggggauaucgccgcucgggaccugaucugcgcccagaaguucaacggccugaccgugcugcccccucugcugaccgacgagaugaucgcccaguacaccagcgcccugcuugccggcaccaucaccagcggcuggaccuucggcgccggcgcagcccugcagauccccuucgccaugcagauggccuaccgguucaacggcaucggcgugacccagaacgugcuguacgagaaccagaagcugaucgccaaccaguucaacagcgccaucggcaagauccaggacagccugagcagcaccgccagcgcccugggcaagcugcaggacguggugaaccagaacgcucaggcccugaacacccuggugaagcagcugagcagcaacuucggcgccaucagcucagugcugaacgacauccugagcaggcuggaucccccagaggccgaggugcagaucgaccggcugaucaccggccggcugcagagccugcagaccuacgugacccagcagcugauccgggccgccgagauccgggccagcgccaaucuggcagccaccaagaugagcgagugcgugcugggccagagcaagcggguggacuuuugcggcaagggcuaccaccugaugagcuucccccagagcgcuccccacggcgugguguuccuccacgugacauacguccccgcccaggagaagaacuucaccaccgcccccgccauuugccacgacggcaaggcccacuucccccgggagggaguguucgugagcaacggcacccacugguucgugacccagcggaacuucuacgagccucagaucaucaccaccgacaacaccuucgugagcggcaacugcgacguggugaucggcaucgugaacaacaccguguacgacccccugcagcccgagcuggacagcuucaaggaggagcuggacaaguacuucaagaaccacaccagcccagacguggaccugggcgacaucagcggcaucaacgccagcguggugaacauccagaaggagaucgaccggcugaacgagguggccaagaaccugaacgagagccugaucgaccugcaggagcugggcaaguacgagcaguacaucaaguggcccugguacaucuggcugggcuucaucgccggccugaucgccaucgugauggugaccaucaugcugugcugcaugaccagcugcuguagcugccugaagggcugcugcagcugcggcagcugcugcaaguucgacgaggacgacagcgagcccgugcugaagggcgugaagcugcacuacaccugaugacucgagcugguacugcaugcacgcaaugcuagcugccccuuucccguccuggguaccccgagucucccccgaccucgggucccagguaugcucccaccuccaccugccccacucaccaccucugcuaguuccagacaccucccaagcacgcagcaaugcagcucaaaacgcuuagccuagccacacccccacgggaaacagcagugauuaaccuuuagcaauaaacgaaaguuuaacuaagcuauacuaaccccaggguuggucaauuucgugccagccacacccuggagcuagcaaaaaaaaaaaaaaaaaaaaaaaaaaaaaagcauaugacuaaaaaaaaaaaaaaaaaaaaaaaaaaaaaaaaaaaaaaaaaaaaaaaaaaaaaaaaaaaaaaaaaaaaaa

SEQ ID NO: 26877 - RNA, 4277 nt, Artificial Sequence
  SARS-CoV-2/Wuhan/WIV05/2019__EPI_ISL_402128 spike protein mRNA gc (1-1273)(K986P_V987P_H69del_V70del_D614G)
agaauaaacuaguauucuucugguccccacagacucagagagaacccgccaccauguucguguuccuggugcugcugccccuggugagcagccagugcgugaaccugaccacccggacccagcugcccccugccuacaccaacagcuucacccggggcguguacuaccccgacaagguguuccggagcagcgugcugcacagcacccaggaccuguuccugcccuucuucagcaacgugaccugguuccacgccaucagcggcaccaacggcaccaagcgguucgacaacccagugcugcccuucaacgacggcguguacuucgccagcaccgagaagucaaacaucauccggggcuggaucuucggcaccacccuggacagcaagacacagagccugcugaucgugaacaacgccaccaacguggugaucaaggugugcgaguuucaguucugcaacgaccccuuccugggcguguacuaccacaagaacaacaagagcuggauggagagcgaguuccggguguacagcagcgcuaacaauugcaccuucgaguacgucagccagcccuuccugauggaccucgagggcaagcagggcaacuucaagaaccugcgggaguucguguucaagaacaucgauggcuacuucaagaucuacagcaagcacacccccaucaaccuggugcgggaccugccccagggauucagcgcccuggagccucugguggaccugcccaucggcaucaacaucaccagguuccagacccugcuggcccugcaccggagcuaccugacccccggcgacagcagcagcggcuggaccgccggcgccgccgcauacuacgugggcuaccugcagccacggaccuuccugcugaaguacaacgagaacggcaccaucaccgacgccguggacugcgcccuggacccccugagcgagaccaagugcacccuaaagagcuucaccguggagaagggcaucuaccagaccagcaacuuccgggugcagcccacugagagcaucgugcgguuccccaacauuaccaaccugugucccuucggcgagguguucaacgccacccgguucgccagcguguacgccuggaaccggaagcggaucagcaacugcguggccgacuacagcgugcuguacaacagcgccagcuucagcaccuucaagugcuacggcgugagcccuaccaagcugaacgaccugugcuucaccaacguguacgcugacagcuucgugauccggggcgacgaggugcggcagaucgcccccggccagaccggcaagaucgccgacuacaacuacaagcugcccgacgacuucaccggcugcgugaucgccuggaacagcaacaaccuggacagcaaggugggcggcaacuacaacuaccuguaccggcuguuccguaagagcaaccugaagccauucgagcgggacaucagcaccgagaucuaccaggccggcagcacccccugcaacgguguggagggcuuuaacugcuacuucccccugcagagcuacggcuuccagcccaccaacggcgugggcuaccagcccuaccgggugguggugcugagcuucgagcugcugcacgcccccgccaccgugugcggcccuaaaaagagcaccaaccuggugaagaacaagugcgugaacuucaauuucaacggccugaccggcaccggcgugcugaccgagagcaacaagaaguuccugcccuuccagcaguucggccgggauaucgccgacaccaccgacgcagugcgggacccccagacccuggagauccuggacaucaccccaugcagcuucggcggcgugagcgugaucacccccggcacaaacaccagcaaccaggucgccgugcuguaccagggagugaacugcaccgaggugcccguggccauccacgccgaccagcugacccccaccuggcggguguacagcaccggcagcaacguguuccagacccgggccggcugccugaucggcgccgagcacgugaacaacuccuacgagugcgacauccccaucggcgcuggcaucugcgccagcuaccagacccagaccaacagcccccggcgggcccggagcguggccagccagagcaucaucgccuacaccaugagcuuaggcgccgagaacagcguggccuacagcaacaacagcaucgcgaucccuaccaacuucaccaucagcgugaccaccgagauacugcccgugagcaugaccaagaccagcguggacuguaccauguacaucugcggcgacagcaccgagugcagcaaccugcugcugcaguacggcagcuucugcacccagcugaaccgggcccugaccggcaucgccguggagcaggacaagaacacccaagagguguucgcccaggugaagcagaucuacaagacucccccaaucaaggacuucggcggcuucaacuucagccagauccugcccgaccccagcaagcccagcaagcggagcuucaucgaggaccugcuguucaacaaggugacccuggccgacgccggcuucaucaagcaguacggcgacugccugggggauaucgccgcucgggaccugaucugcgcccagaaguucaacggccugaccgugcugcccccucugcugaccgacgagaugaucgcccaguacaccagcgcccugcuugccggcaccaucaccagcggcuggaccuucggcgccggcgcagcccugcagauccccuucgccaugcagauggccuaccgguucaacggcaucggcgugacccagaacgugcuguacgagaaccagaagcugaucgccaaccaguucaacagcgccaucggcaagauccaggacagccugagcagcaccgccagcgcccugggcaagcugcaggacguggugaaccagaacgcucaggcccugaacacccuggugaagcagcugagcagcaacuucggcgccaucagcucagugcugaaugacauccugagcaggcuggaucccccagaggccgaggugcagaucgaccggcugaucaccggccggcugcagagccugcagaccuacgugacccagcagcugauccgggccgccgagauccgggccagcgccaaccuggcagccaccaagaugagcgagugcgugcugggccagagcaagcggguggacuuuugcggcaagggcuaccaccugaugagcuucccccagagcgcuccccacggcgugguguuccuccacgugacauacgugcccgcccaggagaagaacuucaccaccgcccccgccauuugccacgacggcaaggcccacuucccccgggagggagucuucgugagcaacggcacccacugguucgugacccagcggaacuucuacgagccucagaucaucaccaccgacaacaccuucgugagcggcaacugcgacguggugaucggcaucgugaacaacaccguguacgacccccugcagcccgagcuggacagcuucaaggaggagcuggacaaguacuucaagaaccacaccagcccagacguggaccugggcgacaucagcggcaucaacgccagcguggugaacauccagaaggagaucgaccggcugaacgagguggccaagaaccugaacgagagccugaucgaccugcaggagcugggcaaguacgagcaguacaucaaguggcccugguacaucuggcugggcuucaucgccggccugaucgccaucgugauggugaccaucaugcugugcugcaugaccagcugcuguagcugccugaagggcugcugcagcugcggcagcugcugcaaguucgacgaggacgacagcgagcccgugcugaagggcgugaagcugcacuacaccugaugacucgagcugguacugcaugcacgcaaugcuagcugccccuuucccguccuggguaccccgagucucccccgaccucgggucccagguaugcucccaccuccaccugccccacucaccaccucugcuaguuccagacaccucccaagcacgcagcaaugcagcucaaaacgcuuagccuagccacacccccacgggaaacagcagugauuaaccuuuagcaauaaacgaaaguuuaacuaagcuauacuaaccccaggguuggucaauuucgugccagccacacccuggagcuagcaaaaaaaaaaaaaaaaaaaaaaaaaaaaaagcauaugacuaaaaaaaaaaaaaaaaaaaaaaaaaaaaaaaaaaaaaaaaaaaaaaaaaaaaaaaaaaaaaaaaaaaaaa

SEQ ID NO: 26878 - RNA, 4283 nt, Artificial Sequence
  SARS-CoV-2/Wuhan/WIV05/2019__EPI_ISL_402128 spike protein mRNA gc (1-1273)(K986P_V987P_Y453F_D614G)
agaauaaacuaguauucuucugguccccacagacucagagagaacccgccaccauguucguguuccuggugcugcugccccuggugagcagccagugcgugaaccugaccacccggacccagcugcccccugccuacaccaacagcuucacccggggcguguacuaccccgacaagguguuccggagcagcgugcugcacagcacccaggaccuguuccugcccuucuucagcaacgugaccugguuccacgccauccacgugagcggcaccaacggcaccaagcgguucgacaacccagugcugcccuucaacgacggcguguacuucgccagcaccgagaagucaaacaucauccggggcuggaucuucggcaccacccuggacagcaagacacagagccugcugaucgugaacaacgccaccaacguggugaucaaggugugcgaguuucaguucugcaacgaccccuuccugggcguguacuaccacaagaacaacaagagcuggauggagagcgaguuccgggucuacagcagcgcuaacaauugcaccuucgaguacgugagccagcccuuccugauggaccucgagggcaagcagggcaacuucaagaaccugcgggaguucguguucaagaacaucgauggcuacuucaagaucuacagcaagcacacccccaucaaccuggugcgggaccugccccagggauucagcgcccuggagccucugguggaccugcccaucggcaucaacaucaccagguuccagacccugcuggcccugcaccggagcuaccugacccccggcgacagcagcagcggcuggaccgccggcgccgccgcauacuacgugggcuaccugcagccacggaccuuccugcugaaguacaacgagaacggcaccaucaccgacgccguggacugcgcccuggacccccugagcgagaccaagugcacccuaaagagcuucaccguggagaagggcaucuaccagaccagcaacuuccgggugcagcccacugagagcaucgugcgguuccccaacauuaccaaccugugucccuucggcgagguguucaacgccacccgguucgccagcguguacgccuggaaccggaagcggaucagcaacugcguggccgacuacagcgugcuguacaacagcgccagcuucagcaccuucaagugcuacggcgugagcccuaccaagcugaacgaccugugcuucaccaacguguacgcugacagcuucgugauccggggcgacgaggugcggcagaucgcccccggccagaccggcaagaucgccgacuacaacuacaagcugcccgacgacuucaccggcugcgugaucgccuggaacagcaacaaccuggacagcaaggugggcggcaacuacaacuaccuguuccggcuguuccguaagagcaaccugaagccauuugagcgggacaucagcaccgagaucuaccaggccggcagcacccccugcaacgguguggagggcuucaacugcuacuucccccugcagagcuacggcuuccagcccaccaacggcgugggcuaccagcccuaccgggugguggugcugagcuucgagcugcugcacgcccccgccaccgugugcggcccuaaaaagagcaccaaccuggugaagaacaagugcgugaacuucaauuucaacggccugaccggcaccggcgugcugaccgagagcaacaagaaguuccugcccuuccagcaguucggccgggauaucgccgacaccaccgacgcagugcgggacccccagacccuggagauccuggacaucaccccaugcagcuucggcggcgugagcgucaucacccccggcacaaacaccagcaaccagguggccgugcuguaccagggagugaacugcaccgaggugcccguggccauccacgccgaccagcugacccccaccuggcggguguacagcaccggcagcaacguguuccagacccgggccggcugccugaucggcgccgagcacgugaacaacuccuacgagugcgacauccccaucggcgcuggcaucugcgccagcuaccagacccagaccaacagcccccggcgggcccggagcguggccagccagagcaucaucgccuacaccaugagcuuaggcgccgagaacagcguggccuacagcaacaacagcaucgcgaucccuaccaacuucaccaucagcgugaccaccgagauacugcccgugagcaugaccaagaccagcguggacuguaccauguacaucugcggcgacagcaccgagugcagcaaccugcugcugcaguacggcagcuucugcacccagcugaaccgggcccugaccggcaucgccguggagcaggacaagaacacccaagagguguucgcccaggugaagcagaucuacaagacucccccaaucaaggacuucggcggcuucaacuucagccagauccugcccgaccccagcaagcccagcaagcggagcuucaucgaggaccugcuguucaacaaggugacccuggccgacgccggcuucaucaagcaguacggcgacugccugggggauaucgccgcucgggaccugaucugcgcccagaaguucaacggccugaccgugcugcccccucugcugaccgacgagaugaucgcccaguacaccagcgcccugcuugccggcaccaucaccagcggcuggaccuucggcgccggcgcagcccugcagauccccuucgccaugcagauggccuaccgguucaacggcaucggcgugacccagaacgugcuguacgagaaccagaagcugaucgccaaccaguucaacagcgccaucggcaagauccaggacagccugagcagcaccgccagcgcccugggcaagcugcaggacguggugaaccagaacgcucaggcccugaacacccuggugaagcagcugagcagcaacuuuggcgccaucagcucagugcugaaugacauccugagcaggcuggaucccccagaggccgaggugcagaucgaccggcugaucaccggccggcugcagagccugcagaccuacgugacccagcagcugauccgggccgccgagauccgggccagcgccaaccuggcagccaccaagaugagcgagugcgugcugggccagagcaagcggguggacuucugcggcaagggcuaccaccugaugagcuucccccagagcgcuccccacggcgugguguuccuccacgugacauacguccccgcccaggagaagaacuucaccaccgcccccgccauuugccacgacggcaaggcccacuucccccgggagggaguguucgugagcaacggcacccacugguucgugacccagcggaacuucuacgagccucagaucaucaccaccgacaacaccuucgugagcggcaacugcgacguggugaucggcaucgugaacaacaccguguacgacccccugcagcccgagcuggacagcuucaaggaggagcuggacaaguacuucaagaaccacaccagcccagacguggaccugggcgacaucagcggcaucaacgccagcguggugaacauccagaaggagaucgaccggcugaacgagguggccaagaaccugaacgagagccugaucgaccugcaggagcugggcaaguacgagcaguacaucaaguggcccugguacaucuggcugggcuucaucgccggccugaucgccaucgugauggugaccaucaugcugugcugcaugaccagcugcuguagcugccugaagggcugcugcagcugcggcagcugcugcaaguucgacgaggacgacagcgagcccgugcugaagggcgugaagcugcacuacaccugaugacucgagcugguacugcaugcacgcaaugcuagcugccccuuucccguccuggguaccccgagucucccccgaccucgggucccagguaugcucccaccuccaccugccccacucaccaccucugcuaguuccagacaccucccaagcacgcagcaaugcagcucaaaacgcuuagccuagccacacccccacgggaaacagcagugauuaaccuuuagcaauaaacgaaaguuuaacuaagcuauacuaaccccaggguuggucaauuucgugccagccacacccuggagcuagcaaaaaaaaaaaaaaaaaaaaaaaaaaaaaagcauaugacuaaaaaaaaaaaaaaaaaaaaaaaaaaaaaaaaaaaaaaaaaaaaaaaaaaaaaaaaaaaaaaaaaaaaaa

SEQ ID NO: 26879 - RNA, 4283 nt, Artificial Sequence
  SARS-CoV-2/Wuhan/WIV05/2019__EPI_ISL_402128 spike protein mRNA gc (1-1273)(K986P_V987P_D614G_I692V)
agaauaaacuaguauucuucugguccccacagacucagagagaacccgccaccauguucguguuccuggugcugcugccccuggugagcagccagugcgugaaccugaccacccggacccagcugcccccugccuacaccaacagcuucacccggggcguguacuaccccgacaagguguuccggagcagcgugcugcacagcacccaggaccuguuccugcccuucuucagcaacgugaccugguuccacgccauccacgugagcggcaccaacggcaccaagcgguucgacaacccagugcugcccuucaacgacggcguguacuucgccagcaccgagaagucaaacaucauccggggcuggaucuucggcaccacccuggacagcaagacacagagccugcugaucgugaacaacgccaccaacguggugaucaaggugugcgaguuucaguucugcaacgaccccuuccugggcguguacuaccacaagaacaacaagagcuggauggagagcgaguuccgggucuacagcagcgcuaacaauugcaccuucgaguacgugagccagcccuuccugauggaccucgagggcaagcagggcaacuucaagaaccugcgggaguucguguucaagaacaucgauggcuacuucaagaucuacagcaagcacacccccaucaaccuggugcgggaccugccccagggauucagcgcccuggagccucugguggaccugcccaucggcaucaacaucaccagguuccagacccugcuggcccugcaccggagcuaccugacccccggcgacagcagcagcggcuggaccgccggcgccgccgcauacuacgugggcuaccugcagccacggaccuuccugcugaaguacaacgagaacggcaccaucaccgacgccguggacugcgcccuggacccccugagcgagaccaagugcacccuaaagagcuucaccguggagaagggcaucuaccagaccagcaacuuccgggugcagcccacugagagcaucgugcgguuccccaacauuaccaaccugugucccuucggcgagguguucaacgccacccgguucgccagcguguacgccuggaaccggaagcggaucagcaacugcguggccgacuacagcgugcuguacaacagcgccagcuucagcaccuucaagugcuacggcgugagcccuaccaagcugaacgaccugugcuucaccaacguguacgcugacagcuucgugauccggggcgacgaggugcggcagaucgcccccggccagaccggcaagaucgccgacuacaacuacaagcugcccgacgacuucaccggcugcgugaucgccuggaacagcaacaaccuggacagcaaggugggcggcaacuacaacuaccuguaccggcuguuccguaagagcaaccugaagccauucgagcgggacaucagcaccgagaucuaccaggccggcagcacccccugcaacgguguggagggcuuuaacugcuacuucccccugcagagcuacggcuuccagcccaccaacggcgugggcuaccagcccuaccgggugguggugcugagcuucgagcugcugcacgcccccgccaccgugugcggcccuaaaaagagcaccaaccuggugaagaacaagugcgugaacuucaauuucaacggccugaccggcaccggcgugcugaccgagagcaacaagaaguuccugcccuuccagcaguucggccgggauaucgccgacaccaccgacgcagugcgggacccccagacccuggagauccuggacaucaccccaugcagcuucggcggcgugagcgucaucacccccggcacaaacaccagcaaccagguggccgugcuguaccagggagugaacugcaccgaggugcccguggccauccacgccgaccagcugacccccaccuggcggguguacagcaccggcagcaacguguuccagacccgggccggcugccugaucggcgccgagcacgugaacaacuccuacgagugcgacauccccaucggcgcuggcaucugcgccagcuaccagacccagaccaacagcccccggcgggcccggagcguggccagccagagcgugaucgccuacaccaugagcuuaggcgccgagaacagcguggccuacagcaacaacagcaucgcgaucccuaccaacuucaccaucagcgugaccaccgagauccugcccgugagcaugaccaagaccagcguggacuguaccauguacauaugcggcgacagcaccgagugcagcaaccugcugcugcaguacggcagcuucugcacccagcugaaccgggcccugaccggcaucgccguggagcaggacaagaacacccaagagguguucgcccaggugaagcagaucuacaagacucccccaaucaaggacuucggcggcuucaacuucagccagauccugcccgaccccagcaagcccagcaagcggagcuucaucgaggaccugcuguucaacaaggugacccuggccgacgccggcuucaucaagcaguacggcgacugccugggggauaucgccgcucgggaccugaucugcgcccagaaguucaacggccugaccgugcugcccccucugcugaccgacgagaugaucgcccaguacaccagcgcccugcuugccggcaccaucaccagcggcuggaccuucggcgccggcgcagcccugcagauccccuucgccaugcagauggccuaccgguucaacggcaucggcgugacccagaacgugcuguacgagaaccagaagcugaucgccaaccaguucaacagcgccaucggcaagauccaggacagccugagcagcaccgccagcgcccugggcaagcugcaggacguggugaaccagaacgcucaggcccugaacacccuggugaagcagcugagcagcaacuucggcgccaucagcucagugcugaaugacauccugagcaggcuggaucccccagaggccgaggugcagaucgaccggcugaucaccggccggcugcagagccugcagaccuacgugacccagcagcugauccgggccgccgagauccgggccagcgccaaccuggcagccaccaagaugagcgagugcgugcugggccagagcaagcggguggacuuuugcggcaagggcuaccaccugaugagcuucccccagagcgcuccccacggcgugguguuccuccacgucacauacgugcccgcccaggagaagaacuucaccaccgcccccgccaucugccacgacggcaaggcccacuucccccgggagggaguguucgugagcaacggcacccacugguucgugacccagcggaacuucuacgagccucagauuaucaccaccgacaacaccuucgugagcggcaacugcgacguggugaucggcaucgugaacaacaccguguacgacccccugcagcccgagcuggacagcuucaaggaggagcuggacaaguacuucaagaaccacaccagcccagacguggaccugggcgacaucagcggcaucaacgccagcguggugaacauccagaaggagaucgaccggcugaacgagguggccaagaaccugaacgagagccugaucgaccugcaggagcugggcaaguacgagcaguacaucaaguggcccugguacaucuggcugggcuucaucgccggccugaucgccaucgugauggugaccaucaugcugugcugcaugaccagcugcuguagcugccugaagggcugcugcagcugcggcagcugcugcaaguucgacgaggacgacagcgagcccgugcugaagggcgugaagcugcacuacaccugaugacucgagcugguacugcaugcacgcaaugcuagcugccccuuucccguccuggguaccccgagucucccccgaccucgggucccagguaugcucccaccuccaccugccccacucaccaccucugcuaguuccagacaccucccaagcacgcagcaaugcagcucaaaacgcuuagccuagccacacccccacgggaaacagcagugauuaaccuuuagcaauaaacgaaaguuuaacuaagcuauacuaaccccaggguuggucaauuucgugccagccacacccuggagcuagcaaaaaaaaaaaaaaaaaaaaaaaaaaaaaagcauaugacuaaaaaaaaaaaaaaaaaaaaaaaaaaaaaaaaaaaaaaaaaaaaaaaaaaaaaaaaaaaaaaaaaaaaaa

SEQ ID NO: 26880 - RNA, 4283 nt, Artificial Sequence
  SARS-CoV-2/Wuhan/WIV05/2019__EPI_ISL_402128 spike protein mRNA gc (1-1273)(K986P_V987P_D614G_M1229I)
agaauaaacuaguauucuucugguccccacagacucagagagaacccgccaccauguucguguuccuggugcugcugccccuggugagcagccagugcgugaaccugaccacccggacccagcugcccccugccuacaccaacagcuucacccggggcguguacuaccccgacaagguguuccggagcagcgugcugcacagcacccaggaccuguuccugcccuucuucagcaacgugaccugguuccacgccauccacgugagcggcaccaacggcaccaagcgguucgacaacccagugcugcccuucaacgacggcguguacuucgccagcaccgagaagucaaacaucauccggggcuggaucuucggcaccacccuggacagcaagacacagagccugcugaucgugaacaacgccaccaacguggugaucaaggugugcgaguuucaguucugcaacgaccccuuccugggcguguacuaccacaagaacaacaagagcuggauggagagcgaguuccgggucuacagcagcgcuaacaauugcaccuucgaguacgugagccagcccuuccugauggaccucgagggcaagcagggcaacuucaagaaccugcgggaguucguguucaagaacaucgauggcuacuucaagaucuacagcaagcacacccccaucaaccuggugcgggaccugccccagggauucagcgcccuggagccucugguggaccugcccaucggcaucaacaucaccagguuccagacccugcuggcccugcaccggagcuaccugacccccggcgacagcagcagcggcuggaccgccggcgccgccgcauacuacgugggcuaccugcagccacggaccuuccugcugaaguacaacgagaacggcaccaucaccgacgccguggacugcgcccuggacccccugagcgagaccaagugcacccuaaagagcuucaccguggagaagggcaucuaccagaccagcaacuuccgggugcagcccacugagagcaucgugcgguuccccaacauuaccaaccugugucccuucggcgagguguucaacgccacccgguucgccagcguguacgccuggaaccggaagcggaucagcaacugcguggccgacuacagcgugcuguacaacagcgccagcuucagcaccuucaagugcuacggcgugagcccuaccaagcugaacgaccugugcuucaccaacguguacgcugacagcuucgugauccggggcgacgaggugcggcagaucgcccccggccagaccggcaagaucgccgacuacaacuacaagcugcccgacgacuucaccggcugcgugaucgccuggaacagcaacaaccuggacagcaaggugggcggcaacuacaacuaccuguaccggcuguuccguaagagcaaccugaagccauucgagcgggacaucagcaccgagaucuaccaggccggcagcacccccugcaacgguguggagggcuuuaacugcuacuucccccugcagagcuacggcuuccagcccaccaacggcgugggcuaccagcccuaccgggugguggugcugagcuucgagcugcugcacgcccccgccaccgugugcggcccuaaaaagagcaccaaccuggugaagaacaagugcgugaacuucaauuucaacggccugaccggcaccggcgugcugaccgagagcaacaagaaguuccugcccuuccagcaguucggccgggauaucgccgacaccaccgacgcagugcgggacccccagacccuggagauccuggacaucaccccaugcagcuucggcggcgugagcgucaucacccccggcacaaacaccagcaaccagguggccgugcuguaccagggagugaacugcaccgaggugcccguggccauccacgccgaccagcugacccccaccuggcggguguacagcaccggcagcaacguguuccagacccgggccggcugccugaucggcgccgagcacgugaacaacuccuacgagugcgacauccccaucggcgcuggcaucugcgccagcuaccagacccagaccaacagcccccggcgggcccggagcguggccagccagagcaucaucgccuacaccaugagcuuaggcgccgagaacagcguggccuacagcaacaacagcaucgcgaucccuaccaacuucaccaucagcgugaccaccgagauacugcccgugagcaugaccaagaccagcguggacuguaccauguacaucugcggcgacagcaccgagugcagcaaccugcugcugcaguacggcagcuucugcacccagcugaaccgggcccugaccggcaucgccguggagcaggacaagaacacccaagagguguucgcccaggugaagcagaucuacaagacucccccaaucaaggacuucggcggcuucaacuucagccagauccugcccgaccccagcaagcccagcaagcggagcuucaucgaggaccugcuguucaacaaggugacccuggccgacgccggcuucaucaagcaguacggcgacugccugggggauaucgccgcucgggaccugaucugcgcccagaaguucaacggccugaccgugcugcccccucugcugaccgacgagaugaucgcccaguacaccagcgcccugcuugccggcaccaucaccagcggcuggaccuucggcgccggcgcagcccugcagauccccuucgccaugcagauggccuaccgguucaacggcaucggcgugacccagaacgugcuguacgagaaccagaagcugaucgccaaccaguucaacagcgccaucggcaagauccaggacagccugagcagcaccgccagcgcccugggcaagcugcaggacguggugaaccagaacgcucaggcccugaacacccuggugaagcagcugagcagcaacuucggcgccaucagcucagugcugaaugacauccugagcaggcuggaucccccagaggccgaggugcagaucgaccggcugaucaccggccggcugcagagccugcagaccuacgugacccagcagcugauccgggccgccgagauccgggccagcgccaaccuggcagccaccaagaugagcgagugcgugcugggccagagcaagcggguggacuuuugcggcaagggcuaccaccugaugagcuucccccagagcgcuccccacggcgugguguuccuccacgugacauacguccccgcccaggagaagaacuucaccaccgcccccgccauuugccacgacggcaaggcccacuucccccgggagggaguguucgugagcaacggcacccacugguucgugacccagcggaacuucuacgagccucagaucaucaccaccgacaacaccuucgugagcggcaacugcgacguggugaucggcaucgugaacaacaccguguacgacccccugcagcccgagcuggacagcuucaaggaggagcuggacaaguacuucaagaaccacaccagcccagacguggaccugggcgacaucagcggcaucaacgccagcguggugaacauccagaaggagaucgaccggcugaacgagguggccaagaaccugaacgagagccugaucgaccugcaggagcugggcaaguacgagcaguacaucaaguggcccugguacaucuggcugggcuucaucgccggccugaucgccaucgugaucgugaccaucaugcugugcugcaugaccagcugcuguagcugccugaagggcugcugcagcugcggcagcugcugcaaguucgacgaggacgacagcgagcccgugcugaagggcgugaagcugcacuacaccugaugacucgagcugguacugcaugcacgcaaugcuagcugccccuuucccguccuggguaccccgagucucccccgaccucgggucccagguaugcucccaccuccaccugccccacucaccaccucugcuaguuccagacaccucccaagcacgcagcaaugcagcucaaaacgcuuagccuagccacacccccacgggaaacagcagugauuaaccuuuagcaauaaacgaaaguuuaacuaagcuauacuaaccccaggguuggucaauuucgugccagccacacccuggagcuagcaaaaaaaaaaaaaaaaaaaaaaaaaaaaaagcauaugacuaaaaaaaaaaaaaaaaaaaaaaaaaaaaaaaaaaaaaaaaaaaaaaaaaaaaaaaaaaaaaaaaaaaaaa

SEQ ID NO: 26881 - RNA, 4277 nt, Artificial Sequence
  SARS-CoV-2/Wuhan/WIV05/2019__EPI_ISL_402128 spike protein mRNA gc (1-1273)(K986P_V987P_H69del_V70del_A222V_Y453F_S477N_D614G_I692V)
agaauaaacuaguauucuucugguccccacagacucagagagaacccgccaccauguucguguuccuggugcugcugccccuggugagcagccagugcgugaaccugaccacccggacccagcugcccccugccuacaccaacagcuucacccggggcguguacuaccccgacaagguguuccggagcagcgugcugcacagcacccaggaccuguuccugcccuucuucagcaacgugaccugguuccacgccaucagcggcaccaacggcaccaagcgguucgacaacccagugcugcccuucaacgacggcguguacuucgccagcaccgagaagucaaacaucauccggggcuggaucuucggcaccacccuggacagcaagacacagagccugcugaucgugaacaacgccaccaacguggugaucaaggugugcgaguuucaguucugcaacgaccccuuccugggcguguacuaccacaagaacaacaagagcuggauggagagcgaguuccggguguacagcagcgcuaacaauugcaccuucgaguacgucagccagcccuuccugauggaccucgagggcaagcagggcaacuucaagaaccugcgggaguucguguucaagaacaucgauggcuacuucaagaucuacagcaagcacacccccaucaaccuggugcgggaccugccccagggauucagcgugcuggagccucugguggaccugcccaucggcaucaacaucaccagguuccagacccugcuggcccugcaccggagcuaccugacccccggcgacagcagcagcggcuggaccgccggcgccgccgccuacuacgugggcuaccugcagccacggaccuuccugcugaaguacaacgagaacggcaccaucaccgacgcaguggacugcgcccuggacccccugagcgagaccaagugcacccuaaagagcuucaccguggagaagggcaucuaccagaccagcaacuuccgggugcagcccacugagagcaucgugcgguuccccaacauuaccaaccugugucccuucggcgagguguucaacgccacccgguucgccagcguguacgccuggaaccggaagcggaucagcaacugcguggccgacuacagcgugcuguacaacagcgccagcuucagcaccuucaagugcuacggcgugagcccuaccaagcugaacgaccugugcuucaccaacguguacgccgacagcuucgugauccggggcgacgaggugcggcagaucgcucccggccagaccggcaagaucgccgacuacaacuacaagcugcccgacgacuucaccggcugcgugaucgccuggaacagcaacaaccuggacagcaaggugggcggcaacuacaacuaccuguuccggcuguuccguaagagcaaccugaagccauuugagcgggacaucagcaccgagaucuaccaggccggcaacacccccugcaacgguguggagggcuucaacugcuacuucccccugcagagcuacggcuuccagcccaccaacggcgugggcuaccagcccuaccgggugguggugcugagcuucgagcugcugcacgcccccgccaccgugugcggcccuaaaaagagcaccaaccuggugaagaacaagugcgugaauuucaacuucaacggccugaccggcaccggcgugcugaccgagagcaacaagaaguuccugcccuuccagcaguucggccgggauaucgccgacaccaccgacgccgugcgggacccccagacccuggagauccuggacaucaccccaugcagcuucggcggcgugagcgucaucacccccggcacaaacaccagcaaccagguggcagugcuguaccagggagugaacugcaccgaggugcccguggccauccacgccgaccagcugacccccaccuggcggguguacagcaccggcagcaacguguuccagacccgggccggcugccugaucggcgccgagcacgugaacaacagcuacgagugcgacauccccaucggcgccggcaucugcgcuuccuaccagacccagaccaacagcccccggcgggcccggagcguggccagccagagcgugaucgccuacaccaugagcuuaggcgccgagaacagcguggccuacagcaacaacagcaucgccaucccuaccaacuucaccaucagcgugaccaccgagauccugcccgugagcaugaccaagaccagcguggacuguaccauguacauaugcggcgacagcaccgagugcagcaaccugcugcugcaguacggcagcuucugcacccagcugaaccgggcgcugaccggcaucgccguggagcaggacaagaacacccaagagguguucgcccaggugaagcagaucuacaagacucccccaaucaaggacuucggcggcuucaacuucagccagauccugcccgaccccagcaagcccagcaagcggagcuucaucgaggaccugcuguucaacaaggugacccuggccgacgccggcuucaucaagcaguacggcgacugccugggggauaucgccgcccgggaccugaucugcgcucagaaguucaacggccugaccgugcugcccccucugcugaccgacgagaugaucgcccaguacaccagcgcccugcuugccggcaccaucaccagcggcuggaccuucggcgccggcgccgcacugcagauccccuucgccaugcagauggccuaccgguucaacggcaucggcgugacccagaacgugcuguacgagaaccagaagcugaucgccaaccaguucaacagcgccaucggcaagauccaggacagccugagcagcaccgccagcgcccugggcaagcugcaggacguggugaaccagaacgcccaggcucugaacacccuggugaagcagcugagcagcaauuuuggcgccaucagcagcgugcugaacgacauccugucaaggcuggaucccccagaggccgaggugcagaucgaccggcugaucaccggccggcugcagagccugcagaccuacgugacccagcagcugauccgggccgccgagauccgggccagcgccaaccuggccgcaaccaagaugagcgagugcgugcugggccagagcaagcggguggacuucugcggcaagggcuaccaccugaugagcuucccccagagcgcuccccacggcgugguguuccuccacgucacauacgugcccgcccaggagaagaacuucaccaccgcccccgccaucugccacgacggcaaggcccacuucccccgggagggaguguucgugagcaacggcacccacugguucgugacccagcggaacuucuacgagccucagauuaucaccaccgacaacaccuucgugagcggcaacugcgacguggugaucggcaucgugaacaacaccguguacgacccccugcagcccgagcuggacagcuucaaggaggagcuggacaaguacuucaagaaccacaccagcccagacguggaccugggcgacaucagcggcaucaacgccagcguggugaacauccagaaggagaucgaccggcugaacgagguggccaagaaccugaacgagagccugaucgaccugcaggagcugggcaaguacgagcaguacaucaaguggcccugguacaucuggcugggcuucaucgccggccugaucgccaucgugauggugaccaucaugcugugcugcaugaccagcugcuguagcugccugaagggcugcugcagcugcggcagcugcugcaaguucgacgaggacgacagcgagcccgugcugaagggcgugaagcugcacuacaccugaugacucgagcugguacugcaugcacgcaaugcuagcugccccuuucccguccuggguaccccgagucucccccgaccucgggucccagguaugcucccaccuccaccugccccacucaccaccucugcuaguuccagacaccucccaagcacgcagcaaugcagcucaaaacgcuuagccuagccacacccccacgggaaacagcagugauuaaccuuuagcaauaaacgaaaguuuaacuaagcuauacuaaccccaggguuggucaauuucgugccagccacacccuggagcuagcaaaaaaaaaaaaaaaaaaaaaaaaaaaaaagcauaugacuaaaaaaaaaaaaaaaaaaaaaaaaaaaaaaaaaaaaaaaaaaaaaaaaaaaaaaaaaaaaaaaaaaaaaa

SEQ ID NO: 26882 - RNA, 4277 nt, Artificial Sequence
  SARS-CoV-2/Wuhan/WIV05/2019__EPI_ISL_402128 spike protein mRNA gc (1-1273)(K986P_V987P_H69del_V70del_Y453F_D614G_I692V_M1229I)
agaauaaacuaguauucuucugguccccacagacucagagagaacccgccaccauguucguguuccuggugcugcugccccuggugagcagccagugcgugaaccugaccacccggacccagcugcccccugccuacaccaacagcuucacccggggcguguacuaccccgacaagguguuccggagcagcgugcugcacagcacccaggaccuguuccugcccuucuucagcaacgugaccugguuccacgccaucagcggcaccaacggcaccaagcgguucgacaacccagugcugcccuucaacgacggcguguacuucgccagcaccgagaagucaaacaucauccggggcuggaucuucggcaccacccuggacagcaagacacagagccugcugaucgugaacaacgccaccaacguggugaucaaggugugcgaguuucaguucugcaacgaccccuuccugggcguguacuaccacaagaacaacaagagcuggauggagagcgaguuccggguguacagcagcgcuaacaauugcaccuucgaguacgucagccagcccuuccugauggaccucgagggcaagcagggcaacuucaagaaccugcgggaguucguguucaagaacaucgauggcuacuucaagaucuacagcaagcacacccccaucaaccuggugcgggaccugccccagggauucagcgcccuggagccucugguggaccugcccaucggcaucaacaucaccagguuccagacccugcuggcccugcaccggagcuaccugacccccggcgacagcagcagcggcuggaccgccggcgccgccgcauacuacgugggcuaccugcagccacggaccuuccugcugaaguacaacgagaacggcaccaucaccgacgccguggacugcgcccuggacccccugagcgagaccaagugcacccuaaagagcuucaccguggagaagggcaucuaccagaccagcaacuuccgggugcagcccacugagagcaucgugcgguuccccaacauuaccaaccugugucccuucggcgagguguucaacgccacccgguucgccagcguguacgccuggaaccggaagcggaucagcaacugcguggccgacuacagcgugcuguacaacagcgccagcuucagcaccuucaagugcuacggcgugagcccuaccaagcugaacgaccugugcuucaccaacguguacgcugacagcuucgugauccggggcgacgaggugcggcagaucgcccccggccagaccggcaagaucgccgacuacaacuacaagcugcccgacgacuucaccggcugcgugaucgccuggaacagcaacaaccuggacagcaaggugggcggcaacuacaacuaccuguuccggcuguuccguaagagcaaccugaagccauuugagcgggacaucagcaccgagaucuaccaggccggcagcacccccugcaacgguguggagggcuucaacugcuacuucccccugcagagcuacggcuuccagcccaccaacggcgugggcuaccagcccuaccgggugguggugcugagcuucgagcugcugcacgcccccgccaccgugugcggcccuaaaaagagcaccaaccuggugaagaacaagugcgugaacuucaauuucaacggccugaccggcaccggcgugcugaccgagagcaacaagaaguuccugcccuuccagcaguucggccgggauaucgccgacaccaccgacgcagugcgggacccccagacccuggagauccuggacaucaccccaugcagcuucggcggcgugagcgugaucacccccggcacaaacaccagcaaccaggucgccgugcuguaccagggagugaacugcaccgaggugcccguggccauccacgccgaccagcugacccccaccuggcggguguacagcaccggcagcaacguguuccagacccgggccggcugccugaucggcgccgagcacgugaacaacuccuacgagugcgacauccccaucggcgcuggcaucugcgccagcuaccagacccagaccaacagcccccggcgggcccggagcguggccagccagagcgugaucgccuacaccaugagcuuaggcgccgagaacagcguggccuacagcaacaacagcaucgcgaucccuaccaacuucaccaucagcgugaccaccgagauccugcccgugagcaugaccaagaccagcguggacuguaccauguacauaugcggcgacagcaccgagugcagcaaccugcugcugcaguacggcagcuucugcacccagcugaaccgggcccugaccggcaucgccguggagcaggacaagaacacccaagagguguucgcccaggugaagcagaucuacaagacucccccaaucaaggacuucggcggcuucaacuucagccagauccugcccgaccccagcaagcccagcaagcggagcuucaucgaggaccugcuguucaacaaggugacccuggccgacgccggcuucaucaagcaguacggcgacugccugggggauaucgccgcucgggaccugaucugcgcccagaaguucaacggccugaccgugcugcccccucugcugaccgacgagaugaucgcccaguacaccagcgcccugcuugccggcaccaucaccagcggcuggaccuucggcgccggcgcagcccugcagauccccuucgccaugcagauggccuaccgguucaacggcaucggcgugacccagaacgugcuguacgagaaccagaagcugaucgccaaccaguucaacagcgccaucggcaagauccaggacagccugagcagcaccgccagcgcccugggcaagcugcaggacguggugaaccagaacgcucaggcccugaacacccuggugaagcagcugagcagcaacuuuggcgccaucagcucagugcugaaugacauccugagcaggcuggaucccccagaggccgaggugcagaucgaccggcugaucaccggccggcugcagagccugcagaccuacgugacccagcagcugauccgggccgccgagauccgggccagcgccaaccuggcagccaccaagaugagcgagugcgugcugggccagagcaagcggguggacuucugcggcaagggcuaccaccugaugagcuucccccagagcgcuccccacggcgugguguuccuccacgugacauacguccccgcccaggagaagaacuucaccaccgcccccgccaucugccacgacggcaaggcccacuucccccgggagggaguguucgugagcaacggcacccacugguucgugacccagcggaacuucuacgagccucagauuaucaccaccgacaacaccuucgugagcggcaacugcgacguggugaucggcaucgugaacaacaccguguacgacccccugcagcccgagcuggacagcuucaaggaggagcuggacaaguacuucaagaaccacaccagcccagacguggaccugggcgacaucagcggcaucaacgccagcguggugaacauccagaaggagaucgaccggcugaacgagguggccaagaaccugaacgagagccugaucgaccugcaggagcugggcaaguacgagcaguacaucaaguggcccugguacaucuggcugggcuucaucgccggccugaucgccaucgugaucgugaccaucaugcugugcugcaugaccagcugcuguagcugccugaagggcugcugcagcugcggcagcugcugcaaguucgacgaggacgacagcgagcccgugcugaagggcgugaagcugcacuacaccugaugacucgagcugguacugcaugcacgcaaugcuagcugccccuuucccguccuggguaccccgagucucccccgaccucgggucccagguaugcucccaccuccaccugccccacucaccaccucugcuaguuccagacaccucccaagcacgcagcaaugcagcucaaaacgcuuagccuagccacacccccacgggaaacagcagugauuaaccuuuagcaauaaacgaaaguuuaacuaagcuauacuaaccccaggguuggucaauuucgugccagccacacccuggagcuagcaaaaaaaaaaaaaaaaaaaaaaaaaaaaaagcauaugacuaaaaaaaaaaaaaaaaaaaaaaaaaaaaaaaaaaaaaaaaaaaaaaaaaaaaaaaaaaaaaaaaaaaaaa

SEQ ID NO: 26883 - RNA, 4274 nt, Artificial Sequence
  SARS-CoV-2/Wuhan/WIV05/2019__EPI_ISL_402128 spike protein mRNA gc (1-1273)(K986P_V987P_K986P_V987P_H69del_V70del_Y144del_N501Y_A570 D_D614G_P681H_T716I_S982A_D1118H)
agaauaaacuaguauucuucugguccccacagacucagagagaacccgccaccauguucguguuccuggugcugcugccccuggugagcagccagugcgugaaccugaccacccggacccagcugcccccugccuacaccaacagcuucacccggggcguguacuaccccgacaagguguuccggagcagcgugcugcacagcacccaggaccuguuccugcccuucuucagcaacgugaccugguuccacgccaucagcggcaccaacggcaccaagcgguucgacaacccagugcugcccuucaacgacggcguguacuucgccagcaccgagaagucaaacaucauccggggcuggaucuucggcaccacccuggacagcaagacacagagccugcugaucgugaacaacgccaccaacguggugaucaaggugugcgaguuucaguucugcaacgaccccuuccugggcguguaccacaagaacaacaagagcuggauggagagcgaguuccggguguacagcagcgcuaacaauugcaccuucgaguacgucagccagcccuuccugauggaccucgagggcaagcagggcaacuucaagaaccugcgggaguucguguucaagaacaucgauggcuacuucaagaucuacagcaagcacacccccaucaaccuggugcgggaccugccccagggauucagcgcccuggagccucugguggaccugcccaucggcaucaacaucaccagguuccagacccugcuggcccugcaccggagcuaccugacccccggcgacagcagcagcggcuggaccgccggcgccgccgcauacuacgugggcuaccugcagccacggaccuuccugcugaaguacaacgagaacggcaccaucaccgacgccguggacugcgcccuggacccccugagcgagaccaagugcacccuaaagagcuucaccguggagaagggcaucuaccagaccagcaacuuccgggugcagcccacugagagcaucgugcgguuccccaacauuaccaaccugugucccuucggcgagguguucaacgccacccgguucgccagcguguacgccuggaaccggaagcggaucagcaacugcguggccgacuacagcgugcuguacaacagcgccagcuucagcaccuucaagugcuacggcgugagcccuaccaagcugaacgaccugugcuucaccaacguguacgcugacagcuucgugauccggggcgacgaggugcggcagaucgcccccggccagaccggcaagaucgccgacuacaacuacaagcugcccgacgacuucaccggcugcgugaucgccuggaacagcaacaaccuggacagcaaggugggcggcaacuacaacuaccuguaccggcuguuccguaagagcaaccugaagccauucgagcgggacaucagcaccgagaucuaccaggccggcagcacccccugcaacgguguggagggcuuuaacugcuacuucccccugcagagcuacggcuuccagcccaccuacggcgugggcuaccagcccuaccgggugguggugcugagcuucgagcugcugcacgcccccgccaccgugugcggcccuaaaaagagcaccaaccuggugaagaacaagugcgugaacuucaacuucaauggccugaccggcaccggcgugcugaccgagagcaacaagaaguuccugcccuuccagcaguucggccgggauaucgacgacaccaccgacgccgugcgggacccccagacccuggagauccuggacaucaccccaugcagcuucggcggcgugagcgugaucacccccggcacaaacaccagcaaccaggucgcagugcuguaccagggagugaacugcaccgaggugcccguggccauccacgccgaccagcugacccccaccuggcggguguacagcaccggcagcaacguguuccagacccgggccggcugccugaucggcgccgagcacgugaacaacuccuacgagugcgacauccccaucggcgccggcaucugcgcuagcuaccagacccagaccaacagccaccggcgggcccggagcguggccagccagagcaucaucgccuacaccaugagcuuaggcgccgagaacagcguggccuacagcaacaacagcaucgccauccccaucaacuucaccauaagcgugaccaccgagauccugccugugagcaugaccaagaccagcguggacuguaccauguacaucugcggcgacagcaccgagugcagcaaccugcugcugcaguacggcagcuucugcacccagcugaaccgggcgcugaccggcaucgccguggagcaggacaagaacacccaagagguguucgcccaggugaagcagaucuacaagaccccacccaucaaggacuucggcggcuucaacuucagccagauccugcccgaccccagcaagcccagcaagcggagcuucaucgaggaccugcuguucaacaaggugacucuggccgacgccggcuucaucaagcaguacggcgauugccugggggacaucgccgcccgggaccugaucugcgcucagaaguucaacggccugaccgugcugccuccccugcugaccgacgagaugaucgcccaguacaccagcgcccugcuugccggcaccaucaccagcggcuggaccuucggcgccggcgccgcacugcagauccccuucgccaugcagauggccuaccgguucaacggcaucggcgugacccagaacgugcuguacgagaaccagaagcugaucgccaaccaguucaacagcgccaucggcaagauccaggacagccugagcagcaccgccagcgcccugggcaagcugcaggacguggugaaccagaacgcccaggcucugaacacccuggugaagcagcugagcagcaacuucggcgccaucagcucagugcugaacgacauccuggccaggcuggacccacccgaggccgaggugcagaucgaccggcugaucaccggccggcugcagagccugcagaccuacgugacccagcagcugauccgggccgccgagauucgggccagcgccaaucuggcagccaccaagaugagcgagugcgugcugggccagagcaagcggguggacuuuugcggcaagggcuaccaccugaugagcuucccccagagcgcuccccacggcgugguguuccuccacgugaccuacgugcccgcccaggagaagaacuucacaaccgcccccgccaucugccacgacggcaaggcccacuucccccgggagggagucuucgugagcaacggcacccacugguucgugacccagcggaacuucuacgagccccagaucaucaccacccacaacaccuucgugagcggcaacugcgacguggugaucggcaucgugaacaacaccguguacgacccucugcagcccgagcuggacagcuucaaggaggagcuggacaaguacuucaagaaccacaccagccccgacguggaucugggcgacaucagcggcaucaacgccagcguggugaacauccagaaggagaucgaccggcugaacgagguggccaagaaccugaacgagagccugaucgaccugcaggagcugggcaaguacgagcaguacaucaaguggccaugguacaucuggcugggcuucaucgccggccugaucgccaucgugauggugaccaucaugcugugcugcaugaccagcugcuguagcugccugaagggcugcugcagcugcggcagcugcugcaaguucgacgaggacgacagcgagcccgugcugaagggcgugaagcugcacuacaccugaugacucgagcugguacugcaugcacgcaaugcuagcugccccuuucccguccuggguaccccgagucucccccgaccucgggucccagguaugcucccaccuccaccugccccacucaccaccucugcuaguuccagacaccucccaagcacgcagcaaugcagcucaaaacgcuuagccuagccacacccccacgggaaacagcagugauuaaccuuuagcaauaaacgaaaguuuaacuaagcuauacuaaccccaggguuggucaauuucgugccagccacacccuggagcuagcaaaaaaaaaaaaaaaaaaaaaaaaaaaaaagcauaugacuaaaaaaaaaaaaaaaaaaaaaaaaaaaaaaaaaaaaaaaaaaaaaaaaaaaaaaaaaaaaaaaaaaaaaa

SEQ ID NO: 26884 - RNA, 4283 nt, Artificial Sequence
  SARS-CoV-2/Wuhan/WIV05/2019__EPI_ISL_402128 spike protein mRNA gc (1-1273)(K986P_V987P_K986P_V987P_K417N_E484K_N501Y_D614G)
agaauaaacuaguauucuucugguccccacagacucagagagaacccgccaccauguucguguuccuggugcugcugccccuggugagcagccagugcgugaaccugaccacccggacccagcugcccccugccuacaccaacagcuucacccggggcguguacuaccccgacaagguguuccggagcagcgugcugcacagcacccaggaccuguuccugcccuucuucagcaacgugaccugguuccacgccauccacgugagcggcaccaacggcaccaagcgguucgacaacccagugcugcccuucaacgacggcguguacuucgccagcaccgagaagucaaacaucauccggggcuggaucuucggcaccacccuggacagcaagacacagagccugcugaucgugaacaacgccaccaacguggugaucaaggugugcgaguuucaguucugcaacgaccccuuccugggcguguacuaccacaagaacaacaagagcuggauggagagcgaguuccgggucuacagcagcgcuaacaauugcaccuucgaguacgugagccagcccuuccugauggaccucgagggcaagcagggcaacuucaagaaccugcgggaguucguguucaagaacaucgauggcuacuucaagaucuacagcaagcacacccccaucaaccuggugcgggaccugccccagggauucagcgcccuggagccucugguggaccugcccaucggcaucaacaucaccagguuccagacccugcuggcccugcaccggagcuaccugacccccggcgacagcagcagcggcuggaccgccggcgccgccgcauacuacgugggcuaccugcagccacggaccuuccugcugaaguacaacgagaacggcaccaucaccgacgccguggacugcgcccuggacccccugagcgagaccaagugcacccuaaagagcuucaccguggagaagggcaucuaccagaccagcaacuuccgggugcagcccacugagagcaucgugcgguuccccaacauuaccaaccugugucccuucggcgagguguucaacgccacccgguucgccagcguguacgccuggaaccggaagcggaucagcaacugcguggccgacuacagcgugcuguacaacagcgccagcuucagcaccuucaagugcuacggcgugagcccuaccaagcugaacgaccugugcuucaccaacguguacgcugacagcuucgugauccggggcgacgaggugcggcagaucgcccccggccagaccggcaacaucgccgacuacaacuacaagcugcccgacgacuucaccggcugcgugaucgccuggaacagcaacaaccuggacagcaaggugggcggcaacuacaacuaccuguaccggcuguuccguaagagcaaccugaagccauucgagcgggacaucagcaccgagaucuaccaggccggcagcacccccugcaacggugugaagggcuuuaacugcuacuucccccugcagagcuacggcuuccagcccaccuacggcgugggcuaccagcccuaccgggugguggugcugagcuucgagcugcugcacgcccccgccaccgugugcggcccuaaaaagagcaccaaccuggugaagaacaagugcgugaacuucaauuucaacggccugaccggcaccggcgugcugaccgagagcaacaagaaguuccugcccuuccagcaguucggccgggauaucgccgacaccaccgacgcagugcgggacccccagacccuggagauccuggacaucaccccaugcagcuucggcggcgugagcgucaucacccccggcacaaacaccagcaaccagguggccgugcuguaccagggagugaacugcaccgaggugcccguggccauccacgccgaccagcugacccccaccuggcggguguacagcaccggcagcaacguguuccagacccgggccggcugccugaucggcgccgagcacgugaacaacuccuacgagugcgacauccccaucggcgcuggcaucugcgccagcuaccagacccagaccaacagcccccggcgggcccggagcguggccagccagagcaucaucgccuacaccaugagcuuaggcgccgagaacagcguggccuacagcaacaacagcaucgcgaucccuaccaacuucaccaucagcgugaccaccgagauacugcccgugagcaugaccaagaccagcguggacuguaccauguacaucugcggcgacagcaccgagugcagcaaccugcugcugcaguacggcagcuucugcacccagcugaaccgggcccugaccggcaucgccguggagcaggacaagaacacccaagagguguucgcccaggugaagcagaucuacaagacucccccaaucaaggacuucggcggcuucaacuucagccagauccugcccgaccccagcaagcccagcaagcggagcuucaucgaggaccugcuguucaacaaggugacccuggccgacgccggcuucaucaagcaguacggcgacugccugggggauaucgccgcucgggaccugaucugcgcccagaaguucaacggccugaccgugcugcccccucugcugaccgacgagaugaucgcccaguacaccagcgcccugcuugccggcaccaucaccagcggcuggaccuucggcgccggcgcagcccugcagauccccuucgccaugcagauggccuaccgguucaacggcaucggcgugacccagaacgugcuguacgagaaccagaagcugaucgccaaccaguucaacagcgccaucggcaagauccaggacagccugagcagcaccgccagcgcccugggcaagcugcaggacguggugaaccagaacgcucaggcccugaacacccuggugaagcagcugagcagcaacuucggcgccaucagcucagugcugaaugacauccugagcaggcuggaucccccagaggccgaggugcagaucgaccggcugaucaccggccggcugcagagccugcagaccuacgugacccagcagcugauccgggccgccgagauccgggccagcgccaaccuggcagccaccaagaugagcgagugcgugcugggccagagcaagcggguggacuuuugcggcaagggcuaccaccugaugagcuucccccagagcgcuccccacggcgugguguuccuccacgugacauacguccccgcccaggagaagaacuucaccaccgcccccgccauuugccacgacggcaaggcccacuucccccgggagggaguguucgugagcaacggcacccacugguucgugacccagcggaacuucuacgagccucagaucaucaccaccgacaacaccuucgugagcggcaacugcgacguggugaucggcaucgugaacaacaccguguacgacccccugcagcccgagcuggacagcuucaaggaggagcuggacaaguacuucaagaaccacaccagcccagacguggaccugggcgacaucagcggcaucaacgccagcguggugaacauccagaaggagaucgaccggcugaacgagguggccaagaaccugaacgagagccugaucgaccugcaggagcugggcaaguacgagcaguacaucaaguggcccugguacaucuggcugggcuucaucgccggccugaucgccaucgugauggugaccaucaugcugugcugcaugaccagcugcuguagcugccugaagggcugcugcagcugcggcagcugcugcaaguucgacgaggacgacagcgagcccgugcugaagggcgugaagcugcacuacaccugaugacucgagcugguacugcaugcacgcaaugcuagcugccccuuucccguccuggguaccccgagucucccccgaccucgggucccagguaugcucccaccuccaccugccccacucaccaccucugcuaguuccagacaccucccaagcacgcagcaaugcagcucaaaacgcuuagccuagccacacccccacgggaaacagcagugauuaaccuuuagcaauaaacgaaaguuuaacuaagcuauacuaaccccaggguuggucaauuucgugccagccacacccuggagcuagcaaaaaaaaaaaaaaaaaaaaaaaaaaaaaagcauaugacuaaaaaaaaaaaaaaaaaaaaaaaaaaaaaaaaaaaaaaaaaaaaaaaaaaaaaaaaaaaaaaaaaaaaaa

SEQ ID NO: 26885 - RNA, 4274 nt, Artificial Sequence
  SARS-CoV-2/Wuhan/WIV05/2019__EPI_ISL_402128 spike protein mRNA gc (1-1273)(K986P_V987P_K986P_V987P_L18F_D80A_D215G_L242del_A243del_ L244del_R246I_K417N_E484K_N501Y_D614G_A701V)
agaauaaacuaguauucuucugguccccacagacucagagagaacccgccaccauguucguguuccuggugcugcugccccuggugagcagccagugcgugaacuucaccacccggacccagcugcccccugccuacaccaacagcuucacccggggcguguacuaccccgacaagguguuccggagcagcgugcugcacagcacccaggaccuguuccugcccuucuucagcaacgugaccugguuccacgccauccacgugagcggcaccaacggcaccaagcgguucgccaacccagugcugcccuucaacgacggcguguacuucgccagcaccgagaagucaaacaucauccggggcuggaucuuuggcaccacccuggacagcaagacacagagccugcugaucgugaacaacgcuaccaacguggugaucaaggugugcgaguuccaguucugcaacgaccccuuccugggcguguacuaccacaagaacaacaagagcuggauggagagcgaguuccgggucuacagcagcgccaacaauugcaccuucgaguacgugagccagcccuuccugauggaccuggagggcaagcagggcaacuucaagaaccuccgggaguucguguucaagaacaucgacggcuacuucaagaucuacagcaagcacacccccaucaaccuggugcggggacugccccagggcuucagcgcccuggagccucugguggaucugcccaucggcaucaacaucaccagguuccagacccugcacaucagcuaccugacccccggcgacagcagcagcggcuggaccgccggcgccgccgcauacuacgugggcuaccugcagccacggaccuuccugcugaaguacaacgagaacggcaccaucaccgacgccguggacugcgcccuggacccccugagcgagaccaagugcacccuuaagagcuucaccguggagaagggcaucuaccagaccagcaacuuccgggugcagcccacugagagcauugugcgguuccccaacaucaccaaccugugucccuucggcgagguguucaacgccacccgguucgccagcguguacgccuggaaccggaagcggaucagcaacugcguggccgacuacagcgugcuguacaacagcgccagcuucagcaccuucaagugcuacggcgugagcccuaccaagcugaacgaccugugcuucaccaacguguacgcugacagcuucgugauccggggcgacgaggugcggcagaucgcccccggccagaccggcaacaucgccgacuacaacuacaagcugcccgacgacuucaccggcugcgugaucgccuggaacagcaacaaccuggacagcaaggugggcggcaacuacaacuaccuguaccggcuauuccguaagagcaaccugaagccauuugagcgggacaucagcaccgagaucuaccaggccgguagcacccccugcaacggcgugaagggcuucaacugcuacuucccccugcagagcuacggcuuccagcccaccuacggcgugggcuaccagcccuaccgggugguggugcugagcuucgagcugcugcacgcccccgccaccgugugcggcccuaaaaagagcaccaaccuggugaagaacaagugcgugaacuucaauuucaacggccugaccggcaccggcgugcugaccgagagcaacaagaaguuccugcccuuccagcaguucggccgggacaucgccgacaccaccgaugcagugcgggacccccagacccuggagauccuggacaucaccccaugcagcuucggcggcgugagcgucaucacccccggaacaaacaccagcaaccagguggccgugcuguaccagggcgugaacugcaccgaggugcccguggccauccacgccgaccagcugacccccaccuggcggguguacagcaccggcagcaacguguuccagacccgggccggcugccugaucggcgccgagcacgugaacaacuccuacgagugcgacauccccaucggcgcuggcaucugcgccagcuaccagacccagaccaacagcccccggcgggcccggagcguggccagccagagcaucaucgccuacaccaugagccugggcguggagaacagcguggccuacagcaacaacagcaucgccaucccuaccaacuucaccauaagcgugaccaccgagauccugcccgugagcaugaccaagaccagcguggacuguaccauguacaucugcggcgacagcaccgagugcagcaaccuguuacugcaguacggcagcuucugcacccagcugaaccgggcgcugaccggcaucgccguggagcaggacaagaacacccaagagguguucgcccaggugaagcagaucuacaagacucccccaaucaaggacuucggcggcuucaacuucagccagauccugcccgaccccagcaagcccagcaagcggagcuucaucgaggaccugcuguucaacaaggugacccuggccgacgccggcuucaucaagcaguacggggacugccugggcgacaucgccgcccgggaccugaucugcgcucagaaguucaacggccugaccgugcugcccccucugcugaccgaugagaugaucgcccaguacaccagcgcccugcuggccggcaccaucaccagcggcuggaccuucggcgccggcgccgcacugcagauccccuucgccaugcagauggccuaccgguucaacggcaucggcgugacccagaacgugcuguacgagaaccagaagcugaucgccaaccaguucaacagcgccaucggcaagauccaggacagccugagcagcaccgccagcgcccugggcaagcugcaggacguggugaaccagaacgcccaggcucugaacacccuggugaagcagcugagcagcaacuuuggcgccaucagcucagugcugaaugacauccugagccggcuggaucccccagaggccgaggugcagaucgacaggcugaucaccggccggcugcagagccugcagaccuacgugacccagcagcugauccgggccgccgagauucgggccagcgccaaccuggccgcaaccaagaugagcgagugcgugcugggccagagcaagcggguggacuucugcggcaagggcuaccaccugaugagcuucccccagagcgcuccccacggcgugguguuccugcacgucacauacgugcccgcccaggagaagaacuucaccaccgcccccgccaucugccacgacggaaaggcccacuucccccgggagggcguguucgugagcaacggcacccacugguucgugacccagcggaacuucuacgagccucagaucaucaccaccgacaacaccuucgugagcggcaacugcgacguggugaucggcaucgugaacaacaccguguacgacccccugcagcccgagcuggacagcuucaaggaggagcucgacaaguacuucaagaaccacaccagcccagacguggaccugggcgacaucagcggcaucaacgccagcguggugaacauccagaaggagaucgaccggcugaacgagguggccaagaaccugaacgagagccugaucgaccugcaggagcugggcaaguacgagcaguacaucaaguggcccugguacaucuggcugggcuucaucgccggccugaucgccaucgugauggugaccaucaugcugugcugcaugaccagcugcuguagcugccugaagggcugcugcagcugcggcagcugcugcaaguucgacgaggacgacagcgagcccgugcugaagggcgugaagcugcacuacaccugaugacucgagcugguacugcaugcacgcaaugcuagcugccccuuucccguccuggguaccccgagucucccccgaccucgggucccagguaugcucccaccuccaccugccccacucaccaccucugcuaguuccagacaccucccaagcacgcagcaaugcagcucaaaacgcuuagccuagccacacccccacgggaaacagcagugauuaaccuuuagcaauaaacgaaaguuuaacuaagcuauacuaaccccaggguuggucaauuucgugccagccacacccuggagcuagcaaaaaaaaaaaaaaaaaaaaaaaaaaaaaagcauaugacuaaaaaaaaaaaaaaaaaaaaaaaaaaaaaaaaaaaaaaaaaaaaaaaaaaaaaaaaaaaaaaaaaaaaaa

SEQ ID NO: 26886 - RNA, 4283 nt, Artificial Sequence
  SARS-CoV-2/Wuhan/WIV05/2019__EPI_ISL_402128 spike protein mRNA gc (1-1273)(K986P_V987P_K986P_V987P_E484K_D614G)
agaauaaacuaguauucuucugguccccacagacucagagagaacccgccaccauguucguguuccuggugcugcugccccuggugagcagccagugcgugaaccugaccacccggacccagcugcccccugccuacaccaacagcuucacccggggcguguacuaccccgacaagguguuccggagcagcgugcugcacagcacccaggaccuguuccugcccuucuucagcaacgugaccugguuccacgccauccacgugagcggcaccaacggcaccaagcgguucgacaacccagugcugcccuucaacgacggcguguacuucgccagcaccgagaagucaaacaucauccggggcuggaucuucggcaccacccuggacagcaagacacagagccugcugaucgugaacaacgccaccaacguggugaucaaggugugcgaguuucaguucugcaacgaccccuuccugggcguguacuaccacaagaacaacaagagcuggauggagagcgaguuccgggucuacagcagcgcuaacaauugcaccuucgaguacgugagccagcccuuccugauggaccucgagggcaagcagggcaacuucaagaaccugcgggaguucguguucaagaacaucgauggcuacuucaagaucuacagcaagcacacccccaucaaccuggugcgggaccugccccagggauucagcgcccuggagccucugguggaccugcccaucggcaucaacaucaccagguuccagacccugcuggcccugcaccggagcuaccugacccccggcgacagcagcagcggcuggaccgccggcgccgccgcauacuacgugggcuaccugcagccacggaccuuccugcugaaguacaacgagaacggcaccaucaccgacgccguggacugcgcccuggacccccugagcgagaccaagugcacccuaaagagcuucaccguggagaagggcaucuaccagaccagcaacuuccgggugcagcccacugagagcaucgugcgguuccccaacauuaccaaccugugucccuucggcgagguguucaacgccacccgguucgccagcguguacgccuggaaccggaagcggaucagcaacugcguggccgacuacagcgugcuguacaacagcgccagcuucagcaccuucaagugcuacggcgugagcccuaccaagcugaacgaccugugcuucaccaacguguacgcugacagcuucgugauccggggcgacgaggugcggcagaucgcccccggccagaccggcaagaucgccgacuacaacuacaagcugcccgacgacuucaccggcugcgugaucgccuggaacagcaacaaccuggacagcaaggugggcggcaacuacaacuaccuguaccggcuguuccguaagagcaaccugaagccauucgagcgggacaucagcaccgagaucuaccaggccggcagcacccccugcaacggugugaagggcuuuaacugcuacuucccccugcagagcuacggcuuccagcccaccaacggcgugggcuaccagcccuaccgggugguggugcugagcuucgagcugcugcacgcccccgccaccgugugcggcccuaaaaagagcaccaaccuggugaagaacaagugcgugaacuucaauuucaacggccugaccggcaccggcgugcugaccgagagcaacaagaaguuccugcccuuccagcaguucggccgggauaucgccgacaccaccgacgcagugcgggacccccagacccuggagauccuggacaucaccccaugcagcuucggcggcgugagcgucaucacccccggcacaaacaccagcaaccagguggccgugcuguaccagggagugaacugcaccgaggugcccguggccauccacgccgaccagcugacccccaccuggcggguguacagcaccggcagcaacguguuccagacccgggccggcugccugaucggcgccgagcacgugaacaacuccuacgagugcgacauccccaucggcgcuggcaucugcgccagcuaccagacccagaccaacagcccccggcgggcccggagcguggccagccagagcaucaucgccuacaccaugagcuuaggcgccgagaacagcguggccuacagcaacaacagcaucgcgaucccuaccaacuucaccaucagcgugaccaccgagauacugcccgugagcaugaccaagaccagcguggacuguaccauguacaucugcggcgacagcaccgagugcagcaaccugcugcugcaguacggcagcuucugcacccagcugaaccgggcccugaccggcaucgccguggagcaggacaagaacacccaagagguguucgcccaggugaagcagaucuacaagacucccccaaucaaggacuucggcggcuucaacuucagccagauccugcccgaccccagcaagcccagcaagcggagcuucaucgaggaccugcuguucaacaaggugacccuggccgacgccggcuucaucaagcaguacggcgacugccugggggauaucgccgcucgggaccugaucugcgcccagaaguucaacggccugaccgugcugcccccucugcugaccgacgagaugaucgcccaguacaccagcgcccugcuugccggcaccaucaccagcggcuggaccuucggcgccggcgcagcccugcagauccccuucgccaugcagauggccuaccgguucaacggcaucggcgugacccagaacgugcuguacgagaaccagaagcugaucgccaaccaguucaacagcgccaucggcaagauccaggacagccugagcagcaccgccagcgcccugggcaagcugcaggacguggugaaccagaacgcucaggcccugaacacccuggugaagcagcugagcagcaacuucggcgccaucagcucagugcugaaugacauccugagcaggcuggaucccccagaggccgaggugcagaucgaccggcugaucaccggccggcugcagagccugcagaccuacgugacccagcagcugauccgggccgccgagauccgggccagcgccaaccuggcagccaccaagaugagcgagugcgugcugggccagagcaagcggguggacuuuugcggcaagggcuaccaccugaugagcuucccccagagcgcuccccacggcgugguguuccuccacgugacauacguccccgcccaggagaagaacuucaccaccgcccccgccauuugccacgacggcaaggcccacuucccccgggagggaguguucgugagcaacggcacccacugguucgugacccagcggaacuucuacgagccucagaucaucaccaccgacaacaccuucgugagcggcaacugcgacguggugaucggcaucgugaacaacaccguguacgacccccugcagcccgagcuggacagcuucaaggaggagcuggacaaguacuucaagaaccacaccagcccagacguggaccugggcgacaucagcggcaucaacgccagcguggugaacauccagaaggagaucgaccggcugaacgagguggccaagaaccugaacgagagccugaucgaccugcaggagcugggcaaguacgagcaguacaucaaguggcccugguacaucuggcugggcuucaucgccggccugaucgccaucgugauggugaccaucaugcugugcugcaugaccagcugcuguagcugccugaagggcugcugcagcugcggcagcugcugcaaguucgacgaggacgacagcgagcccgugcugaagggcgugaagcugcacuacaccugaugacucgagcugguacugcaugcacgcaaugcuagcugccccuuucccguccuggguaccccgagucucccccgaccucgggucccagguaugcucccaccuccaccugccccacucaccaccucugcuaguuccagacaccucccaagcacgcagcaaugcagcucaaaacgcuuagccuagccacacccccacgggaaacagcagugauuaaccuuuagcaauaaacgaaaguuuaacuaagcuauacuaaccccaggguuggucaauuucgugccagccacacccuggagcuagcaaaaaaaaaaaaaaaaaaaaaaaaaaaaaagcauaugacuaaaaaaaaaaaaaaaaaaaaaaaaaaaaaaaaaaaaaaaaaaaaaaaaaaaaaaaaaaaaaaaaaaaaaa

SEQ ID NO: 26887 - RNA, 4283 nt, Artificial Sequence
  SARS-CoV-2/Wuhan/WIV05/2019__EPI_ISL_402128 spike protein mRNA gc (1-1273)(K986P_V987P_K986P_V987P_L18F_T20N_P26S_D138Y_R190S_K417T _E484K_N501Y_D614G_H655Y_T1027I)
agaauaaacuaguauucuucugguccccacagacucagagagaacccgccaccauguucguguuccuggugcugcugccccuggugagcagccagugcgugaacuucaccaaccggacccagcugcccagcgccuacaccaacagcuucacccggggcguguacuacccugacaagguguuccggagcagcgugcugcacagcacccaggaccuguuccugcccuucuucagcaacgugaccugguuccacgccauccacgugagcggcaccaacggcaccaagcgguucgacaaccccgugcugccauucaacgacggcguguacuucgccagcaccgagaagucaaacaucauccggggcuggaucuuuggcaccacccuggacagcaagacccagagccugcugaucgugaacaacgccacaaacguggugaucaaggugugcgaguuccaguucugcaacuaccccuuccugggcguguacuaccacaagaacaacaagagcuggauggagagcgaguuccgggucuacagcagcgcuaauaacugcaccuucgaguacgugagccagcccuuccugauggaccuggagggcaagcagggcaacuucaagaaccucagcgaguucguguucaagaacaucgacggcuacuucaagaucuacagcaagcacacccccaucaaccuggugcgggaucugccccagggauucagcgcccuggagccccugguggaccugccuaucggcaucaacaucacccgguuccagacccugcuggcccugcacaggagcuaccugacccccggcgacagcagcagcggcuggaccgccggcgccgccgcauacuacgugggcuaccugcagccccggaccuuccugcugaaguacaacgagaacggcaccaucaccgacgccguggacugcgcccuggacccacugagcgagaccaagugcacccuaaagagcuucaccguggagaagggcaucuaccagaccagcaacuuccgggugcagcccaccgagagcaucgugcgguuccccaacauuacuaaccugugucccuucggcgagguguucaacgccacccgguucgccagcguguacgccuggaaccggaagcggaucagcaacugcguggccgacuacagcgugcuguacaacagcgccagcuucagcaccuucaagugcuacggcgugagccccaccaagcugaacgaccugugcuucaccaacguguacgcugacagcuucgugauccggggcgacgaggugcggcagaucgccccuggccagaccggcaccaucgccgacuacaacuacaagcugcccgacgacuucaccggcugcgugaucgccuggaacagcaacaaccuggacagcaaggugggcggcaacuacaacuaccuguaccggcuguuccguaagagcaaccugaagcccuuugagcgggacaucagcaccgagaucuaccaggccggcagcaccccaugcaacggugugaagggcuucaacugcuacuucccccugcagagcuacggcuuccagcccaccuacggcgugggcuaccagcccuaccgggugguggugcugagcuucgagcugcugcacgcccccgccaccgugugcggccccaaaaagagcaccaaccuggugaagaacaagugcgugaacuucaauuucaacggccugaccggcaccggcgugcugaccgagagcaacaagaaguuccugccuuuccagcaguucggccgggacaucgccgauaccaccgacgcagugcgggacccccagacccuggagauccuggacaucacccccugcagcuucggcggcgugagcgucaucaccccaggcacaaacaccagcaaccagguggccgugcuguaccagggagugaacugcaccgaggugcccguggccauccacgccgaccagcugacccccaccuggcggguguacuccaccggcagcaacguguuccagacccgggccggcugccugaucggcgccgaguacgugaacaacagcuacgagugcgacauccccaucggcgcuggcaucugcgccagcuaccagacccagaccaacagcccccggcgggcccggagcguggccagccagagcaucaucgccuacaccaugagccugggcgccgagaacagcguggccuacagcaacaacagcaucgcgauccccaccaacuucaccaucagcgugaccaccgagauauuaccugugagcaugaccaagaccagcguggacuguaccauguacaucugcggcgacagcaccgagugcagcaaccugcugcugcaguacggcagcuucugcacccagcugaaccgggcccugaccggcaucgccguggagcaggacaagaacacccaagagguguucgcccaggugaagcagaucuacaagacuccacccaucaaggacuucggcggcuucaacuucagccagauccugcccgaccccagcaagcccagcaagcggagcuucaucgaggaccugcuguucaacaaggugacccuggccgacgccggcuucaucaagcaguacggcgacugccugggggacaucgccgcucgggaucugaucugcgcccagaaguucaacggccugaccgugcugccuccccugcugaccgacgagaugaucgcccaguacaccagcgcccugcuggccggcaccaucaccagcggcuggaccuucggcgccggcgcagcccuucagauccccuucgccaugcagauggccuaccgguucaacggcaucggcgugacccagaacgugcuguacgagaaccagaagcugaucgccaaccaguucaacagcgccaucggcaagauccaggacagccugagcagcaccgccagcgcccugggcaagcugcaggacguggugaaccagaacgcucaggcccugaacacccuggugaagcagcugagcucaaacuuuggcgccaucagcagcgugcugaaugacauccugagccggcuggacccacccgaggccgaggugcagaucgacaggcugaucaccggccggcugcagagccugcagaccuacgugacccagcagcugauccgggccgccgagauccgggccagcgccaaccuggcagccauuaagaugagcgagugcgugcugggccagagcaagcggguggacuucugcggcaagggcuaccaccugaugagcuucccccagagcgcuccccacggcgugguguuccugcacgugaccuacguccccgcccaggagaagaacuucacaaccgcccccgccaucugccacgacggcaaggcccacuucccccgggagggaguguucgugagcaacggcacccacugguucgugacccagcggaacuucuacgagccccagaucaucaccaccgacaacaccuucgugagcggcaacugcgacguggugaucggcaucgugaacaacaccguguacgacccucuccagcccgagcuggacagcuucaaggaggagcuggacaaguacuucaagaaccacaccagccccgacguggaccugggcgauaucagcggcaucaacgccagcguggugaacauccagaaggagaucgaccggcugaacgagguggccaagaaccugaacgagagccugaucgaccugcaggagcugggcaaguacgagcaguacaucaaguggccaugguacaucuggcugggcuucaucgccggccugaucgccaucgugauggugaccaucaugcugugcugcaugaccagcugcuguagcugccugaagggcugcugcagcugcggcagcugcugcaaguucgacgaggacgacagcgagcccgugcugaagggcgugaagcugcacuacaccugaugacucgagcugguacugcaugcacgcaaugcuagcugccccuuucccguccuggguaccccgagucucccccgaccucgggucccagguaugcucccaccuccaccugccccacucaccaccucugcuaguuccagacaccucccaagcacgcagcaaugcagcucaaaacgcuuagccuagccacacccccacgggaaacagcagugauuaaccuuuagcaauaaacgaaaguuuaacuaagcuauacuaaccccaggguuggucaauuucgugccagccacacccuggagcuagcaaaaaaaaaaaaaaaaaaaaaaaaaaaaaagcauaugacuaaaaaaaaaaaaaaaaaaaaaaaaaaaaaaaaaaaaaaaaaaaaaaaaaaaaaaaaaaaaaaaaaaaaaa

SEQ ID NO: 26888 - RNA, 4283 nt, Artificial Sequence
  SARS-CoV-2/Wuhan/WIV05/2019__EPI_ISL_402128 spike protein mRNA gc (1-1273)(K986P_V987P_K986P_V987P_S13I_W152C_L452R_D614G)
agaauaaacuaguauucuucugguccccacagacucagagagaacccgccaccauguucguguuccuggugcugcugccccuggugagcauccagugcgugaaccugaccacccggacccagcugcccccugccuacaccaacagcuucacccggggcguguacuaccccgacaagguguuccggagcagcgugcugcacagcacccaggaccuguuccugcccuucuucagcaacgugaccugguuccacgccauccacgugagcggcaccaacggcaccaagcgguucgacaacccagugcugcccuucaacgacggcguguacuucgccagcaccgagaagucaaacaucauccggggcuggaucuucggcaccacccuggacagcaagacacagagccugcugaucgugaacaacgccaccaacguggugaucaaggugugcgaguuucaguucugcaacgaccccuuccugggcguguacuaccacaagaacaacaagagcugcauggagagcgaguuccgggucuacagcagcgcuaacaauugcaccuucgaguacgugagccagcccuuccugauggaccucgagggcaagcagggcaacuucaagaaccugcgggaguucguguucaagaacaucgauggcuacuucaagaucuacagcaagcacacccccaucaaccuggugcgggaccugccccagggauucagcgcccuggagccucugguggaccugcccaucggcaucaacaucaccagguuccagacccugcuggcccugcaccggagcuaccugacccccggcgacagcagcagcggcuggaccgccggcgccgccgcauacuacgugggcuaccugcagccacggaccuuccugcugaaguacaacgagaacggcaccaucaccgacgccguggacugcgcccuggacccccugagcgagaccaaguguacccuaaagagcuucaccguggagaagggcaucuaccagaccagcaacuuccgggugcagcccacugagagcauugugcgguuccccaacaucaccaaccugugccccuucggcgagguguucaacgccacccgguucgccagcguguacgccuggaaccggaagcggaucagcaacugcguggccgacuacagcgugcuguacaacagcgccagcuucagcaccuucaagugcuacggcgugagcccuaccaagcugaacgaccugugcuucaccaacguguacgcugacagcuucgugauccggggcgacgaggugcggcagaucgcccccggccagaccggcaagaucgccgacuacaacuacaagcugcccgacgacuucaccggcugcgugaucgccuggaacagcaacaaccuggacagcaaggugggcggcaacuacaacuaccgguaccggcuguuccguaagagcaaccugaagccauucgagcgggacaucagcaccgagaucuaccaggccggcagcacccccugcaacgguguggagggcuuuaacugcuacuucccccugcagagcuacggcuuccagcccaccaacggcgugggcuaccagcccuaccgggugguggugcugagcuucgagcugcugcacgcccccgccaccgugugcggcccuaaaaagagcaccaaccuggugaagaacaagugcgugaacuucaauuucaacggccugaccggcaccggcgugcugaccgagagcaacaagaaguuccugcccuuccagcaguucggccgggauaucgccgacaccaccgacgcagugcgggacccccagacccuggagauccuggacaucaccccaugcagcuucggcggcgugagcgucaucacccccggcacaaacaccagcaaccagguggccgugcuguaccagggagugaacugcaccgaggugcccguggccauccacgccgaccagcugacccccaccuggcggguguacagcaccggcagcaacguguuccagacccgggccggcugccugaucggcgccgagcacgugaacaacagcuacgagugcgacauccccaucggcgcuggcaucugugccuccuaccagacccagaccaacagcccccggcgggcccggagcguggccagccagagcaucaucgccuacaccaugagccugggcgccgagaacagcguggccuacagcaacaacagcaucgcgaucccuaccaacuucaccauaagcgugaccaccgagaucuuacccgugagcaugaccaagaccagcguggacugcaccauguacaucugcggcgacagcaccgagugcagcaaccugcugcugcaguacggcagcuucugcacccagcugaaccgggcccugaccggcaucgccguggagcaggacaagaacacccaagagguguucgcccaggugaagcagaucuacaagacucccccaaucaaggacuucggcggcuucaacuucagccagauccugcccgaccccagcaagcccagcaagcggagcuucaucgaggaccugcuguucaacaaggugacccuggccgacgccggcuucaucaagcaguacggcgacugccugggggauaucgccgcucgggaccugaucugcgcccagaaguucaacggccugaccgugcugcccccucugcugaccgacgagaugaucgcccaguacaccagcgcccugcuggccggcaccaucaccagcggcuggaccuucggcgccggcgcagcccuucagauccccuucgccaugcagauggccuacagguucaacggcaucggcgugacccagaacgugcuguacgagaaccagaagcugaucgccaaccaguucaacagcgccaucggcaagauccaggacagccugagcagcaccgccagcgcccugggcaagcugcaggacguggugaaccagaacgcucaggcccugaacacccuggugaagcagcugagcagcaacuucggcgccaucagcagcgugcugaaugacauccugucacggcuggaucccccagaggccgaggugcagaucgaccggcugaucaccggccggcugcagagccugcagaccuacgugacccagcagcugauccgggccgccgagauucgggccagcgccaaccuggcagccaccaagaugagcgagugcgugcugggccagagcaagcggguggacuuuugcggcaagggcuaccaccugaugagcuucccccagagcgcuccccacggcgugguguuccugcacgugacauacguccccgcccaggagaagaacuucaccaccgcccccgccaucugccacgacggcaaggcccacuucccccgggagggaguguucgugagcaacggcacccacugguucgugacccagcggaacuucuacgagccucagaucaucaccaccgacaacaccuucgugagcggcaacugcgacguggugaucggcaucgugaacaacaccguguacgacccccuccagcccgagcuggacagcuucaaggaggagcuggacaaguacuucaagaaccacaccagcccagacguggaccugggcgacaucagcggcaucaacgccagcguggugaacauccagaaggagaucgaccggcugaacgagguggccaagaaccugaacgagagccugaucgaccugcaggagcugggcaaguacgagcaguacaucaaguggcccugguacaucuggcugggcuucaucgccggccugaucgccaucgugauggugaccaucaugcugugcugcaugaccagcuguugcagcugccugaagggcugcugcagcugcggcagcugcugcaaguucgacgaggacgacagcgagcccgugcugaagggcgugaagcugcacuacaccugaugacucgagcugguacugcaugcacgcaaugcuagcugccccuuucccguccuggguaccccgagucucccccgaccucgggucccagguaugcucccaccuccaccugccccacucaccaccucugcuaguuccagacaccucccaagcacgcagcaaugcagcucaaaacgcuuagccuagccacacccccacgggaaacagcagugauuaaccuuuagcaauaaacgaaaguuuaacuaagcuauacuaaccccaggguuggucaauuucgugccagccacacccuggagcuagcaaaaaaaaaaaaaaaaaaaaaaaaaaaaaagcauaugacuaaaaaaaaaaaaaaaaaaaaaaaaaaaaaaaaaaaaaaaaaaaaaaaaaaaaaaaaaaaaaaaaaaaaaa

SEQ ID NO: 26889 - RNA, 4283 nt, Artificial Sequence
  SARS-CoV-2/Wuhan/WIV05/2019__EPI_ISL_402128 spike protein mRNA gc mod (1-1273)(K986P_V987P)
agaauaaacuaguauucuucugguccccacagacucagagagaacccgccaccauguucguguuucuggugcugcugccccugguguccagccagugugugaaccugaccaccagaacacagcugccuccagccuacaccaacagcuucaccagaggcguguacuaccccgacaagguguucagauccagcgugcugcacucuacccaggaccuguuccugccuuucuucagcaacgugaccugguuccacgccauccacguguccggcaccaauggcaccaagagauucgacaaccccgugcugcccuucaacgacgggguguacuuugccagcaccgagaaguccaacaucaucagaggcuggaucuucggcaccacacuggacagcaagacccagagccugcugaucgugaacaacgccaccaacguggucaucaaagugugcgaguuccaguucugcaacgaccccuuccugggcgucuacuaccacaagaacaacaagagcuggauggaaagcgaguuccggguguacagcagcgccaacaacugcaccuucgaguacgugucccagccuuuccugauggaccuggaaggcaagcagggcaacuucaagaaccugcgcgaguucguguucaagaacaucgacggcuacuucaaaaucuacagcaagcacaccccuaucaaccucgugcgggaucugccucagggcuucucugcucuggaaccccugguggaucugcccaucggcaucaacaucacccgguuucagacacugcuggcccugcacagaagcuaccugacaccuggcgauagcagcagcggauggacagcuggugccgccgcuuacuaugugggcuaccugcagccuagaaccuuccugcugaaguacaacgagaacggcaccaucaccgacgccguggauugugcucuggauccucugagcgagacaaagugcacccugaaguccuucaccguggaaaagggcaucuaccagaccagcaacuuccgggugcagcccaccgaauccaucgugcgguuccccaauaucaccaaucugugccccuucggcgagguguucaaugccaccagauucgccucuguguacgccuggaaccggaagcggaucagcaauugcguggccgacuacuccgugcuguacaacuccgccagcuucagcaccuucaagugcuacggcguguccccuaccaagcugaacgaccugugcuucacaaacguguacgccgacagcuucgugauccggggagaugaagugcggcagauugccccuggacagacaggcaagaucgccgacuacaacuacaagcugcccgacgacuucaccggcugugugauugccuggaacagcaacaaccuggacuccaaagucggcggcaacuacaauuaccuguaccggcuguuccggaaguccaaucugaagcccuucgagcgggacaucagcaccgaaaucuaucaggccggcagcaccccuugcaacggcguggaaggcuucaacugcuacuucccacugcaguccuacggcuuucagcccacaaauggcgugggcuaucagcccuacagagugguggugcugagcuucgaacugcugcaugcuccugccacagugugcggcccuaagaaaagcaccaaucucgugaagaacaaaugcgugaacuucaacuucaacggccugaccggcaccggcgugcugacagagagcaacaagaaguuccugccauuccagcaguuuggccgggauaucgccgauaccacagacgccguuagagauccccagacacuggaaauccuggacaucaccccaugcagcuucggcggagugucugugaucaccccuggcaccaacaccagcaaucagguggcagugcuguaccaggacgugaacuguaccgaagugcccguggccauucacgccgaucagcugacaccuacauggcggguguacuccaccggcagcaauguguuucagaccagagccggcugucugaucggagccgagcacgugaacaauagcuacgagugcgacauccccaucggcgcuggcaucugugccagcuaccagacacagacaaacagccccagacgggcuagaagcguggccagccagagcaucauugccuacacaaugucucugggcgccgagaacagcguggccuacuccaacaacucuaucgcuauccccaccaacuucaccaucagcgugaccaccgagauccugccuguguccaugaccaagaccagcguggacugcaccauguacaucugcggcgauuccaccgagugcuccaaccugcugcugcaguacggcagcuucugcacccagcugaauagagcccugacagggaucgccguggaacaggacaagaacacccaagagguguucgcccaagugaagcaaaucuacaagaccccuccuaucaaggacuucggcggcuucaauuucagccagauucugcccgauccuagcaagcccagcaagcggagcuucaucgaggaccugcuguucaacaaagugacacuggccgacgccggcuucaucaagcaguauggcgauugucugggcgacauugccgccagggaucugauuugcgcccagaaguuuaacggacugacagugcugccuccucugcugaccgaugagaugaucgcccaguacacaucugcccugcuggccggcacaaucacaagcggcuggacauuuggagcuggcgccgcucugcagauccccuuugcuaugcagauggccuaccgguucaacggcaucggagugacccagaaugugcuguacgagaaccagaagcugaucgccaaccaguucaacagcgccaucggcaagauccaggacagccugagcagcacagcaagcgcccugggaaagcugcaggacguggucaaccagaaugcccaggcacugaacacccuggucaagcagcuguccuccaacuucggcgccaucagcucugugcugaacgauauccugagcagacuggacccuccugaggccgaggugcagaucgacagacugaucacaggcagacugcagagccuccagacauacgugacccagcagcugaucagagccgccgagauuagagccucugccaaucuggccgccaccaagaugucugagugugugcugggccagagcaagagaguggacuuuugcggcaagggcuaccaccugaugagcuucccucagucugccccucacggcgugguguuucugcacgugacauaugugcccgcucaagagaagaauuucaccaccgcuccagccaucugccacgacggcaaagcccacuuuccuagagaaggcguguucguguccaacggcacccauugguucgugacacagcggaacuucuacgagccccagaucaucaccaccgacaacaccuucgugucuggcaacugcgacguugugaucggcauugugaacaauaccguguacgacccucugcagcccgagcuggacagcuucaaagaggaacuggacaaguacuuuaagaaccacacaagccccgacguggaccugggcgauaucagcggaaucaaugccagcgucgugaacauccagaaagagaucgaccggcugaacgagguggccaagaaucugaacgagagccugaucgaccugcaagaacuggggaaguacgagcaguacaucaaguggcccugguacaucuggcugggcuuuaucgccggacugauugccaucgugauggucacaaucaugcuguguugcaugaccagcugcuguagcugccugaagggcuguuguagcuguggcagcugcugcaaguucgacgaggacgauucugagcccgugcugaagggcgugaaacugcacuacaccugaugacucgagcugguacugcaugcacgcaaugcuagcugccccuuucccguccuggguaccccgagucucccccgaccucgggucccagguaugcucccaccuccaccugccccacucaccaccucugcuaguuccagacaccucccaagcacgcagcaaugcagcucaaaacgcuuagccuagccacacccccacgggaaacagcagugauuaaccuuuagcaauaaacgaaaguuuaacuaagcuauacuaaccccaggguuggucaauuucgugccagccacacccuggagcuagcaaaaaaaaaaaaaaaaaaaaaaaaaaaaaagcauaugacuaaaaaaaaaaaaaaaaaaaaaaaaaaaaaaaaaaaaaaaaaaaaaaaaaaaaaaaaaaaaaaaaaaaaaa

SEQ ID NO: 26890 - RNA, 4283 nt, Artificial Sequence
  SARS-CoV-2/Wuhan/WIV05/2019__EPI_ISL_402128 spike protein mRNA gc mod (1-1273)(K986P_V987P_ D614G)
agaauaaacuaguauucuucugguccccacagacucagagagaacccgccaccauguucguguuucuggugcugcugccccugguguccagccagugugugaaccugaccaccagaacacagcugccuccagccuacaccaacagcuucaccagaggcguguacuaccccgacaagguguucagauccagcgugcugcacucuacccaggaccuguuccugccuuucuucagcaacgugaccugguuccacgccauccacguguccggcaccaauggcaccaagagauucgacaaccccgugcugcccuucaacgacgggguguacuuugccagcaccgagaaguccaacaucaucagaggcuggaucuucggcaccacacuggacagcaagacccagagccugcugaucgugaacaacgccaccaacguggucaucaaagugugcgaguuccaguucugcaacgaccccuuccugggcgucuacuaccacaagaacaacaagagcuggauggaaagcgaguuccggguguacagcagcgccaacaacugcaccuucgaguacgugucccagccuuuccugauggaccuggaaggcaagcagggcaacuucaagaaccugcgcgaguucguguucaagaacaucgacggcuacuucaaaaucuacagcaagcacaccccuaucaaccucgugcgggaucugccucagggcuucucugcucuggaaccccugguggaucugcccaucggcaucaacaucacccgguuucagacacugcuggcccugcacagaagcuaccugacaccuggcgauagcagcagcggauggacagcuggugccgccgcuuacuaugugggcuaccugcagccuagaaccuuccugcugaaguacaacgagaacggcaccaucaccgacgccguggauugugcucuggauccucugagcgagacaaagugcacccugaaguccuucaccguggaaaagggcaucuaccagaccagcaacuuccgggugcagcccaccgaauccaucgugcgguuccccaauaucaccaaucugugccccuucggcgagguguucaaugccaccagauucgccucuguguacgccuggaaccggaagcggaucagcaauugcguggccgacuacuccgugcuguacaacuccgccagcuucagcaccuucaagugcuacggcguguccccuaccaagcugaacgaccugugcuucacaaacguguacgccgacagcuucgugauccggggagaugaagugcggcagauugccccuggacagacaggcaagaucgccgacuacaacuacaagcugcccgacgacuucaccggcugugugauugccuggaacagcaacaaccuggacuccaaagucggcggcaacuacaauuaccuguaccggcuguuccggaaguccaaucugaagcccuucgagcgggacaucagcaccgaaaucuaucaggccggcagcaccccuugcaacggcguggaaggcuucaacugcuacuucccacugcaguccuacggcuuucagcccacaaauggcgugggcuaucagcccuacagagugguggugcugagcuucgaacugcugcaugcuccugccacagugugcggcccuaagaaaagcaccaaucucgugaagaacaaaugcgugaacuucaacuucaacggccugaccggcaccggcgugcugacagagagcaacaagaaguuccugccauuccagcaguuuggccgggauaucgccgauaccacagacgccguuagagauccccagacacuggaaauccuggacaucaccccaugcagcuucggcggagugucugugaucaccccuggcaccaacaccagcaaucagguggcagugcuguaccagggcgugaacuguaccgaagugcccguggccauucacgccgaucagcugacaccuacauggcggguguacuccaccggcagcaauguguuucagaccagagccggcugucugaucggagccgagcacgugaacaauagcuacgagugcgacauccccaucggcgcuggcaucugugccagcuaccagacacagacaaacagccccagacgggcuagaagcguggccagccagagcaucauugccuacacaaugucucugggcgccgagaacagcguggccuacuccaacaacucuaucgcuauccccaccaacuucaccaucagcgugaccaccgagauccugccuguguccaugaccaagaccagcguggacugcaccauguacaucugcggcgauuccaccgagugcuccaaccugcugcugcaguacggcagcuucugcacccagcugaauagagcccugacagggaucgccguggaacaggacaagaacacccaagagguguucgcccaagugaagcaaaucuacaagaccccuccuaucaaggacuucggcggcuucaauuucagccagauucugcccgauccuagcaagcccagcaagcggagcuucaucgaggaccugcuguucaacaaagugacacuggccgacgccggcuucaucaagcaguauggcgauugucugggcgacauugccgccagggaucugauuugcgcccagaaguuuaacggacugacagugcugccuccucugcugaccgaugagaugaucgcccaguacacaucugcccugcuggccggcacaaucacaagcggcuggacauuuggagcuggcgccgcucugcagauccccuuugcuaugcagauggccuaccgguucaacggcaucggagugacccagaaugugcuguacgagaaccagaagcugaucgccaaccaguucaacagcgccaucggcaagauccaggacagccugagcagcacagcaagcgcccugggaaagcugcaggacguggucaaccagaaugcccaggcacugaacacccuggucaagcagcuguccuccaacuucggcgccaucagcucugugcugaacgauauccugagcagacuggacccuccugaggccgaggugcagaucgacagacugaucacaggcagacugcagagccuccagacauacgugacccagcagcugaucagagccgccgagauuagagccucugccaaucuggccgccaccaagaugucugagugugugcugggccagagcaagagaguggacuuuugcggcaagggcuaccaccugaugagcuucccucagucugccccucacggcgugguguuucugcacgugacauaugugcccgcucaagagaagaauuucaccaccgcuccagccaucugccacgacggcaaagcccacuuuccuagagaaggcguguucguguccaacggcacccauugguucgugacacagcggaacuucuacgagccccagaucaucaccaccgacaacaccuucgugucuggcaacugcgacguugugaucggcauugugaacaauaccguguacgacccucugcagcccgagcuggacagcuucaaagaggaacuggacaaguacuuuaagaaccacacaagccccgacguggaccugggcgauaucagcggaaucaaugccagcgucgugaacauccagaaagagaucgaccggcugaacgagguggccaagaaucugaacgagagccugaucgaccugcaagaacuggggaaguacgagcaguacaucaaguggcccugguacaucuggcugggcuuuaucgccggacugauugccaucgugauggucacaaucaugcuguguugcaugaccagcugcuguagcugccugaagggcuguuguagcuguggcagcugcugcaaguucgacgaggacgauucugagcccgugcugaagggcgugaaacugcacuacaccugaugacucgagcugguacugcaugcacgcaaugcuagcugccccuuucccguccuggguaccccgagucucccccgaccucgggucccagguaugcucccaccuccaccugccccacucaccaccucugcuaguuccagacaccucccaagcacgcagcaaugcagcucaaaacgcuuagccuagccacacccccacgggaaacagcagugauuaaccuuuagcaauaaacgaaaguuuaacuaagcuauacuaaccccaggguuggucaauuucgugccagccacacccuggagcuagcaaaaaaaaaaaaaaaaaaaaaaaaaaaaaagcauaugacuaaaaaaaaaaaaaaaaaaaaaaaaaaaaaaaaaaaaaaaaaaaaaaaaaaaaaaaaaaaaaaaaaaaaaa

SEQ ID NO: 26891 - RNA, 4283 nt, Artificial Sequence
  SARS-CoV-2/Wuhan/WIV05/2019__EPI_ISL_402128 spike protein mRNA gc mod (1-1273)(K986P_V987P_A222V_D614G)
agaauaaacuaguauucuucugguccccacagacucagagagaacccgccaccauguucguguuucuggugcugcugccccugguguccagccagugugugaaccugaccaccagaacacagcugccuccagccuacaccaacagcuucaccagaggcguguacuaccccgacaagguguucagauccagcgugcugcacucuacccaggaccuguuccugccuuucuucagcaacgugaccugguuccacgccauccacguguccggcaccaauggcaccaagagauucgacaaccccgugcugcccuucaacgacgggguguacuuugccagcaccgagaaguccaacaucaucagaggcuggaucuucggcaccacacuggacagcaagacccagagccugcugaucgugaacaacgccaccaacguggucaucaaagugugcgaguuccaguucugcaacgaccccuuccugggcgucuacuaccacaagaacaacaagagcuggauggaaagcgaguuccggguguacagcagcgccaacaacugcaccuucgaguacgugucccagccuuuccugauggaccuggaaggcaagcagggcaacuucaagaaccugcgcgaguucguguucaagaacaucgacggcuacuucaaaaucuacagcaagcacaccccuaucaaccucgugcgggaucugccucagggcuucucugugcuggaaccccugguggaucugcccaucggcaucaacaucacccgguuucagacacugcuggcccugcacagaagcuaccugacaccuggcgauagcagcagcggauggacagcuggugccgccgcuuacuaugugggcuaccugcagccuagaaccuuccugcugaaguacaacgagaacggcaccaucaccgacgccguggauugugcucuggauccucugagcgagacaaagugcacccugaaguccuucaccguggaaaagggcaucuaccagaccagcaacuuccgggugcagcccaccgaauccaucgugcgguuccccaauaucaccaaucugugccccuucggcgagguguucaaugccaccagauucgccucuguguacgccuggaaccggaagcggaucagcaauugcguggccgacuacuccgugcuguacaacuccgccagcuucagcaccuucaagugcuacggcguguccccuaccaagcugaacgaccugugcuucacaaacguguacgccgacagcuucgugauccggggagaugaagugcggcagauugccccuggacagacaggcaagaucgccgacuacaacuacaagcugcccgacgacuucaccggcugugugauugccuggaacagcaacaaccuggacuccaaagucggcggcaacuacaauuaccuguaccggcuguuccggaaguccaaucugaagcccuucgagcgggacaucagcaccgaaaucuaucaggccggcagcaccccuugcaacggcguggaaggcuucaacugcuacuucccacugcaguccuacggcuuucagcccacaaauggcgugggcuaucagcccuacagagugguggugcugagcuucgaacugcugcaugcuccugccacagugugcggcccuaagaaaagcaccaaucucgugaagaacaaaugcgugaacuucaacuucaacggccugaccggcaccggcgugcugacagagagcaacaagaaguuccugccauuccagcaguuuggccgggauaucgccgauaccacagacgccguuagagauccccagacacuggaaauccuggacaucaccccaugcagcuucggcggagugucugugaucaccccuggcaccaacaccagcaaucagguggcagugcuguaccagggcgugaacuguaccgaagugcccguggccauucacgccgaucagcugacaccuacauggcggguguacuccaccggcagcaauguguuucagaccagagccggcugucugaucggagccgagcacgugaacaauagcuacgagugcgacauccccaucggcgcuggcaucugugccagcuaccagacacagacaaacagccccagacgggcuagaagcguggccagccagagcaucauugccuacacaaugucucugggcgccgagaacagcguggccuacuccaacaacucuaucgcuauccccaccaacuucaccaucagcgugaccaccgagauccugccuguguccaugaccaagaccagcguggacugcaccauguacaucugcggcgauuccaccgagugcuccaaccugcugcugcaguacggcagcuucugcacccagcugaauagagcccugacagggaucgccguggaacaggacaagaacacccaagagguguucgcccaagugaagcaaaucuacaagaccccuccuaucaaggacuucggcggcuucaauuucagccagauucugcccgauccuagcaagcccagcaagcggagcuucaucgaggaccugcuguucaacaaagugacacuggccgacgccggcuucaucaagcaguauggcgauugucugggcgacauugccgccagggaucugauuugcgcccagaaguuuaacggacugacagugcugccuccucugcugaccgaugagaugaucgcccaguacacaucugcccugcuggccggcacaaucacaagcggcuggacauuuggagcuggcgccgcucugcagauccccuuugcuaugcagauggccuaccgguucaacggcaucggagugacccagaaugugcuguacgagaaccagaagcugaucgccaaccaguucaacagcgccaucggcaagauccaggacagccugagcagcacagcaagcgcccugggaaagcugcaggacguggucaaccagaaugcccaggcacugaacacccuggucaagcagcuguccuccaacuucggcgccaucagcucugugcugaacgauauccugagcagacuggacccuccugaggccgaggugcagaucgacagacugaucacaggcagacugcagagccuccagacauacgugacccagcagcugaucagagccgccgagauuagagccucugccaaucuggccgccaccaagaugucugagugugugcugggccagagcaagagaguggacuuuugcggcaagggcuaccaccugaugagcuucccucagucugccccucacggcgugguguuucugcacgugacauaugugcccgcucaagagaagaauuucaccaccgcuccagccaucugccacgacggcaaagcccacuuuccuagagaaggcguguucguguccaacggcacccauugguucgugacacagcggaacuucuacgagccccagaucaucaccaccgacaacaccuucgugucuggcaacugcgacguugugaucggcauugugaacaauaccguguacgacccucugcagcccgagcuggacagcuucaaagaggaacuggacaaguacuuuaagaaccacacaagccccgacguggaccugggcgauaucagcggaaucaaugccagcgucgugaacauccagaaagagaucgaccggcugaacgagguggccaagaaucugaacgagagccugaucgaccugcaagaacuggggaaguacgagcaguacaucaaguggcccugguacaucuggcugggcuuuaucgccggacugauugccaucgugauggucacaaucaugcuguguugcaugaccagcugcuguagcugccugaagggcuguuguagcuguggcagcugcugcaaguucgacgaggacgauucugagcccgugcugaagggcgugaaacugcacuacaccugaugacucgagcugguacugcaugcacgcaaugcuagcugccccuuucccguccuggguaccccgagucucccccgaccucgggucccagguaugcucccaccuccaccugccccacucaccaccucugcuaguuccagacaccucccaagcacgcagcaaugcagcucaaaacgcuuagccuagccacacccccacgggaaacagcagugauuaaccuuuagcaauaaacgaaaguuuaacuaagcuauacuaaccccaggguuggucaauuucgugccagccacacccuggagcuagcaaaaaaaaaaaaaaaaaaaaaaaaaaaaaagcauaugacuaaaaaaaaaaaaaaaaaaaaaaaaaaaaaaaaaaaaaaaaaaaaaaaaaaaaaaaaaaaaaaaaaaaaaa

SEQ ID NO: 26892 - RNA, 4283 nt, Artificial Sequence
  SARS-CoV-2/Wuhan/WIV05/2019__EPI_ISL_402128 spike protein mRNA gc mod (1-1273)(K986P_V987P_N439K_D614G)
agaauaaacuaguauucuucugguccccacagacucagagagaacccgccaccauguucguguuucuggugcugcugccccugguguccagccagugugugaaccugaccaccagaacacagcugccuccagccuacaccaacagcuucaccagaggcguguacuaccccgacaagguguucagauccagcgugcugcacucuacccaggaccuguuccugccuuucuucagcaacgugaccugguuccacgccauccacguguccggcaccaauggcaccaagagauucgacaaccccgugcugcccuucaacgacgggguguacuuugccagcaccgagaaguccaacaucaucagaggcuggaucuucggcaccacacuggacagcaagacccagagccugcugaucgugaacaacgccaccaacguggucaucaaagugugcgaguuccaguucugcaacgaccccuuccugggcgucuacuaccacaagaacaacaagagcuggauggaaagcgaguuccggguguacagcagcgccaacaacugcaccuucgaguacgugucccagccuuuccugauggaccuggaaggcaagcagggcaacuucaagaaccugcgcgaguucguguucaagaacaucgacggcuacuucaaaaucuacagcaagcacaccccuaucaaccucgugcgggaucugccucagggcuucucugcucuggaaccccugguggaucugcccaucggcaucaacaucacccgguuucagacacugcuggcccugcacagaagcuaccugacaccuggcgauagcagcagcggauggacagcuggugccgccgcuuacuaugugggcuaccugcagccuagaaccuuccugcugaaguacaacgagaacggcaccaucaccgacgccguggauugugcucuggauccucugagcgagacaaagugcacccugaaguccuucaccguggaaaagggcaucuaccagaccagcaacuuccgggugcagcccaccgaauccaucgugcgguuccccaauaucaccaaucugugccccuucggcgagguguucaaugccaccagauucgccucuguguacgccuggaaccggaagcggaucagcaauugcguggccgacuacuccgugcuguacaacuccgccagcuucagcaccuucaagugcuacggcguguccccuaccaagcugaacgaccugugcuucacaaacguguacgccgacagcuucgugauccggggagaugaagugcggcagauugccccuggacagacaggcaagaucgccgacuacaacuacaagcugcccgacgacuucaccggcugugugauugccuggaacagcaagaaccuggacuccaaagucggcggcaacuacaauuaccuguaccggcuguuccggaaguccaaucugaagcccuucgagcgggacaucagcaccgaaaucuaucaggccggcagcaccccuugcaacggcguggaaggcuucaacugcuacuucccacugcaguccuacggcuuucagcccacaaauggcgugggcuaucagcccuacagagugguggugcugagcuucgaacugcugcaugcuccugccacagugugcggcccuaagaaaagcaccaaucucgugaagaacaaaugcgugaacuucaacuucaacggccugaccggcaccggcgugcugacagagagcaacaagaaguuccugccauuccagcaguuuggccgggauaucgccgauaccacagacgccguuagagauccccagacacuggaaauccuggacaucaccccaugcagcuucggcggagugucugugaucaccccuggcaccaacaccagcaaucagguggcagugcuguaccagggcgugaacuguaccgaagugcccguggccauucacgccgaucagcugacaccuacauggcggguguacuccaccggcagcaauguguuucagaccagagccggcugucugaucggagccgagcacgugaacaauagcuacgagugcgacauccccaucggcgcuggcaucugugccagcuaccagacacagacaaacagccccagacgggcuagaagcguggccagccagagcaucauugccuacacaaugucucugggcgccgagaacagcguggccuacuccaacaacucuaucgcuauccccaccaacuucaccaucagcgugaccaccgagauccugccuguguccaugaccaagaccagcguggacugcaccauguacaucugcggcgauuccaccgagugcuccaaccugcugcugcaguacggcagcuucugcacccagcugaauagagcccugacagggaucgccguggaacaggacaagaacacccaagagguguucgcccaagugaagcaaaucuacaagaccccuccuaucaaggacuucggcggcuucaauuucagccagauucugcccgauccuagcaagcccagcaagcggagcuucaucgaggaccugcuguucaacaaagugacacuggccgacgccggcuucaucaagcaguauggcgauugucugggcgacauugccgccagggaucugauuugcgcccagaaguuuaacggacugacagugcugccuccucugcugaccgaugagaugaucgcccaguacacaucugcccugcuggccggcacaaucacaagcggcuggacauuuggagcuggcgccgcucugcagauccccuuugcuaugcagauggccuaccgguucaacggcaucggagugacccagaaugugcuguacgagaaccagaagcugaucgccaaccaguucaacagcgccaucggcaagauccaggacagccugagcagcacagcaagcgcccugggaaagcugcaggacguggucaaccagaaugcccaggcacugaacacccuggucaagcagcuguccuccaacuucggcgccaucagcucugugcugaacgauauccugagcagacuggacccuccugaggccgaggugcagaucgacagacugaucacaggcagacugcagagccuccagacauacgugacccagcagcugaucagagccgccgagauuagagccucugccaaucuggccgccaccaagaugucugagugugugcugggccagagcaagagaguggacuuuugcggcaagggcuaccaccugaugagcuucccucagucugccccucacggcgugguguuucugcacgugacauaugugcccgcucaagagaagaauuucaccaccgcuccagccaucugccacgacggcaaagcccacuuuccuagagaaggcguguucguguccaacggcacccauugguucgugacacagcggaacuucuacgagccccagaucaucaccaccgacaacaccuucgugucuggcaacugcgacguugugaucggcauugugaacaauaccguguacgacccucugcagcccgagcuggacagcuucaaagaggaacuggacaaguacuuuaagaaccacacaagccccgacguggaccugggcgauaucagcggaaucaaugccagcgucgugaacauccagaaagagaucgaccggcugaacgagguggccaagaaucugaacgagagccugaucgaccugcaagaacuggggaaguacgagcaguacaucaaguggcccugguacaucuggcugggcuuuaucgccggacugauugccaucgugauggucacaaucaugcuguguugcaugaccagcugcuguagcugccugaagggcuguuguagcuguggcagcugcugcaaguucgacgaggacgauucugagcccgugcugaagggcgugaaacugcacuacaccugaugacucgagcugguacugcaugcacgcaaugcuagcugccccuuucccguccuggguaccccgagucucccccgaccucgggucccagguaugcucccaccuccaccugccccacucaccaccucugcuaguuccagacaccucccaagcacgcagcaaugcagcucaaaacgcuuagccuagccacacccccacgggaaacagcagugauuaaccuuuagcaauaaacgaaaguuuaacuaagcuauacuaaccccaggguuggucaauuucgugccagccacacccuggagcuagcaaaaaaaaaaaaaaaaaaaaaaaaaaaaaagcauaugacuaaaaaaaaaaaaaaaaaaaaaaaaaaaaaaaaaaaaaaaaaaaaaaaaaaaaaaaaaaaaaaaaaaaaaa

SEQ ID NO: 26893 - RNA, 4283 nt, Artificial Sequence
  SARS-CoV-2/Wuhan/WIV05/2019__EPI_ISL_402128 spike protein mRNA gc mod (1-1273)(K986P_V987P_S477N_D614G)
agaauaaacuaguauucuucugguccccacagacucagagagaacccgccaccauguucguguuucuggugcugcugccccugguguccagccagugugugaaccugaccaccagaacacagcugccuccagccuacaccaacagcuucaccagaggcguguacuaccccgacaagguguucagauccagcgugcugcacucuacccaggaccuguuccugccuuucuucagcaacgugaccugguuccacgccauccacguguccggcaccaauggcaccaagagauucgacaaccccgugcugcccuucaacgacgggguguacuuugccagcaccgagaaguccaacaucaucagaggcuggaucuucggcaccacacuggacagcaagacccagagccugcugaucgugaacaacgccaccaacguggucaucaaagugugcgaguuccaguucugcaacgaccccuuccugggcgucuacuaccacaagaacaacaagagcuggauggaaagcgaguuccggguguacagcagcgccaacaacugcaccuucgaguacgugucccagccuuuccugauggaccuggaaggcaagcagggcaacuucaagaaccugcgcgaguucguguucaagaacaucgacggcuacuucaaaaucuacagcaagcacaccccuaucaaccucgugcgggaucugccucagggcuucucugcucuggaaccccugguggaucugcccaucggcaucaacaucacccgguuucagacacugcuggcccugcacagaagcuaccugacaccuggcgauagcagcagcggauggacagcuggugccgccgcuuacuaugugggcuaccugcagccuagaaccuuccugcugaaguacaacgagaacggcaccaucaccgacgccguggauugugcucuggauccucugagcgagacaaagugcacccugaaguccuucaccguggaaaagggcaucuaccagaccagcaacuuccgggugcagcccaccgaauccaucgugcgguuccccaauaucaccaaucugugccccuucggcgagguguucaaugccaccagauucgccucuguguacgccuggaaccggaagcggaucagcaauugcguggccgacuacuccgugcuguacaacuccgccagcuucagcaccuucaagugcuacggcguguccccuaccaagcugaacgaccugugcuucacaaacguguacgccgacagcuucgugauccggggagaugaagugcggcagauugccccuggacagacaggcaagaucgccgacuacaacuacaagcugcccgacgacuucaccggcugugugauugccuggaacagcaacaaccuggacuccaaagucggcggcaacuacaauuaccuguaccggcuguuccggaaguccaaucugaagcccuucgagcgggacaucagcaccgaaaucuaucaggccggcaacaccccuugcaacggcguggaaggcuucaacugcuacuucccacugcaguccuacggcuuucagcccacaaauggcgugggcuaucagcccuacagagugguggugcugagcuucgaacugcugcaugcuccugccacagugugcggcccuaagaaaagcaccaaucucgugaagaacaaaugcgugaacuucaacuucaacggccugaccggcaccggcgugcugacagagagcaacaagaaguuccugccauuccagcaguuuggccgggauaucgccgauaccacagacgccguuagagauccccagacacuggaaauccuggacaucaccccaugcagcuucggcggagugucugugaucaccccuggcaccaacaccagcaaucagguggcagugcuguaccagggcgugaacuguaccgaagugcccguggccauucacgccgaucagcugacaccuacauggcggguguacuccaccggcagcaauguguuucagaccagagccggcugucugaucggagccgagcacgugaacaauagcuacgagugcgacauccccaucggcgcuggcaucugugccagcuaccagacacagacaaacagccccagacgggcuagaagcguggccagccagagcaucauugccuacacaaugucucugggcgccgagaacagcguggccuacuccaacaacucuaucgcuauccccaccaacuucaccaucagcgugaccaccgagauccugccuguguccaugaccaagaccagcguggacugcaccauguacaucugcggcgauuccaccgagugcuccaaccugcugcugcaguacggcagcuucugcacccagcugaauagagcccugacagggaucgccguggaacaggacaagaacacccaagagguguucgcccaagugaagcaaaucuacaagaccccuccuaucaaggacuucggcggcuucaauuucagccagauucugcccgauccuagcaagcccagcaagcggagcuucaucgaggaccugcuguucaacaaagugacacuggccgacgccggcuucaucaagcaguauggcgauugucugggcgacauugccgccagggaucugauuugcgcccagaaguuuaacggacugacagugcugccuccucugcugaccgaugagaugaucgcccaguacacaucugcccugcuggccggcacaaucacaagcggcuggacauuuggagcuggcgccgcucugcagauccccuuugcuaugcagauggccuaccgguucaacggcaucggagugacccagaaugugcuguacgagaaccagaagcugaucgccaaccaguucaacagcgccaucggcaagauccaggacagccugagcagcacagcaagcgcccugggaaagcugcaggacguggucaaccagaaugcccaggcacugaacacccuggucaagcagcuguccuccaacuucggcgccaucagcucugugcugaacgauauccugagcagacuggacccuccugaggccgaggugcagaucgacagacugaucacaggcagacugcagagccuccagacauacgugacccagcagcugaucagagccgccgagauuagagccucugccaaucuggccgccaccaagaugucugagugugugcugggccagagcaagagaguggacuuuugcggcaagggcuaccaccugaugagcuucccucagucugccccucacggcgugguguuucugcacgugacauaugugcccgcucaagagaagaauuucaccaccgcuccagccaucugccacgacggcaaagcccacuuuccuagagaaggcguguucguguccaacggcacccauugguucgugacacagcggaacuucuacgagccccagaucaucaccaccgacaacaccuucgugucuggcaacugcgacguugugaucggcauugugaacaauaccguguacgacccucugcagcccgagcuggacagcuucaaagaggaacuggacaaguacuuuaagaaccacacaagccccgacguggaccugggcgauaucagcggaaucaaugccagcgucgugaacauccagaaagagaucgaccggcugaacgagguggccaagaaucugaacgagagccugaucgaccugcaagaacuggggaaguacgagcaguacaucaaguggcccugguacaucuggcugggcuuuaucgccggacugauugccaucgugauggucacaaucaugcuguguugcaugaccagcugcuguagcugccugaagggcuguuguagcuguggcagcugcugcaaguucgacgaggacgauucugagcccgugcugaagggcgugaaacugcacuacaccugaugacucgagcugguacugcaugcacgcaaugcuagcugccccuuucccguccuggguaccccgagucucccccgaccucgggucccagguaugcucccaccuccaccugccccacucaccaccucugcuaguuccagacaccucccaagcacgcagcaaugcagcucaaaacgcuuagccuagccacacccccacgggaaacagcagugauuaaccuuuagcaauaaacgaaaguuuaacuaagcuauacuaaccccaggguuggucaauuucgugccagccacacccuggagcuagcaaaaaaaaaaaaaaaaaaaaaaaaaaaaaagcauaugacuaaaaaaaaaaaaaaaaaaaaaaaaaaaaaaaaaaaaaaaaaaaaaaaaaaaaaaaaaaaaaaaaaaaaaa

SEQ ID NO: 26894 - RNA, 4283 nt, Artificial Sequence
  SARS-CoV-2/Wuhan/WIV05/2019__EPI_ISL_402128 spike protein mRNA gc mod (1-1273)(K986P_V987P_N501Y_D614G)
agaauaaacuaguauucuucugguccccacagacucagagagaacccgccaccauguucguguuucuggugcugcugccccugguguccagccagugugugaaccugaccaccagaacacagcugccuccagccuacaccaacagcuucaccagaggcguguacuaccccgacaagguguucagauccagcgugcugcacucuacccaggaccuguuccugccuuucuucagcaacgugaccugguuccacgccauccacguguccggcaccaauggcaccaagagauucgacaaccccgugcugcccuucaacgacgggguguacuuugccagcaccgagaaguccaacaucaucagaggcuggaucuucggcaccacacuggacagcaagacccagagccugcugaucgugaacaacgccaccaacguggucaucaaagugugcgaguuccaguucugcaacgaccccuuccugggcgucuacuaccacaagaacaacaagagcuggauggaaagcgaguuccggguguacagcagcgccaacaacugcaccuucgaguacgugucccagccuuuccugauggaccuggaaggcaagcagggcaacuucaagaaccugcgcgaguucguguucaagaacaucgacggcuacuucaaaaucuacagcaagcacaccccuaucaaccucgugcgggaucugccucagggcuucucugcucuggaaccccugguggaucugcccaucggcaucaacaucacccgguuucagacacugcuggcccugcacagaagcuaccugacaccuggcgauagcagcagcggauggacagcuggugccgccgcuuacuaugugggcuaccugcagccuagaaccuuccugcugaaguacaacgagaacggcaccaucaccgacgccguggauugugcucuggauccucugagcgagacaaagugcacccugaaguccuucaccguggaaaagggcaucuaccagaccagcaacuuccgggugcagcccaccgaauccaucgugcgguuccccaauaucaccaaucugugccccuucggcgagguguucaaugccaccagauucgccucuguguacgccuggaaccggaagcggaucagcaauugcguggccgacuacuccgugcuguacaacuccgccagcuucagcaccuucaagugcuacggcguguccccuaccaagcugaacgaccugugcuucacaaacguguacgccgacagcuucgugauccggggagaugaagugcggcagauugccccuggacagacaggcaagaucgccgacuacaacuacaagcugcccgacgacuucaccggcugugugauugccuggaacagcaacaaccuggacuccaaagucggcggcaacuacaauuaccuguaccggcuguuccggaaguccaaucugaagcccuucgagcgggacaucagcaccgaaaucuaucaggccggcagcaccccuugcaacggcguggaaggcuucaacugcuacuucccacugcaguccuacggcuuucagcccacauacggcgugggcuaucagcccuacagagugguggugcugagcuucgaacugcugcaugcuccugccacagugugcggcccuaagaaaagcaccaaucucgugaagaacaaaugcgugaacuucaacuucaacggccugaccggcaccggcgugcugacagagagcaacaagaaguuccugccauuccagcaguuuggccgggauaucgccgauaccacagacgccguuagagauccccagacacuggaaauccuggacaucaccccaugcagcuucggcggagugucugugaucaccccuggcaccaacaccagcaaucagguggcagugcuguaccagggcgugaacuguaccgaagugcccguggccauucacgccgaucagcugacaccuacauggcggguguacuccaccggcagcaauguguuucagaccagagccggcugucugaucggagccgagcacgugaacaauagcuacgagugcgacauccccaucggcgcuggcaucugugccagcuaccagacacagacaaacagccccagacgggcuagaagcguggccagccagagcaucauugccuacacaaugucucugggcgccgagaacagcguggccuacuccaacaacucuaucgcuauccccaccaacuucaccaucagcgugaccaccgagauccugccuguguccaugaccaagaccagcguggacugcaccauguacaucugcggcgauuccaccgagugcuccaaccugcugcugcaguacggcagcuucugcacccagcugaauagagcccugacagggaucgccguggaacaggacaagaacacccaagagguguucgcccaagugaagcaaaucuacaagaccccuccuaucaaggacuucggcggcuucaauuucagccagauucugcccgauccuagcaagcccagcaagcggagcuucaucgaggaccugcuguucaacaaagugacacuggccgacgccggcuucaucaagcaguauggcgauugucugggcgacauugccgccagggaucugauuugcgcccagaaguuuaacggacugacagugcugccuccucugcugaccgaugagaugaucgcccaguacacaucugcccugcuggccggcacaaucacaagcggcuggacauuuggagcuggcgccgcucugcagauccccuuugcuaugcagauggccuaccgguucaacggcaucggagugacccagaaugugcuguacgagaaccagaagcugaucgccaaccaguucaacagcgccaucggcaagauccaggacagccugagcagcacagcaagcgcccugggaaagcugcaggacguggucaaccagaaugcccaggcacugaacacccuggucaagcagcuguccuccaacuucggcgccaucagcucugugcugaacgauauccugagcagacuggacccuccugaggccgaggugcagaucgacagacugaucacaggcagacugcagagccuccagacauacgugacccagcagcugaucagagccgccgagauuagagccucugccaaucuggccgccaccaagaugucugagugugugcugggccagagcaagagaguggacuuuugcggcaagggcuaccaccugaugagcuucccucagucugccccucacggcgugguguuucugcacgugacauaugugcccgcucaagagaagaauuucaccaccgcuccagccaucugccacgacggcaaagcccacuuuccuagagaaggcguguucguguccaacggcacccauugguucgugacacagcggaacuucuacgagccccagaucaucaccaccgacaacaccuucgugucuggcaacugcgacguugugaucggcauugugaacaauaccguguacgacccucugcagcccgagcuggacagcuucaaagaggaacuggacaaguacuuuaagaaccacacaagccccgacguggaccugggcgauaucagcggaaucaaugccagcgucgugaacauccagaaagagaucgaccggcugaacgagguggccaagaaucugaacgagagccugaucgaccugcaagaacuggggaaguacgagcaguacaucaaguggcccugguacaucuggcugggcuuuaucgccggacugauugccaucgugauggucacaaucaugcuguguugcaugaccagcugcuguagcugccugaagggcuguuguagcuguggcagcugcugcaaguucgacgaggacgauucugagcccgugcugaagggcgugaaacugcacuacaccugaugacucgagcugguacugcaugcacgcaaugcuagcugccccuuucccguccuggguaccccgagucucccccgaccucgggucccagguaugcucccaccuccaccugccccacucaccaccucugcuaguuccagacaccucccaagcacgcagcaaugcagcucaaaacgcuuagccuagccacacccccacgggaaacagcagugauuaaccuuuagcaauaaacgaaaguuuaacuaagcuauacuaaccccaggguuggucaauuucgugccagccacacccuggagcuagcaaaaaaaaaaaaaaaaaaaaaaaaaaaaaagcauaugacuaaaaaaaaaaaaaaaaaaaaaaaaaaaaaaaaaaaaaaaaaaaaaaaaaaaaaaaaaaaaaaaaaaaaaa

SEQ ID NO: 26895 - RNA, 4277 nt, Artificial Sequence
  SARS-CoV-2/Wuhan/WIV05/2019__EPI_ISL_402128 spike protein mRNA gc mod (1-1273)(K986P_V987P_H69del_V70del_D614G)
agaauaaacuaguauucuucugguccccacagacucagagagaacccgccaccauguucguguuucuggugcugcugccccugguguccagccagugugugaaccugaccaccagaacacagcugccuccagccuacaccaacagcuucaccagaggcguguacuaccccgacaagguguucagauccagcgugcugcacucuacccaggaccuguuccugccuuucuucagcaacgugaccugguuccacgccaucuccggcaccaauggcaccaagagauucgacaaccccgugcugcccuucaacgacgggguguacuuugccagcaccgagaaguccaacaucaucagaggcuggaucuucggcaccacacuggacagcaagacccagagccugcugaucgugaacaacgccaccaacguggucaucaaagugugcgaguuccaguucugcaacgaccccuuccugggcgucuacuaccacaagaacaacaagagcuggauggaaagcgaguuccggguguacagcagcgccaacaacugcaccuucgaguacgugucccagccuuuccugauggaccuggaaggcaagcagggcaacuucaagaaccugcgcgaguucguguucaagaacaucgacggcuacuucaaaaucuacagcaagcacaccccuaucaaccucgugcgggaucugccucagggcuucucugcucuggaaccccugguggaucugcccaucggcaucaacaucacccgguuucagacacugcuggcccugcacagaagcuaccugacaccuggcgauagcagcagcggauggacagcuggugccgccgcuuacuaugugggcuaccugcagccuagaaccuuccugcugaaguacaacgagaacggcaccaucaccgacgccguggauugugcucuggauccucugagcgagacaaagugcacccugaaguccuucaccguggaaaagggcaucuaccagaccagcaacuuccgggugcagcccaccgaauccaucgugcgguuccccaauaucaccaaucugugccccuucggcgagguguucaaugccaccagauucgccucuguguacgccuggaaccggaagcggaucagcaauugcguggccgacuacuccgugcuguacaacuccgccagcuucagcaccuucaagugcuacggcguguccccuaccaagcugaacgaccugugcuucacaaacguguacgccgacagcuucgugauccggggagaugaagugcggcagauugccccuggacagacaggcaagaucgccgacuacaacuacaagcugcccgacgacuucaccggcugugugauugccuggaacagcaacaaccuggacuccaaagucggcggcaacuacaauuaccuguaccggcuguuccggaaguccaaucugaagcccuucgagcgggacaucagcaccgaaaucuaucaggccggcagcaccccuugcaacggcguggaaggcuucaacugcuacuucccacugcaguccuacggcuuucagcccacaaauggcgugggcuaucagcccuacagagugguggugcugagcuucgaacugcugcaugcuccugccacagugugcggcccuaagaaaagcaccaaucucgugaagaacaaaugcgugaacuucaacuucaacggccugaccggcaccggcgugcugacagagagcaacaagaaguuccugccauuccagcaguuuggccgggauaucgccgauaccacagacgccguuagagauccccagacacuggaaauccuggacaucaccccaugcagcuucggcggagugucugugaucaccccuggcaccaacaccagcaaucagguggcagugcuguaccagggcgugaacuguaccgaagugcccguggccauucacgccgaucagcugacaccuacauggcggguguacuccaccggcagcaauguguuucagaccagagccggcugucugaucggagccgagcacgugaacaauagcuacgagugcgacauccccaucggcgcuggcaucugugccagcuaccagacacagacaaacagccccagacgggcuagaagcguggccagccagagcaucauugccuacacaaugucucugggcgccgagaacagcguggccuacuccaacaacucuaucgcuauccccaccaacuucaccaucagcgugaccaccgagauccugccuguguccaugaccaagaccagcguggacugcaccauguacaucugcggcgauuccaccgagugcuccaaccugcugcugcaguacggcagcuucugcacccagcugaauagagcccugacagggaucgccguggaacaggacaagaacacccaagagguguucgcccaagugaagcaaaucuacaagaccccuccuaucaaggacuucggcggcuucaauuucagccagauucugcccgauccuagcaagcccagcaagcggagcuucaucgaggaccugcuguucaacaaagugacacuggccgacgccggcuucaucaagcaguauggcgauugucugggcgacauugccgccagggaucugauuugcgcccagaaguuuaacggacugacagugcugccuccucugcugaccgaugagaugaucgcccaguacacaucugcccugcuggccggcacaaucacaagcggcuggacauuuggagcuggcgccgcucugcagauccccuuugcuaugcagauggccuaccgguucaacggcaucggagugacccagaaugugcuguacgagaaccagaagcugaucgccaaccaguucaacagcgccaucggcaagauccaggacagccugagcagcacagcaagcgcccugggaaagcugcaggacguggucaaccagaaugcccaggcacugaacacccuggucaagcagcuguccuccaacuucggcgccaucagcucugugcugaacgauauccugagcagacuggacccuccugaggccgaggugcagaucgacagacugaucacaggcagacugcagagccuccagacauacgugacccagcagcugaucagagccgccgagauuagagccucugccaaucuggccgccaccaagaugucugagugugugcugggccagagcaagagaguggacuuuugcggcaagggcuaccaccugaugagcuucccucagucugccccucacggcgugguguuucugcacgugacauaugugcccgcucaagagaagaauuucaccaccgcuccagccaucugccacgacggcaaagcccacuuuccuagagaaggcguguucguguccaacggcacccauugguucgugacacagcggaacuucuacgagccccagaucaucaccaccgacaacaccuucgugucuggcaacugcgacguugugaucggcauugugaacaauaccguguacgacccucugcagcccgagcuggacagcuucaaagaggaacuggacaaguacuuuaagaaccacacaagccccgacguggaccugggcgauaucagcggaaucaaugccagcgucgugaacauccagaaagagaucgaccggcugaacgagguggccaagaaucugaacgagagccugaucgaccugcaagaacuggggaaguacgagcaguacaucaaguggcccugguacaucuggcugggcuuuaucgccggacugauugccaucgugauggucacaaucaugcuguguugcaugaccagcugcuguagcugccugaagggcuguuguagcuguggcagcugcugcaaguucgacgaggacgauucugagcccgugcugaagggcgugaaacugcacuacaccugaugacucgagcugguacugcaugcacgcaaugcuagcugccccuuucccguccuggguaccccgagucucccccgaccucgggucccagguaugcucccaccuccaccugccccacucaccaccucugcuaguuccagacaccucccaagcacgcagcaaugcagcucaaaacgcuuagccuagccacacccccacgggaaacagcagugauuaaccuuuagcaauaaacgaaaguuuaacuaagcuauacuaaccccaggguuggucaauuucgugccagccacacccuggagcuagcaaaaaaaaaaaaaaaaaaaaaaaaaaaaaagcauaugacuaaaaaaaaaaaaaaaaaaaaaaaaaaaaaaaaaaaaaaaaaaaaaaaaaaaaaaaaaaaaaaaaaaaaaa

SEQ ID NO: 26896 - RNA, 4283 nt, Artificial Sequence
  SARS-CoV-2/Wuhan/WIV05/2019__EPI_ISL_402128 spike protein mRNA gc mod (1-1273)(K986P_V987P_Y453F_D614G)
agaauaaacuaguauucuucugguccccacagacucagagagaacccgccaccauguucguguuucuggugcugcugccccugguguccagccagugugugaaccugaccaccagaacacagcugccuccagccuacaccaacagcuucaccagaggcguguacuaccccgacaagguguucagauccagcgugcugcacucuacccaggaccuguuccugccuuucuucagcaacgugaccugguuccacgccauccacguguccggcaccaauggcaccaagagauucgacaaccccgugcugcccuucaacgacgggguguacuuugccagcaccgagaaguccaacaucaucagaggcuggaucuucggcaccacacuggacagcaagacccagagccugcugaucgugaacaacgccaccaacguggucaucaaagugugcgaguuccaguucugcaacgaccccuuccugggcgucuacuaccacaagaacaacaagagcuggauggaaagcgaguuccggguguacagcagcgccaacaacugcaccuucgaguacgugucccagccuuuccugauggaccuggaaggcaagcagggcaacuucaagaaccugcgcgaguucguguucaagaacaucgacggcuacuucaaaaucuacagcaagcacaccccuaucaaccucgugcgggaucugccucagggcuucucugcucuggaaccccugguggaucugcccaucggcaucaacaucacccgguuucagacacugcuggcccugcacagaagcuaccugacaccuggcgauagcagcagcggauggacagcuggugccgccgcuuacuaugugggcuaccugcagccuagaaccuuccugcugaaguacaacgagaacggcaccaucaccgacgccguggauugugcucuggauccucugagcgagacaaagugcacccugaaguccuucaccguggaaaagggcaucuaccagaccagcaacuuccgggugcagcccaccgaauccaucgugcgguuccccaauaucaccaaucugugccccuucggcgagguguucaaugccaccagauucgccucuguguacgccuggaaccggaagcggaucagcaauugcguggccgacuacuccgugcuguacaacuccgccagcuucagcaccuucaagugcuacggcguguccccuaccaagcugaacgaccugugcuucacaaacguguacgccgacagcuucgugauccggggagaugaagugcggcagauugccccuggacagacaggcaagaucgccgacuacaacuacaagcugcccgacgacuucaccggcugugugauugccuggaacagcaacaaccuggacuccaaagucggcggcaacuacaauuaccuguuccggcuguuccggaaguccaaucugaagcccuucgagcgggacaucagcaccgaaaucuaucaggccggcagcaccccuugcaacggcguggaaggcuucaacugcuacuucccacugcaguccuacggcuuucagcccacaaauggcgugggcuaucagcccuacagagugguggugcugagcuucgaacugcugcaugcuccugccacagugugcggcccuaagaaaagcaccaaucucgugaagaacaaaugcgugaacuucaacuucaacggccugaccggcaccggcgugcugacagagagcaacaagaaguuccugccauuccagcaguuuggccgggauaucgccgauaccacagacgccguuagagauccccagacacuggaaauccuggacaucaccccaugcagcuucggcggagugucugugaucaccccuggcaccaacaccagcaaucagguggcagugcuguaccagggcgugaacuguaccgaagugcccguggccauucacgccgaucagcugacaccuacauggcggguguacuccaccggcagcaauguguuucagaccagagccggcugucugaucggagccgagcacgugaacaauagcuacgagugcgacauccccaucggcgcuggcaucugugccagcuaccagacacagacaaacagccccagacgggcuagaagcguggccagccagagcaucauugccuacacaaugucucugggcgccgagaacagcguggccuacuccaacaacucuaucgcuauccccaccaacuucaccaucagcgugaccaccgagauccugccuguguccaugaccaagaccagcguggacugcaccauguacaucugcggcgauuccaccgagugcuccaaccugcugcugcaguacggcagcuucugcacccagcugaauagagcccugacagggaucgccguggaacaggacaagaacacccaagagguguucgcccaagugaagcaaaucuacaagaccccuccuaucaaggacuucggcggcuucaauuucagccagauucugcccgauccuagcaagcccagcaagcggagcuucaucgaggaccugcuguucaacaaagugacacuggccgacgccggcuucaucaagcaguauggcgauugucugggcgacauugccgccagggaucugauuugcgcccagaaguuuaacggacugacagugcugccuccucugcugaccgaugagaugaucgcccaguacacaucugcccugcuggccggcacaaucacaagcggcuggacauuuggagcuggcgccgcucugcagauccccuuugcuaugcagauggccuaccgguucaacggcaucggagugacccagaaugugcuguacgagaaccagaagcugaucgccaaccaguucaacagcgccaucggcaagauccaggacagccugagcagcacagcaagcgcccugggaaagcugcaggacguggucaaccagaaugcccaggcacugaacacccuggucaagcagcuguccuccaacuucggcgccaucagcucugugcugaacgauauccugagcagacuggacccuccugaggccgaggugcagaucgacagacugaucacaggcagacugcagagccuccagacauacgugacccagcagcugaucagagccgccgagauuagagccucugccaaucuggccgccaccaagaugucugagugugugcugggccagagcaagagaguggacuuuugcggcaagggcuaccaccugaugagcuucccucagucugccccucacggcgugguguuucugcacgugacauaugugcccgcucaagagaagaauuucaccaccgcuccagccaucugccacgacggcaaagcccacuuuccuagagaaggcguguucguguccaacggcacccauugguucgugacacagcggaacuucuacgagccccagaucaucaccaccgacaacaccuucgugucuggcaacugcgacguugugaucggcauugugaacaauaccguguacgacccucugcagcccgagcuggacagcuucaaagaggaacuggacaaguacuuuaagaaccacacaagccccgacguggaccugggcgauaucagcggaaucaaugccagcgucgugaacauccagaaagagaucgaccggcugaacgagguggccaagaaucugaacgagagccugaucgaccugcaagaacuggggaaguacgagcaguacaucaaguggcccugguacaucuggcugggcuuuaucgccggacugauugccaucgugauggucacaaucaugcuguguugcaugaccagcugcuguagcugccugaagggcuguuguagcuguggcagcugcugcaaguucgacgaggacgauucugagcccgugcugaagggcgugaaacugcacuacaccugaugacucgagcugguacugcaugcacgcaaugcuagcugccccuuucccguccuggguaccccgagucucccccgaccucgggucccagguaugcucccaccuccaccugccccacucaccaccucugcuaguuccagacaccucccaagcacgcagcaaugcagcucaaaacgcuuagccuagccacacccccacgggaaacagcagugauuaaccuuuagcaauaaacgaaaguuuaacuaagcuauacuaaccccaggguuggucaauuucgugccagccacacccuggagcuagcaaaaaaaaaaaaaaaaaaaaaaaaaaaaaagcauaugacuaaaaaaaaaaaaaaaaaaaaaaaaaaaaaaaaaaaaaaaaaaaaaaaaaaaaaaaaaaaaaaaaaaaaaa

SEQ ID NO: 26897 - RNA, 4283 nt, Artificial Sequence
  SARS-CoV-2/Wuhan/WIV05/2019__EPI_ISL_402128 spike protein mRNA gc mod (1-1273)(K986P_V987P_D614G_I692V)
agaauaaacuaguauucuucugguccccacagacucagagagaacccgccaccauguucguguuucuggugcugcugccccugguguccagccagugugugaaccugaccaccagaacacagcugccuccagccuacaccaacagcuucaccagaggcguguacuaccccgacaagguguucagauccagcgugcugcacucuacccaggaccuguuccugccuuucuucagcaacgugaccugguuccacgccauccacguguccggcaccaauggcaccaagagauucgacaaccccgugcugcccuucaacgacgggguguacuuugccagcaccgagaaguccaacaucaucagaggcuggaucuucggcaccacacuggacagcaagacccagagccugcugaucgugaacaacgccaccaacguggucaucaaagugugcgaguuccaguucugcaacgaccccuuccugggcgucuacuaccacaagaacaacaagagcuggauggaaagcgaguuccggguguacagcagcgccaacaacugcaccuucgaguacgugucccagccuuuccugauggaccuggaaggcaagcagggcaacuucaagaaccugcgcgaguucguguucaagaacaucgacggcuacuucaaaaucuacagcaagcacaccccuaucaaccucgugcgggaucugccucagggcuucucugcucuggaaccccugguggaucugcccaucggcaucaacaucacccgguuucagacacugcuggcccugcacagaagcuaccugacaccuggcgauagcagcagcggauggacagcuggugccgccgcuuacuaugugggcuaccugcagccuagaaccuuccugcugaaguacaacgagaacggcaccaucaccgacgccguggauugugcucuggauccucugagcgagacaaagugcacccugaaguccuucaccguggaaaagggcaucuaccagaccagcaacuuccgggugcagcccaccgaauccaucgugcgguuccccaauaucaccaaucugugccccuucggcgagguguucaaugccaccagauucgccucuguguacgccuggaaccggaagcggaucagcaauugcguggccgacuacuccgugcuguacaacuccgccagcuucagcaccuucaagugcuacggcguguccccuaccaagcugaacgaccugugcuucacaaacguguacgccgacagcuucgugauccggggagaugaagugcggcagauugccccuggacagacaggcaagaucgccgacuacaacuacaagcugcccgacgacuucaccggcugugugauugccuggaacagcaacaaccuggacuccaaagucggcggcaacuacaauuaccuguaccggcuguuccggaaguccaaucugaagcccuucgagcgggacaucagcaccgaaaucuaucaggccggcagcaccccuugcaacggcguggaaggcuucaacugcuacuucccacugcaguccuacggcuuucagcccacaaauggcgugggcuaucagcccuacagagugguggugcugagcuucgaacugcugcaugcuccugccacagugugcggcccuaagaaaagcaccaaucucgugaagaacaaaugcgugaacuucaacuucaacggccugaccggcaccggcgugcugacagagagcaacaagaaguuccugccauuccagcaguuuggccgggauaucgccgauaccacagacgccguuagagauccccagacacuggaaauccuggacaucaccccaugcagcuucggcggagugucugugaucaccccuggcaccaacaccagcaaucagguggcagugcuguaccagggcgugaacuguaccgaagugcccguggccauucacgccgaucagcugacaccuacauggcggguguacuccaccggcagcaauguguuucagaccagagccggcugucugaucggagccgagcacgugaacaauagcuacgagugcgacauccccaucggcgcuggcaucugugccagcuaccagacacagacaaacagccccagacgggcuagaagcguggccagccagagcgugauugccuacacaaugucucugggcgccgagaacagcguggccuacuccaacaacucuaucgcuauccccaccaacuucaccaucagcgugaccaccgagauccugccuguguccaugaccaagaccagcguggacugcaccauguacaucugcggcgauuccaccgagugcuccaaccugcugcugcaguacggcagcuucugcacccagcugaauagagcccugacagggaucgccguggaacaggacaagaacacccaagagguguucgcccaagugaagcaaaucuacaagaccccuccuaucaaggacuucggcggcuucaauuucagccagauucugcccgauccuagcaagcccagcaagcggagcuucaucgaggaccugcuguucaacaaagugacacuggccgacgccggcuucaucaagcaguauggcgauugucugggcgacauugccgccagggaucugauuugcgcccagaaguuuaacggacugacagugcugccuccucugcugaccgaugagaugaucgcccaguacacaucugcccugcuggccggcacaaucacaagcggcuggacauuuggagcuggcgccgcucugcagauccccuuugcuaugcagauggccuaccgguucaacggcaucggagugacccagaaugugcuguacgagaaccagaagcugaucgccaaccaguucaacagcgccaucggcaagauccaggacagccugagcagcacagcaagcgcccugggaaagcugcaggacguggucaaccagaaugcccaggcacugaacacccuggucaagcagcuguccuccaacuucggcgccaucagcucugugcugaacgauauccugagcagacuggacccuccugaggccgaggugcagaucgacagacugaucacaggcagacugcagagccuccagacauacgugacccagcagcugaucagagccgccgagauuagagccucugccaaucuggccgccaccaagaugucugagugugugcugggccagagcaagagaguggacuuuugcggcaagggcuaccaccugaugagcuucccucagucugccccucacggcgugguguuucugcacgugacauaugugcccgcucaagagaagaauuucaccaccgcuccagccaucugccacgacggcaaagcccacuuuccuagagaaggcguguucguguccaacggcacccauugguucgugacacagcggaacuucuacgagccccagaucaucaccaccgacaacaccuucgugucuggcaacugcgacguugugaucggcauugugaacaauaccguguacgacccucugcagcccgagcuggacagcuucaaagaggaacuggacaaguacuuuaagaaccacacaagccccgacguggaccugggcgauaucagcggaaucaaugccagcgucgugaacauccagaaagagaucgaccggcugaacgagguggccaagaaucugaacgagagccugaucgaccugcaagaacuggggaaguacgagcaguacaucaaguggcccugguacaucuggcugggcuuuaucgccggacugauugccaucgugauggucacaaucaugcuguguugcaugaccagcugcuguagcugccugaagggcuguuguagcuguggcagcugcugcaaguucgacgaggacgauucugagcccgugcugaagggcgugaaacugcacuacaccugaugacucgagcugguacugcaugcacgcaaugcuagcugccccuuucccguccuggguaccccgagucucccccgaccucgggucccagguaugcucccaccuccaccugccccacucaccaccucugcuaguuccagacaccucccaagcacgcagcaaugcagcucaaaacgcuuagccuagccacacccccacgggaaacagcagugauuaaccuuuagcaauaaacgaaaguuuaacuaagcuauacuaaccccaggguuggucaauuucgugccagccacacccuggagcuagcaaaaaaaaaaaaaaaaaaaaaaaaaaaaaagcauaugacuaaaaaaaaaaaaaaaaaaaaaaaaaaaaaaaaaaaaaaaaaaaaaaaaaaaaaaaaaaaaaaaaaaaaaa

SEQ ID NO: 26898 - RNA, 4283 nt, Artificial Sequence
  SARS-CoV-2/Wuhan/WIV05/2019__EPI_ISL_402128 spike protein mRNA gc mod (1-1273)(K986P_V987P_D614G_M1229I)
agaauaaacuaguauucuucugguccccacagacucagagagaacccgccaccauguucguguuucuggugcugcugccccugguguccagccagugugugaaccugaccaccagaacacagcugccuccagccuacaccaacagcuucaccagaggcguguacuaccccgacaagguguucagauccagcgugcugcacucuacccaggaccuguuccugccuuucuucagcaacgugaccugguuccacgccauccacguguccggcaccaauggcaccaagagauucgacaaccccgugcugcccuucaacgacgggguguacuuugccagcaccgagaaguccaacaucaucagaggcuggaucuucggcaccacacuggacagcaagacccagagccugcugaucgugaacaacgccaccaacguggucaucaaagugugcgaguuccaguucugcaacgaccccuuccugggcgucuacuaccacaagaacaacaagagcuggauggaaagcgaguuccggguguacagcagcgccaacaacugcaccuucgaguacgugucccagccuuuccugauggaccuggaaggcaagcagggcaacuucaagaaccugcgcgaguucguguucaagaacaucgacggcuacuucaaaaucuacagcaagcacaccccuaucaaccucgugcgggaucugccucagggcuucucugcucuggaaccccugguggaucugcccaucggcaucaacaucacccgguuucagacacugcuggcccugcacagaagcuaccugacaccuggcgauagcagcagcggauggacagcuggugccgccgcuuacuaugugggcuaccugcagccuagaaccuuccugcugaaguacaacgagaacggcaccaucaccgacgccguggauugugcucuggauccucugagcgagacaaagugcacccugaaguccuucaccguggaaaagggcaucuaccagaccagcaacuuccgggugcagcccaccgaauccaucgugcgguuccccaauaucaccaaucugugccccuucggcgagguguucaaugccaccagauucgccucuguguacgccuggaaccggaagcggaucagcaauugcguggccgacuacuccgugcuguacaacuccgccagcuucagcaccuucaagugcuacggcguguccccuaccaagcugaacgaccugugcuucacaaacguguacgccgacagcuucgugauccggggagaugaagugcggcagauugccccuggacagacaggcaagaucgccgacuacaacuacaagcugcccgacgacuucaccggcugugugauugccuggaacagcaacaaccuggacuccaaagucggcggcaacuacaauuaccuguaccggcuguuccggaaguccaaucugaagcccuucgagcgggacaucagcaccgaaaucuaucaggccggcagcaccccuugcaacggcguggaaggcuucaacugcuacuucccacugcaguccuacggcuuucagcccacaaauggcgugggcuaucagcccuacagagugguggugcugagcuucgaacugcugcaugcuccugccacagugugcggcccuaagaaaagcaccaaucucgugaagaacaaaugcgugaacuucaacuucaacggccugaccggcaccggcgugcugacagagagcaacaagaaguuccugccauuccagcaguuuggccgggauaucgccgauaccacagacgccguuagagauccccagacacuggaaauccuggacaucaccccaugcagcuucggcggagugucugugaucaccccuggcaccaacaccagcaaucagguggcagugcuguaccagggcgugaacuguaccgaagugcccguggccauucacgccgaucagcugacaccuacauggcggguguacuccaccggcagcaauguguuucagaccagagccggcugucugaucggagccgagcacgugaacaauagcuacgagugcgacauccccaucggcgcuggcaucugugccagcuaccagacacagacaaacagccccagacgggcuagaagcguggccagccagagcaucauugccuacacaaugucucugggcgccgagaacagcguggccuacuccaacaacucuaucgcuauccccaccaacuucaccaucagcgugaccaccgagauccugccuguguccaugaccaagaccagcguggacugcaccauguacaucugcggcgauuccaccgagugcuccaaccugcugcugcaguacggcagcuucugcacccagcugaauagagcccugacagggaucgccguggaacaggacaagaacacccaagagguguucgcccaagugaagcaaaucuacaagaccccuccuaucaaggacuucggcggcuucaauuucagccagauucugcccgauccuagcaagcccagcaagcggagcuucaucgaggaccugcuguucaacaaagugacacuggccgacgccggcuucaucaagcaguauggcgauugucugggcgacauugccgccagggaucugauuugcgcccagaaguuuaacggacugacagugcugccuccucugcugaccgaugagaugaucgcccaguacacaucugcccugcuggccggcacaaucacaagcggcuggacauuuggagcuggcgccgcucugcagauccccuuugcuaugcagauggccuaccgguucaacggcaucggagugacccagaaugugcuguacgagaaccagaagcugaucgccaaccaguucaacagcgccaucggcaagauccaggacagccugagcagcacagcaagcgcccugggaaagcugcaggacguggucaaccagaaugcccaggcacugaacacccuggucaagcagcuguccuccaacuucggcgccaucagcucugugcugaacgauauccugagcagacuggacccuccugaggccgaggugcagaucgacagacugaucacaggcagacugcagagccuccagacauacgugacccagcagcugaucagagccgccgagauuagagccucugccaaucuggccgccaccaagaugucugagugugugcugggccagagcaagagaguggacuuuugcggcaagggcuaccaccugaugagcuucccucagucugccccucacggcgugguguuucugcacgugacauaugugcccgcucaagagaagaauuucaccaccgcuccagccaucugccacgacggcaaagcccacuuuccuagagaaggcguguucguguccaacggcacccauugguucgugacacagcggaacuucuacgagccccagaucaucaccaccgacaacaccuucgugucuggcaacugcgacguugugaucggcauugugaacaauaccguguacgacccucugcagcccgagcuggacagcuucaaagaggaacuggacaaguacuuuaagaaccacacaagccccgacguggaccugggcgauaucagcggaaucaaugccagcgucgugaacauccagaaagagaucgaccggcugaacgagguggccaagaaucugaacgagagccugaucgaccugcaagaacuggggaaguacgagcaguacaucaaguggcccugguacaucuggcugggcuuuaucgccggacugauugccaucgugaucgucacaaucaugcuguguugcaugaccagcugcuguagcugccugaagggcuguuguagcuguggcagcugcugcaaguucgacgaggacgauucugagcccgugcugaagggcgugaaacugcacuacaccugaugacucgagcugguacugcaugcacgcaaugcuagcugccccuuucccguccuggguaccccgagucucccccgaccucgggucccagguaugcucccaccuccaccugccccacucaccaccucugcuaguuccagacaccucccaagcacgcagcaaugcagcucaaaacgcuuagccuagccacacccccacgggaaacagcagugauuaaccuuuagcaauaaacgaaaguuuaacuaagcuauacuaaccccaggguuggucaauuucgugccagccacacccuggagcuagcaaaaaaaaaaaaaaaaaaaaaaaaaaaaaagcauaugacuaaaaaaaaaaaaaaaaaaaaaaaaaaaaaaaaaaaaaaaaaaaaaaaaaaaaaaaaaaaaaaaaaaaaaa

SEQ ID NO: 26899 - RNA, 4277 nt, Artificial Sequence
  SARS-CoV-2/Wuhan/WIV05/2019__EPI_ISL_402128 spike protein mRNA gc mod (1-1273)(K986P_V987P_H69del_V70del_A222V_Y453F_S477N_D614G_I692V)
agaauaaacuaguauucuucugguccccacagacucagagagaacccgccaccauguucguguuucuggugcugcugccccugguguccagccagugugugaaccugaccaccagaacacagcugccuccagccuacaccaacagcuucaccagaggcguguacuaccccgacaagguguucagauccagcgugcugcacucuacccaggaccuguuccugccuuucuucagcaacgugaccugguuccacgccaucuccggcaccaauggcaccaagagauucgacaaccccgugcugcccuucaacgacgggguguacuuugccagcaccgagaaguccaacaucaucagaggcuggaucuucggcaccacacuggacagcaagacccagagccugcugaucgugaacaacgccaccaacguggucaucaaagugugcgaguuccaguucugcaacgaccccuuccugggcgucuacuaccacaagaacaacaagagcuggauggaaagcgaguuccggguguacagcagcgccaacaacugcaccuucgaguacgugucccagccuuuccugauggaccuggaaggcaagcagggcaacuucaagaaccugcgcgaguucguguucaagaacaucgacggcuacuucaaaaucuacagcaagcacaccccuaucaaccucgugcgggaucugccucagggcuucucugugcuggaaccccugguggaucugcccaucggcaucaacaucacccgguuucagacacugcuggcccugcacagaagcuaccugacaccuggcgauagcagcagcggauggacagcuggugccgccgcuuacuaugugggcuaccugcagccuagaaccuuccugcugaaguacaacgagaacggcaccaucaccgacgccguggauugugcucuggauccucugagcgagacaaagugcacccugaaguccuucaccguggaaaagggcaucuaccagaccagcaacuuccgggugcagcccaccgaauccaucgugcgguuccccaauaucaccaaucugugccccuucggcgagguguucaaugccaccagauucgccucuguguacgccuggaaccggaagcggaucagcaauugcguggccgacuacuccgugcuguacaacuccgccagcuucagcaccuucaagugcuacggcguguccccuaccaagcugaacgaccugugcuucacaaacguguacgccgacagcuucgugauccggggagaugaagugcggcagauugccccuggacagacaggcaagaucgccgacuacaacuacaagcugcccgacgacuucaccggcugugugauugccuggaacagcaacaaccuggacuccaaagucggcggcaacuacaauuaccuguuccggcuguuccggaaguccaaucugaagcccuucgagcgggacaucagcaccgaaaucuaucaggccggcaacaccccuugcaacggcguggaaggcuucaacugcuacuucccacugcaguccuacggcuuucagcccacaaauggcgugggcuaucagcccuacagagugguggugcugagcuucgaacugcugcaugcuccugccacagugugcggcccuaagaaaagcaccaaucucgugaagaacaaaugcgugaacuucaacuucaacggccugaccggcaccggcgugcugacagagagcaacaagaaguuccugccauuccagcaguuuggccgggauaucgccgauaccacagacgccguuagagauccccagacacuggaaauccuggacaucaccccaugcagcuucggcggagugucugugaucaccccuggcaccaacaccagcaaucagguggcagugcuguaccagggcgugaacuguaccgaagugcccguggccauucacgccgaucagcugacaccuacauggcggguguacuccaccggcagcaauguguuucagaccagagccggcugucugaucggagccgagcacgugaacaauagcuacgagugcgacauccccaucggcgcuggcaucugugccagcuaccagacacagacaaacagccccagacgggcuagaagcguggccagccagagcgugauugccuacacaaugucucugggcgccgagaacagcguggccuacuccaacaacucuaucgcuauccccaccaacuucaccaucagcgugaccaccgagauccugccuguguccaugaccaagaccagcguggacugcaccauguacaucugcggcgauuccaccgagugcuccaaccugcugcugcaguacggcagcuucugcacccagcugaauagagcccugacagggaucgccguggaacaggacaagaacacccaagagguguucgcccaagugaagcaaaucuacaagaccccuccuaucaaggacuucggcggcuucaauuucagccagauucugcccgauccuagcaagcccagcaagcggagcuucaucgaggaccugcuguucaacaaagugacacuggccgacgccggcuucaucaagcaguauggcgauugucugggcgacauugccgccagggaucugauuugcgcccagaaguuuaacggacugacagugcugccuccucugcugaccgaugagaugaucgcccaguacacaucugcccugcuggccggcacaaucacaagcggcuggacauuuggagcuggcgccgcucugcagauccccuuugcuaugcagauggccuaccgguucaacggcaucggagugacccagaaugugcuguacgagaaccagaagcugaucgccaaccaguucaacagcgccaucggcaagauccaggacagccugagcagcacagcaagcgcccugggaaagcugcaggacguggucaaccagaaugcccaggcacugaacacccuggucaagcagcuguccuccaacuucggcgccaucagcucugugcugaacgauauccugagcagacuggacccuccugaggccgaggugcagaucgacagacugaucacaggcagacugcagagccuccagacauacgugacccagcagcugaucagagccgccgagauuagagccucugccaaucuggccgccaccaagaugucugagugugugcugggccagagcaagagaguggacuuuugcggcaagggcuaccaccugaugagcuucccucagucugccccucacggcgugguguuucugcacgugacauaugugcccgcucaagagaagaauuucaccaccgcuccagccaucugccacgacggcaaagcccacuuuccuagagaaggcguguucguguccaacggcacccauugguucgugacacagcggaacuucuacgagccccagaucaucaccaccgacaacaccuucgugucuggcaacugcgacguugugaucggcauugugaacaauaccguguacgacccucugcagcccgagcuggacagcuucaaagaggaacuggacaaguacuuuaagaaccacacaagccccgacguggaccugggcgauaucagcggaaucaaugccagcgucgugaacauccagaaagagaucgaccggcugaacgagguggccaagaaucugaacgagagccugaucgaccugcaagaacuggggaaguacgagcaguacaucaaguggcccugguacaucuggcugggcuuuaucgccggacugauugccaucgugauggucacaaucaugcuguguugcaugaccagcugcuguagcugccugaagggcuguuguagcuguggcagcugcugcaaguucgacgaggacgauucugagcccgugcugaagggcgugaaacugcacuacaccugaugacucgagcugguacugcaugcacgcaaugcuagcugccccuuucccguccuggguaccccgagucucccccgaccucgggucccagguaugcucccaccuccaccugccccacucaccaccucugcuaguuccagacaccucccaagcacgcagcaaugcagcucaaaacgcuuagccuagccacacccccacgggaaacagcagugauuaaccuuuagcaauaaacgaaaguuuaacuaagcuauacuaaccccaggguuggucaauuucgugccagccacacccuggagcuagcaaaaaaaaaaaaaaaaaaaaaaaaaaaaaagcauaugacuaaaaaaaaaaaaaaaaaaaaaaaaaaaaaaaaaaaaaaaaaaaaaaaaaaaaaaaaaaaaaaaaaaaaaa

SEQ ID NO: 26900 - RNA, 4277 nt, Artificial Sequence
  SARS-CoV-2/Wuhan/WIV05/2019__EPI_ISL_402128 spike protein mRNA gc mod (1-1273)(K986P_V987P_H69del_V70del_Y453F_D614G_I692V_M1229I)
agaauaaacuaguauucuucugguccccacagacucagagagaacccgccaccauguucguguuucuggugcugcugccccugguguccagccagugugugaaccugaccaccagaacacagcugccuccagccuacaccaacagcuucaccagaggcguguacuaccccgacaagguguucagauccagcgugcugcacucuacccaggaccuguuccugccuuucuucagcaacgugaccugguuccacgccaucuccggcaccaauggcaccaagagauucgacaaccccgugcugcccuucaacgacgggguguacuuugccagcaccgagaaguccaacaucaucagaggcuggaucuucggcaccacacuggacagcaagacccagagccugcugaucgugaacaacgccaccaacguggucaucaaagugugcgaguuccaguucugcaacgaccccuuccugggcgucuacuaccacaagaacaacaagagcuggauggaaagcgaguuccggguguacagcagcgccaacaacugcaccuucgaguacgugucccagccuuuccugauggaccuggaaggcaagcagggcaacuucaagaaccugcgcgaguucguguucaagaacaucgacggcuacuucaaaaucuacagcaagcacaccccuaucaaccucgugcgggaucugccucagggcuucucugcucuggaaccccugguggaucugcccaucggcaucaacaucacccgguuucagacacugcuggcccugcacagaagcuaccugacaccuggcgauagcagcagcggauggacagcuggugccgccgcuuacuaugugggcuaccugcagccuagaaccuuccugcugaaguacaacgagaacggcaccaucaccgacgccguggauugugcucuggauccucugagcgagacaaagugcacccugaaguccuucaccguggaaaagggcaucuaccagaccagcaacuuccgggugcagcccaccgaauccaucgugcgguuccccaauaucaccaaucugugccccuucggcgagguguucaaugccaccagauucgccucuguguacgccuggaaccggaagcggaucagcaauugcguggccgacuacuccgugcuguacaacuccgccagcuucagcaccuucaagugcuacggcguguccccuaccaagcugaacgaccugugcuucacaaacguguacgccgacagcuucgugauccggggagaugaagugcggcagauugccccuggacagacaggcaagaucgccgacuacaacuacaagcugcccgacgacuucaccggcugugugauugccuggaacagcaacaaccuggacuccaaagucggcggcaacuacaauuaccuguuccggcuguuccggaaguccaaucugaagcccuucgagcgggacaucagcaccgaaaucuaucaggccggcagcaccccuugcaacggcguggaaggcuucaacugcuacuucccacugcaguccuacggcuuucagcccacaaauggcgugggcuaucagcccuacagagugguggugcugagcuucgaacugcugcaugcuccugccacagugugcggcccuaagaaaagcaccaaucucgugaagaacaaaugcgugaacuucaacuucaacggccugaccggcaccggcgugcugacagagagcaacaagaaguuccugccauuccagcaguuuggccgggauaucgccgauaccacagacgccguuagagauccccagacacuggaaauccuggacaucaccccaugcagcuucggcggagugucugugaucaccccuggcaccaacaccagcaaucagguggcagugcuguaccagggcgugaacuguaccgaagugcccguggccauucacgccgaucagcugacaccuacauggcggguguacuccaccggcagcaauguguuucagaccagagccggcugucugaucggagccgagcacgugaacaauagcuacgagugcgacauccccaucggcgcuggcaucugugccagcuaccagacacagacaaacagccccagacgggcuagaagcguggccagccagagcgugauugccuacacaaugucucugggcgccgagaacagcguggccuacuccaacaacucuaucgcuauccccaccaacuucaccaucagcgugaccaccgagauccugccuguguccaugaccaagaccagcguggacugcaccauguacaucugcggcgauuccaccgagugcuccaaccugcugcugcaguacggcagcuucugcacccagcugaauagagcccugacagggaucgccguggaacaggacaagaacacccaagagguguucgcccaagugaagcaaaucuacaagaccccuccuaucaaggacuucggcggcuucaauuucagccagauucugcccgauccuagcaagcccagcaagcggagcuucaucgaggaccugcuguucaacaaagugacacuggccgacgccggcuucaucaagcaguauggcgauugucugggcgacauugccgccagggaucugauuugcgcccagaaguuuaacggacugacagugcugccuccucugcugaccgaugagaugaucgcccaguacacaucugcccugcuggccggcacaaucacaagcggcuggacauuuggagcuggcgccgcucugcagauccccuuugcuaugcagauggccuaccgguucaacggcaucggagugacccagaaugugcuguacgagaaccagaagcugaucgccaaccaguucaacagcgccaucggcaagauccaggacagccugagcagcacagcaagcgcccugggaaagcugcaggacguggucaaccagaaugcccaggcacugaacacccuggucaagcagcuguccuccaacuucggcgccaucagcucugugcugaacgauauccugagcagacuggacccuccugaggccgaggugcagaucgacagacugaucacaggcagacugcagagccuccagacauacgugacccagcagcugaucagagccgccgagauuagagccucugccaaucuggccgccaccaagaugucugagugugugcugggccagagcaagagaguggacuuuugcggcaagggcuaccaccugaugagcuucccucagucugccccucacggcgugguguuucugcacgugacauaugugcccgcucaagagaagaauuucaccaccgcuccagccaucugccacgacggcaaagcccacuuuccuagagaaggcguguucguguccaacggcacccauugguucgugacacagcggaacuucuacgagccccagaucaucaccaccgacaacaccuucgugucuggcaacugcgacguugugaucggcauugugaacaauaccguguacgacccucugcagcccgagcuggacagcuucaaagaggaacuggacaaguacuuuaagaaccacacaagccccgacguggaccugggcgauaucagcggaaucaaugccagcgucgugaacauccagaaagagaucgaccggcugaacgagguggccaagaaucugaacgagagccugaucgaccugcaagaacuggggaaguacgagcaguacaucaaguggcccugguacaucuggcugggcuuuaucgccggacugauugccaucgugaucgucacaaucaugcuguguugcaugaccagcugcuguagcugccugaagggcuguuguagcuguggcagcugcugcaaguucgacgaggacgauucugagcccgugcugaagggcgugaaacugcacuacaccugaugacucgagcugguacugcaugcacgcaaugcuagcugccccuuucccguccuggguaccccgagucucccccgaccucgggucccagguaugcucccaccuccaccugccccacucaccaccucugcuaguuccagacaccucccaagcacgcagcaaugcagcucaaaacgcuuagccuagccacacccccacgggaaacagcagugauuaaccuuuagcaauaaacgaaaguuuaacuaagcuauacuaaccccaggguuggucaauuucgugccagccacacccuggagcuagcaaaaaaaaaaaaaaaaaaaaaaaaaaaaaagcauaugacuaaaaaaaaaaaaaaaaaaaaaaaaaaaaaaaaaaaaaaaaaaaaaaaaaaaaaaaaaaaaaaaaaaaaaa

SEQ ID NO: 26901 - RNA, 4274 nt, Artificial Sequence
  SARS-CoV-2/Wuhan/WIV05/2019__EPI_ISL_402128 spike protein mRNA gc mod (1-1273)(K986P_V987P_K986P_V987P_H69del_V70del_Y144del_N501Y_A570 D_D614G_P681H_T716I_S982A_D1118H)
agaauaaacuaguauucuucugguccccacagacucagagagaacccgccaccauguucguguuucuggugcugcugccccugguguccagccagugugugaaccugaccaccagaacacagcugccuccagccuacaccaacagcuucaccagaggcguguacuaccccgacaagguguucagauccagcgugcugcacucuacccaggaccuguuccugccuuucuucagcaacgugaccugguuccacgccaucuccggcaccaauggcaccaagagauucgacaaccccgugcugcccuucaacgacgggguguacuuugccagcaccgagaaguccaacaucaucagaggcuggaucuucggcaccacacuggacagcaagacccagagccugcugaucgugaacaacgccaccaacguggucaucaaagugugcgaguuccaguucugcaacgaccccuuccugggcgucuaccacaagaacaacaagagcuggauggaaagcgaguuccggguguacagcagcgccaacaacugcaccuucgaguacgugucccagccuuuccugauggaccuggaaggcaagcagggcaacuucaagaaccugcgcgaguucguguucaagaacaucgacggcuacuucaaaaucuacagcaagcacaccccuaucaaccucgugcgggaucugccucagggcuucucugcucuggaaccccugguggaucugcccaucggcaucaacaucacccgguuucagacacugcuggcccugcacagaagcuaccugacaccuggcgauagcagcagcggauggacagcuggugccgccgcuuacuaugugggcuaccugcagccuagaaccuuccugcugaaguacaacgagaacggcaccaucaccgacgccguggauugugcucuggauccucugagcgagacaaagugcacccugaaguccuucaccguggaaaagggcaucuaccagaccagcaacuuccgggugcagcccaccgaauccaucgugcgguuccccaauaucaccaaucugugccccuucggcgagguguucaaugccaccagauucgccucuguguacgccuggaaccggaagcggaucagcaauugcguggccgacuacuccgugcuguacaacuccgccagcuucagcaccuucaagugcuacggcguguccccuaccaagcugaacgaccugugcuucacaaacguguacgccgacagcuucgugauccggggagaugaagugcggcagauugccccuggacagacaggcaagaucgccgacuacaacuacaagcugcccgacgacuucaccggcugugugauugccuggaacagcaacaaccuggacuccaaagucggcggcaacuacaauuaccuguaccggcuguuccggaaguccaaucugaagcccuucgagcgggacaucagcaccgaaaucuaucaggccggcagcaccccuugcaacggcguggaaggcuucaacugcuacuucccacugcaguccuacggcuuucagcccacauacggcgugggcuaucagcccuacagagugguggugcugagcuucgaacugcugcaugcuccugccacagugugcggcccuaagaaaagcaccaaucucgugaagaacaaaugcgugaacuucaacuucaacggccugaccggcaccggcgugcugacagagagcaacaagaaguuccugccauuccagcaguuuggccgggauaucgacgauaccacagacgccguuagagauccccagacacuggaaauccuggacaucaccccaugcagcuucggcggagugucugugaucaccccuggcaccaacaccagcaaucagguggcagugcuguaccagggcgugaacuguaccgaagugcccguggccauucacgccgaucagcugacaccuacauggcggguguacuccaccggcagcaauguguuucagaccagagccggcugucugaucggagccgagcacgugaacaauagcuacgagugcgacauccccaucggcgcuggcaucugugccagcuaccagacacagacaaacagccacagacgggcuagaagcguggccagccagagcaucauugccuacacaaugucucugggcgccgagaacagcguggccuacuccaacaacucuaucgcuauccccaucaacuucaccaucagcgugaccaccgagauccugccuguguccaugaccaagaccagcguggacugcaccauguacaucugcggcgauuccaccgagugcuccaaccugcugcugcaguacggcagcuucugcacccagcugaauagagcccugacagggaucgccguggaacaggacaagaacacccaagagguguucgcccaagugaagcaaaucuacaagaccccuccuaucaaggacuucggcggcuucaauuucagccagauucugcccgauccuagcaagcccagcaagcggagcuucaucgaggaccugcuguucaacaaagugacacuggccgacgccggcuucaucaagcaguauggcgauugucugggcgacauugccgccagggaucugauuugcgcccagaaguuuaacggacugacagugcugccuccucugcugaccgaugagaugaucgcccaguacacaucugcccugcuggccggcacaaucacaagcggcuggacauuuggagcuggcgccgcucugcagauccccuuugcuaugcagauggccuaccgguucaacggcaucggagugacccagaaugugcuguacgagaaccagaagcugaucgccaaccaguucaacagcgccaucggcaagauccaggacagccugagcagcacagcaagcgcccugggaaagcugcaggacguggucaaccagaaugcccaggcacugaacacccuggucaagcagcuguccuccaacuucggcgccaucagcucugugcugaacgauauccuggccagacuggacccuccugaggccgaggugcagaucgacagacugaucacaggcagacugcagagccuccagacauacgugacccagcagcugaucagagccgccgagauuagagccucugccaaucuggccgccaccaagaugucugagugugugcugggccagagcaagagaguggacuuuugcggcaagggcuaccaccugaugagcuucccucagucugccccucacggcgugguguuucugcacgugacauaugugcccgcucaagagaagaauuucaccaccgcuccagccaucugccacgacggcaaagcccacuuuccuagagaaggcguguucguguccaacggcacccauugguucgugacacagcggaacuucuacgagccccagaucaucaccacccacaacaccuucgugucuggcaacugcgacguugugaucggcauugugaacaauaccguguacgacccucugcagcccgagcuggacagcuucaaagaggaacuggacaaguacuuuaagaaccacacaagccccgacguggaccugggcgauaucagcggaaucaaugccagcgucgugaacauccagaaagagaucgaccggcugaacgagguggccaagaaucugaacgagagccugaucgaccugcaagaacuggggaaguacgagcaguacaucaaguggcccugguacaucuggcugggcuuuaucgccggacugauugccaucgugauggucacaaucaugcuguguugcaugaccagcugcuguagcugccugaagggcuguuguagcuguggcagcugcugcaaguucgacgaggacgauucugagcccgugcugaagggcgugaaacugcacuacaccugaugacucgagcugguacugcaugcacgcaaugcuagcugccccuuucccguccuggguaccccgagucucccccgaccucgggucccagguaugcucccaccuccaccugccccacucaccaccucugcuaguuccagacaccucccaagcacgcagcaaugcagcucaaaacgcuuagccuagccacacccccacgggaaacagcagugauuaaccuuuagcaauaaacgaaaguuuaacuaagcuauacuaaccccaggguuggucaauuucgugccagccacacccuggagcuagcaaaaaaaaaaaaaaaaaaaaaaaaaaaaaagcauaugacuaaaaaaaaaaaaaaaaaaaaaaaaaaaaaaaaaaaaaaaaaaaaaaaaaaaaaaaaaaaaaaaaaaaaaa

SEQ ID NO: 26902 - RNA, 4283 nt, Artificial Sequence
  SARS-CoV-2/Wuhan/WIV05/2019__EPI_ISL_402128 spike protein mRNA gc mod (1-1273)(K986P_V987P_K986P_V987P_K417N_E484K_N501Y_D614G)
agaauaaacuaguauucuucugguccccacagacucagagagaacccgccaccauguucguguuucuggugcugcugccccugguguccagccagugugugaaccugaccaccagaacacagcugccuccagccuacaccaacagcuucaccagaggcguguacuaccccgacaagguguucagauccagcgugcugcacucuacccaggaccuguuccugccuuucuucagcaacgugaccugguuccacgccauccacguguccggcaccaauggcaccaagagauucgacaaccccgugcugcccuucaacgacgggguguacuuugccagcaccgagaaguccaacaucaucagaggcuggaucuucggcaccacacuggacagcaagacccagagccugcugaucgugaacaacgccaccaacguggucaucaaagugugcgaguuccaguucugcaacgaccccuuccugggcgucuacuaccacaagaacaacaagagcuggauggaaagcgaguuccggguguacagcagcgccaacaacugcaccuucgaguacgugucccagccuuuccugauggaccuggaaggcaagcagggcaacuucaagaaccugcgcgaguucguguucaagaacaucgacggcuacuucaaaaucuacagcaagcacaccccuaucaaccucgugcgggaucugccucagggcuucucugcucuggaaccccugguggaucugcccaucggcaucaacaucacccgguuucagacacugcuggcccugcacagaagcuaccugacaccuggcgauagcagcagcggauggacagcuggugccgccgcuuacuaugugggcuaccugcagccuagaaccuuccugcugaaguacaacgagaacggcaccaucaccgacgccguggauugugcucuggauccucugagcgagacaaagugcacccugaaguccuucaccguggaaaagggcaucuaccagaccagcaacuuccgggugcagcccaccgaauccaucgugcgguuccccaauaucaccaaucugugccccuucggcgagguguucaaugccaccagauucgccucuguguacgccuggaaccggaagcggaucagcaauugcguggccgacuacuccgugcuguacaacuccgccagcuucagcaccuucaagugcuacggcguguccccuaccaagcugaacgaccugugcuucacaaacguguacgccgacagcuucgugauccggggagaugaagugcggcagauugccccuggacagacaggcaacaucgccgacuacaacuacaagcugcccgacgacuucaccggcugugugauugccuggaacagcaacaaccuggacuccaaagucggcggcaacuacaauuaccuguaccggcuguuccggaaguccaaucugaagcccuucgagcgggacaucagcaccgaaaucuaucaggccggcagcaccccuugcaacggcgugaagggcuucaacugcuacuucccacugcaguccuacggcuuucagcccacauacggcgugggcuaucagcccuacagagugguggugcugagcuucgaacugcugcaugcuccugccacagugugcggcccuaagaaaagcaccaaucucgugaagaacaaaugcgugaacuucaacuucaacggccugaccggcaccggcgugcugacagagagcaacaagaaguuccugccauuccagcaguuuggccgggauaucgccgauaccacagacgccguuagagauccccagacacuggaaauccuggacaucaccccaugcagcuucggcggagugucugugaucaccccuggcaccaacaccagcaaucagguggcagugcuguaccagggcgugaacuguaccgaagugcccguggccauucacgccgaucagcugacaccuacauggcggguguacuccaccggcagcaauguguuucagaccagagccggcugucugaucggagccgagcacgugaacaauagcuacgagugcgacauccccaucggcgcuggcaucugugccagcuaccagacacagacaaacagccccagacgggcuagaagcguggccagccagagcaucauugccuacacaaugucucugggcgccgagaacagcguggccuacuccaacaacucuaucgcuauccccaccaacuucaccaucagcgugaccaccgagauccugccuguguccaugaccaagaccagcguggacugcaccauguacaucugcggcgauuccaccgagugcuccaaccugcugcugcaguacggcagcuucugcacccagcugaauagagcccugacagggaucgccguggaacaggacaagaacacccaagagguguucgcccaagugaagcaaaucuacaagaccccuccuaucaaggacuucggcggcuucaauuucagccagauucugcccgauccuagcaagcccagcaagcggagcuucaucgaggaccugcuguucaacaaagugacacuggccgacgccggcuucaucaagcaguauggcgauugucugggcgacauugccgccagggaucugauuugcgcccagaaguuuaacggacugacagugcugccuccucugcugaccgaugagaugaucgcccaguacacaucugcccugcuggccggcacaaucacaagcggcuggacauuuggagcuggcgccgcucugcagauccccuuugcuaugcagauggccuaccgguucaacggcaucggagugacccagaaugugcuguacgagaaccagaagcugaucgccaaccaguucaacagcgccaucggcaagauccaggacagccugagcagcacagcaagcgcccugggaaagcugcaggacguggucaaccagaaugcccaggcacugaacacccuggucaagcagcuguccuccaacuucggcgccaucagcucugugcugaacgauauccugagcagacuggacccuccugaggccgaggugcagaucgacagacugaucacaggcagacugcagagccuccagacauacgugacccagcagcugaucagagccgccgagauuagagccucugccaaucuggccgccaccaagaugucugagugugugcugggccagagcaagagaguggacuuuugcggcaagggcuaccaccugaugagcuucccucagucugccccucacggcgugguguuucugcacgugacauaugugcccgcucaagagaagaauuucaccaccgcuccagccaucugccacgacggcaaagcccacuuuccuagagaaggcguguucguguccaacggcacccauugguucgugacacagcggaacuucuacgagccccagaucaucaccaccgacaacaccuucgugucuggcaacugcgacguugugaucggcauugugaacaauaccguguacgacccucugcagcccgagcuggacagcuucaaagaggaacuggacaaguacuuuaagaaccacacaagccccgacguggaccugggcgauaucagcggaaucaaugccagcgucgugaacauccagaaagagaucgaccggcugaacgagguggccaagaaucugaacgagagccugaucgaccugcaagaacuggggaaguacgagcaguacaucaaguggcccugguacaucuggcugggcuuuaucgccggacugauugccaucgugauggucacaaucaugcuguguugcaugaccagcugcuguagcugccugaagggcuguuguagcuguggcagcugcugcaaguucgacgaggacgauucugagcccgugcugaagggcgugaaacugcacuacaccugaugacucgagcugguacugcaugcacgcaaugcuagcugccccuuucccguccuggguaccccgagucucccccgaccucgggucccagguaugcucccaccuccaccugccccacucaccaccucugcuaguuccagacaccucccaagcacgcagcaaugcagcucaaaacgcuuagccuagccacacccccacgggaaacagcagugauuaaccuuuagcaauaaacgaaaguuuaacuaagcuauacuaaccccaggguuggucaauuucgugccagccacacccuggagcuagcaaaaaaaaaaaaaaaaaaaaaaaaaaaaaagcauaugacuaaaaaaaaaaaaaaaaaaaaaaaaaaaaaaaaaaaaaaaaaaaaaaaaaaaaaaaaaaaaaaaaaaaaaa

SEQ ID NO: 26903 - RNA, 4274 nt, Artificial Sequence
  SARS-CoV-2/Wuhan/WIV05/2019__EPI_ISL_402128 spike protein mRNA gc mod (1-1273)(K986P_V987P_K986P_V987P_L18F_D80A_D215G_L242del_A243del_ L244del_R246I_K417N_E484K_N501Y_D614G_A701V)
agaauaaacuaguauucuucugguccccacagacucagagagaacccgccaccauguucguguuucuggugcugcugccccugguguccagccagugugugaacuucaccaccagaacacagcugccuccagccuacaccaacagcuucaccagaggcguguacuaccccgacaagguguucagauccagcgugcugcacucuacccaggaccuguuccugccuuucuucagcaacgugaccugguuccacgccauccacguguccggcaccaauggcaccaagagauucgccaaccccgugcugcccuucaacgacgggguguacuuugccagcaccgagaaguccaacaucaucagaggcuggaucuucggcaccacacuggacagcaagacccagagccugcugaucgugaacaacgccaccaacguggucaucaaagugugcgaguuccaguucugcaacgaccccuuccugggcgucuacuaccacaagaacaacaagagcuggauggaaagcgaguuccggguguacagcagcgccaacaacugcaccuucgaguacgugucccagccuuuccugauggaccuggaaggcaagcagggcaacuucaagaaccugcgcgaguucguguucaagaacaucgacggcuacuucaaaaucuacagcaagcacaccccuaucaaccucgugcggggccugccucagggcuucucugcucuggaaccccugguggaucugcccaucggcaucaacaucacccgguuucagacacugcacaucagcuaccugacaccuggcgauagcagcagcggauggacagcuggugccgccgcuuacuaugugggcuaccugcagccuagaaccuuccugcugaaguacaacgagaacggcaccaucaccgacgccguggauugugcucuggauccucugagcgagacaaagugcacccugaaguccuucaccguggaaaagggcaucuaccagaccagcaacuuccgggugcagcccaccgaauccaucgugcgguuccccaauaucaccaaucugugccccuucggcgagguguucaaugccaccagauucgccucuguguacgccuggaaccggaagcggaucagcaauugcguggccgacuacuccgugcuguacaacuccgccagcuucagcaccuucaagugcuacggcguguccccuaccaagcugaacgaccugugcuucacaaacguguacgccgacagcuucgugauccggggagaugaagugcggcagauugccccuggacagacaggcaacaucgccgacuacaacuacaagcugcccgacgacuucaccggcugugugauugccuggaacagcaacaaccuggacuccaaagucggcggcaacuacaauuaccuguaccggcuguuccggaaguccaaucugaagcccuucgagcgggacaucagcaccgaaaucuaucaggccggcagcaccccuugcaacggcgugaagggcuucaacugcuacuucccacugcaguccuacggcuuucagcccacauacggcgugggcuaucagcccuacagagugguggugcugagcuucgaacugcugcaugcuccugccacagugugcggcccuaagaaaagcaccaaucucgugaagaacaaaugcgugaacuucaacuucaacggccugaccggcaccggcgugcugacagagagcaacaagaaguuccugccauuccagcaguuuggccgggauaucgccgauaccacagacgccguuagagauccccagacacuggaaauccuggacaucaccccaugcagcuucggcggagugucugugaucaccccuggcaccaacaccagcaaucagguggcagugcuguaccagggcgugaacuguaccgaagugcccguggccauucacgccgaucagcugacaccuacauggcggguguacuccaccggcagcaauguguuucagaccagagccggcugucugaucggagccgagcacgugaacaauagcuacgagugcgacauccccaucggcgcuggcaucugugccagcuaccagacacagacaaacagccccagacgggcuagaagcguggccagccagagcaucauugccuacacaaugucucugggcguggagaacagcguggccuacuccaacaacucuaucgcuauccccaccaacuucaccaucagcgugaccaccgagauccugccuguguccaugaccaagaccagcguggacugcaccauguacaucugcggcgauuccaccgagugcuccaaccugcugcugcaguacggcagcuucugcacccagcugaauagagcccugacagggaucgccguggaacaggacaagaacacccaagagguguucgcccaagugaagcaaaucuacaagaccccuccuaucaaggacuucggcggcuucaauuucagccagauucugcccgauccuagcaagcccagcaagcggagcuucaucgaggaccugcuguucaacaaagugacacuggccgacgccggcuucaucaagcaguauggcgauugucugggcgacauugccgccagggaucugauuugcgcccagaaguuuaacggacugacagugcugccuccucugcugaccgaugagaugaucgcccaguacacaucugcccugcuggccggcacaaucacaagcggcuggacauuuggagcuggcgccgcucugcagauccccuuugcuaugcagauggccuaccgguucaacggcaucggagugacccagaaugugcuguacgagaaccagaagcugaucgccaaccaguucaacagcgccaucggcaagauccaggacagccugagcagcacagcaagcgcccugggaaagcugcaggacguggucaaccagaaugcccaggcacugaacacccuggucaagcagcuguccuccaacuucggcgccaucagcucugugcugaacgauauccugagcagacuggacccuccugaggccgaggugcagaucgacagacugaucacaggcagacugcagagccuccagacauacgugacccagcagcugaucagagccgccgagauuagagccucugccaaucuggccgccaccaagaugucugagugugugcugggccagagcaagagaguggacuuuugcggcaagggcuaccaccugaugagcuucccucagucugccccucacggcgugguguuucugcacgugacauaugugcccgcucaagagaagaauuucaccaccgcuccagccaucugccacgacggcaaagcccacuuuccuagagaaggcguguucguguccaacggcacccauugguucgugacacagcggaacuucuacgagccccagaucaucaccaccgacaacaccuucgugucuggcaacugcgacguugugaucggcauugugaacaauaccguguacgacccucugcagcccgagcuggacagcuucaaagaggaacuggacaaguacuuuaagaaccacacaagccccgacguggaccugggcgauaucagcggaaucaaugccagcgucgugaacauccagaaagagaucgaccggcugaacgagguggccaagaaucugaacgagagccugaucgaccugcaagaacuggggaaguacgagcaguacaucaaguggcccugguacaucuggcugggcuuuaucgccggacugauugccaucgugauggucacaaucaugcuguguugcaugaccagcugcuguagcugccugaagggcuguuguagcuguggcagcugcugcaaguucgacgaggacgauucugagcccgugcugaagggcgugaaacugcacuacaccugaugacucgagcugguacugcaugcacgcaaugcuagcugccccuuucccguccuggguaccccgagucucccccgaccucgggucccagguaugcucccaccuccaccugccccacucaccaccucugcuaguuccagacaccucccaagcacgcagcaaugcagcucaaaacgcuuagccuagccacacccccacgggaaacagcagugauuaaccuuuagcaauaaacgaaaguuuaacuaagcuauacuaaccccaggguuggucaauuucgugccagccacacccuggagcuagcaaaaaaaaaaaaaaaaaaaaaaaaaaaaaagcauaugacuaaaaaaaaaaaaaaaaaaaaaaaaaaaaaaaaaaaaaaaaaaaaaaaaaaaaaaaaaaaaaaaaaaaaaa

SEQ ID NO: 26904 - RNA, 4283 nt, Artificial Sequence
  SARS-CoV-2/Wuhan/WIV05/2019__EPI_ISL_402128 spike protein mRNA gc mod (1-1273)(K986P_V987P_K986P_V987P_E484K_D614G)
agaauaaacuaguauucuucugguccccacagacucagagagaacccgccaccauguucguguuucuggugcugcugccccugguguccagccagugugugaaccugaccaccagaacacagcugccuccagccuacaccaacagcuucaccagaggcguguacuaccccgacaagguguucagauccagcgugcugcacucuacccaggaccuguuccugccuuucuucagcaacgugaccugguuccacgccauccacguguccggcaccaauggcaccaagagauucgacaaccccgugcugcccuucaacgacgggguguacuuugccagcaccgagaaguccaacaucaucagaggcuggaucuucggcaccacacuggacagcaagacccagagccugcugaucgugaacaacgccaccaacguggucaucaaagugugcgaguuccaguucugcaacgaccccuuccugggcgucuacuaccacaagaacaacaagagcuggauggaaagcgaguuccggguguacagcagcgccaacaacugcaccuucgaguacgugucccagccuuuccugauggaccuggaaggcaagcagggcaacuucaagaaccugcgcgaguucguguucaagaacaucgacggcuacuucaaaaucuacagcaagcacaccccuaucaaccucgugcgggaucugccucagggcuucucugcucuggaaccccugguggaucugcccaucggcaucaacaucacccgguuucagacacugcuggcccugcacagaagcuaccugacaccuggcgauagcagcagcggauggacagcuggugccgccgcuuacuaugugggcuaccugcagccuagaaccuuccugcugaaguacaacgagaacggcaccaucaccgacgccguggauugugcucuggauccucugagcgagacaaagugcacccugaaguccuucaccguggaaaagggcaucuaccagaccagcaacuuccgggugcagcccaccgaauccaucgugcgguuccccaauaucaccaaucugugccccuucggcgagguguucaaugccaccagauucgccucuguguacgccuggaaccggaagcggaucagcaauugcguggccgacuacuccgugcuguacaacuccgccagcuucagcaccuucaagugcuacggcguguccccuaccaagcugaacgaccugugcuucacaaacguguacgccgacagcuucgugauccggggagaugaagugcggcagauugccccuggacagacaggcaagaucgccgacuacaacuacaagcugcccgacgacuucaccggcugugugauugccuggaacagcaacaaccuggacuccaaagucggcggcaacuacaauuaccuguaccggcuguuccggaaguccaaucugaagcccuucgagcgggacaucagcaccgaaaucuaucaggccggcagcaccccuugcaacggcgugaagggcuucaacugcuacuucccacugcaguccuacggcuuucagcccacaaauggcgugggcuaucagcccuacagagugguggugcugagcuucgaacugcugcaugcuccugccacagugugcggcccuaagaaaagcaccaaucucgugaagaacaaaugcgugaacuucaacuucaacggccugaccggcaccggcgugcugacagagagcaacaagaaguuccugccauuccagcaguuuggccgggauaucgccgauaccacagacgccguuagagauccccagacacuggaaauccuggacaucaccccaugcagcuucggcggagugucugugaucaccccuggcaccaacaccagcaaucagguggcagugcuguaccagggcgugaacuguaccgaagugcccguggccauucacgccgaucagcugacaccuacauggcggguguacuccaccggcagcaauguguuucagaccagagccggcugucugaucggagccgagcacgugaacaauagcuacgagugcgacauccccaucggcgcuggcaucugugccagcuaccagacacagacaaacagccccagacgggcuagaagcguggccagccagagcaucauugccuacacaaugucucugggcgccgagaacagcguggccuacuccaacaacucuaucgcuauccccaccaacuucaccaucagcgugaccaccgagauccugccuguguccaugaccaagaccagcguggacugcaccauguacaucugcggcgauuccaccgagugcuccaaccugcugcugcaguacggcagcuucugcacccagcugaauagagcccugacagggaucgccguggaacaggacaagaacacccaagagguguucgcccaagugaagcaaaucuacaagaccccuccuaucaaggacuucggcggcuucaauuucagccagauucugcccgauccuagcaagcccagcaagcggagcuucaucgaggaccugcuguucaacaaagugacacuggccgacgccggcuucaucaagcaguauggcgauugucugggcgacauugccgccagggaucugauuugcgcccagaaguuuaacggacugacagugcugccuccucugcugaccgaugagaugaucgcccaguacacaucugcccugcuggccggcacaaucacaagcggcuggacauuuggagcuggcgccgcucugcagauccccuuugcuaugcagauggccuaccgguucaacggcaucggagugacccagaaugugcuguacgagaaccagaagcugaucgccaaccaguucaacagcgccaucggcaagauccaggacagccugagcagcacagcaagcgcccugggaaagcugcaggacguggucaaccagaaugcccaggcacugaacacccuggucaagcagcuguccuccaacuucggcgccaucagcucugugcugaacgauauccugagcagacuggacccuccugaggccgaggugcagaucgacagacugaucacaggcagacugcagagccuccagacauacgugacccagcagcugaucagagccgccgagauuagagccucugccaaucuggccgccaccaagaugucugagugugugcugggccagagcaagagaguggacuuuugcggcaagggcuaccaccugaugagcuucccucagucugccccucacggcgugguguuucugcacgugacauaugugcccgcucaagagaagaauuucaccaccgcuccagccaucugccacgacggcaaagcccacuuuccuagagaaggcguguucguguccaacggcacccauugguucgugacacagcggaacuucuacgagccccagaucaucaccaccgacaacaccuucgugucuggcaacugcgacguugugaucggcauugugaacaauaccguguacgacccucugcagcccgagcuggacagcuucaaagaggaacuggacaaguacuuuaagaaccacacaagccccgacguggaccugggcgauaucagcggaaucaaugccagcgucgugaacauccagaaagagaucgaccggcugaacgagguggccaagaaucugaacgagagccugaucgaccugcaagaacuggggaaguacgagcaguacaucaaguggcccugguacaucuggcugggcuuuaucgccggacugauugccaucgugauggucacaaucaugcuguguugcaugaccagcugcuguagcugccugaagggcuguuguagcuguggcagcugcugcaaguucgacgaggacgauucugagcccgugcugaagggcgugaaacugcacuacaccugaugacucgagcugguacugcaugcacgcaaugcuagcugccccuuucccguccuggguaccccgagucucccccgaccucgggucccagguaugcucccaccuccaccugccccacucaccaccucugcuaguuccagacaccucccaagcacgcagcaaugcagcucaaaacgcuuagccuagccacacccccacgggaaacagcagugauuaaccuuuagcaauaaacgaaaguuuaacuaagcuauacuaaccccaggguuggucaauuucgugccagccacacccuggagcuagcaaaaaaaaaaaaaaaaaaaaaaaaaaaaaagcauaugacuaaaaaaaaaaaaaaaaaaaaaaaaaaaaaaaaaaaaaaaaaaaaaaaaaaaaaaaaaaaaaaaaaaaaaa

SEQ ID NO: 26905 - RNA, 4283 nt, Artificial Sequence
  SARS-CoV-2/Wuhan/WIV05/2019__EPI_ISL_402128 spike protein mRNA gc mod (1-1273)(K986P_V987P_K986P_V987P_L18F_T20N_P26S_D138Y_R190S_K417T _E484K_N501Y_D614G_H655Y_T1027I)
agaauaaacuaguauucuucugguccccacagacucagagagaacccgccaccauguucguguuucuggugcugcugccccugguguccagccagugugugaacuucaccaacagaacacagcugccuagcgccuacaccaacagcuucaccagaggcguguacuaccccgacaagguguucagauccagcgugcugcacucuacccaggaccuguuccugccuuucuucagcaacgugaccugguuccacgccauccacguguccggcaccaauggcaccaagagauucgacaaccccgugcugcccuucaacgacgggguguacuuugccagcaccgagaaguccaacaucaucagaggcuggaucuucggcaccacacuggacagcaagacccagagccugcugaucgugaacaacgccaccaacguggucaucaaagugugcgaguuccaguucugcaacuaccccuuccugggcgucuacuaccacaagaacaacaagagcuggauggaaagcgaguuccggguguacagcagcgccaacaacugcaccuucgaguacgugucccagccuuuccugauggaccuggaaggcaagcagggcaacuucaagaaccugagcgaguucguguucaagaacaucgacggcuacuucaaaaucuacagcaagcacaccccuaucaaccucgugcgggaucugccucagggcuucucugcucuggaaccccugguggaucugcccaucggcaucaacaucacccgguuucagacacugcuggcccugcacagaagcuaccugacaccuggcgauagcagcagcggauggacagcuggugccgccgcuuacuaugugggcuaccugcagccuagaaccuuccugcugaaguacaacgagaacggcaccaucaccgacgccguggauugugcucuggauccucugagcgagacaaagugcacccugaaguccuucaccguggaaaagggcaucuaccagaccagcaacuuccgggugcagcccaccgaauccaucgugcgguuccccaauaucaccaaucugugccccuucggcgagguguucaaugccaccagauucgccucuguguacgccuggaaccggaagcggaucagcaauugcguggccgacuacuccgugcuguacaacuccgccagcuucagcaccuucaagugcuacggcguguccccuaccaagcugaacgaccugugcuucacaaacguguacgccgacagcuucgugauccggggagaugaagugcggcagauugccccuggacagacaggcaccaucgccgacuacaacuacaagcugcccgacgacuucaccggcugugugauugccuggaacagcaacaaccuggacuccaaagucggcggcaacuacaauuaccuguaccggcuguuccggaaguccaaucugaagcccuucgagcgggacaucagcaccgaaaucuaucaggccggcagcaccccuugcaacggcgugaagggcuucaacugcuacuucccacugcaguccuacggcuuucagcccacauacggcgugggcuaucagcccuacagagugguggugcugagcuucgaacugcugcaugcuccugccacagugugcggcccuaagaaaagcaccaaucucgugaagaacaaaugcgugaacuucaacuucaacggccugaccggcaccggcgugcugacagagagcaacaagaaguuccugccauuccagcaguuuggccgggauaucgccgauaccacagacgccguuagagauccccagacacuggaaauccuggacaucaccccaugcagcuucggcggagugucugugaucaccccuggcaccaacaccagcaaucagguggcagugcuguaccagggcgugaacuguaccgaagugcccguggccauucacgccgaucagcugacaccuacauggcggguguacuccaccggcagcaauguguuucagaccagagccggcugucugaucggagccgaguacgugaacaauagcuacgagugcgacauccccaucggcgcuggcaucugugccagcuaccagacacagacaaacagccccagacgggcuagaagcguggccagccagagcaucauugccuacacaaugucucugggcgccgagaacagcguggccuacuccaacaacucuaucgcuauccccaccaacuucaccaucagcgugaccaccgagauccugccuguguccaugaccaagaccagcguggacugcaccauguacaucugcggcgauuccaccgagugcuccaaccugcugcugcaguacggcagcuucugcacccagcugaauagagcccugacagggaucgccguggaacaggacaagaacacccaagagguguucgcccaagugaagcaaaucuacaagaccccuccuaucaaggacuucggcggcuucaauuucagccagauucugcccgauccuagcaagcccagcaagcggagcuucaucgaggaccugcuguucaacaaagugacacuggccgacgccggcuucaucaagcaguauggcgauugucugggcgacauugccgccagggaucugauuugcgcccagaaguuuaacggacugacagugcugccuccucugcugaccgaugagaugaucgcccaguacacaucugcccugcuggccggcacaaucacaagcggcuggacauuuggagcuggcgccgcucugcagauccccuuugcuaugcagauggccuaccgguucaacggcaucggagugacccagaaugugcuguacgagaaccagaagcugaucgccaaccaguucaacagcgccaucggcaagauccaggacagccugagcagcacagcaagcgcccugggaaagcugcaggacguggucaaccagaaugcccaggcacugaacacccuggucaagcagcuguccuccaacuucggcgccaucagcucugugcugaacgauauccugagcagacuggacccuccugaggccgaggugcagaucgacagacugaucacaggcagacugcagagccuccagacauacgugacccagcagcugaucagagccgccgagauuagagccucugccaaucuggccgccaucaagaugucugagugugugcugggccagagcaagagaguggacuuuugcggcaagggcuaccaccugaugagcuucccucagucugccccucacggcgugguguuucugcacgugacauaugugcccgcucaagagaagaauuucaccaccgcuccagccaucugccacgacggcaaagcccacuuuccuagagaaggcguguucguguccaacggcacccauugguucgugacacagcggaacuucuacgagccccagaucaucaccaccgacaacaccuucgugucuggcaacugcgacguugugaucggcauugugaacaauaccguguacgacccucugcagcccgagcuggacagcuucaaagaggaacuggacaaguacuuuaagaaccacacaagccccgacguggaccugggcgauaucagcggaaucaaugccagcgucgugaacauccagaaagagaucgaccggcugaacgagguggccaagaaucugaacgagagccugaucgaccugcaagaacuggggaaguacgagcaguacaucaaguggcccugguacaucuggcugggcuuuaucgccggacugauugccaucgugauggucacaaucaugcuguguugcaugaccagcugcuguagcugccugaagggcuguuguagcuguggcagcugcugcaaguucgacgaggacgauucugagcccgugcugaagggcgugaaacugcacuacaccugaugacucgagcugguacugcaugcacgcaaugcuagcugccccuuucccguccuggguaccccgagucucccccgaccucgggucccagguaugcucccaccuccaccugccccacucaccaccucugcuaguuccagacaccucccaagcacgcagcaaugcagcucaaaacgcuuagccuagccacacccccacgggaaacagcagugauuaaccuuuagcaauaaacgaaaguuuaacuaagcuauacuaaccccaggguuggucaauuucgugccagccacacccuggagcuagcaaaaaaaaaaaaaaaaaaaaaaaaaaaaaagcauaugacuaaaaaaaaaaaaaaaaaaaaaaaaaaaaaaaaaaaaaaaaaaaaaaaaaaaaaaaaaaaaaaaaaaaaaa

SEQ ID NO: 26906 - RNA, 4283 nt, Artificial Sequence
  SARS-CoV-2/Wuhan/WIV05/2019__EPI_ISL_402128 spike protein mRNA gc mod (1-1273)(K986P_V987P_K986P_V987P_S13I_W152C_L452R_D614G)
agaauaaacuaguauucuucugguccccacagacucagagagaacccgccaccauguucguguuucuggugcugcugccccugguguccauccagugugugaaccugaccaccagaacacagcugccuccagccuacaccaacagcuucaccagaggcguguacuaccccgacaagguguucagauccagcgugcugcacucuacccaggaccuguuccugccuuucuucagcaacgugaccugguuccacgccauccacguguccggcaccaauggcaccaagagauucgacaaccccgugcugcccuucaacgacgggguguacuuugccagcaccgagaaguccaacaucaucagaggcuggaucuucggcaccacacuggacagcaagacccagagccugcugaucgugaacaacgccaccaacguggucaucaaagugugcgaguuccaguucugcaacgaccccuuccugggcgucuacuaccacaagaacaacaagagcugcauggaaagcgaguuccggguguacagcagcgccaacaacugcaccuucgaguacgugucccagccuuuccugauggaccuggaaggcaagcagggcaacuucaagaaccugcgcgaguucguguucaagaacaucgacggcuacuucaaaaucuacagcaagcacaccccuaucaaccucgugcgggaucugccucagggcuucucugcucuggaaccccugguggaucugcccaucggcaucaacaucacccgguuucagacacugcuggcccugcacagaagcuaccugacaccuggcgauagcagcagcggauggacagcuggugccgccgcuuacuaugugggcuaccugcagccuagaaccuuccugcugaaguacaacgagaacggcaccaucaccgacgccguggauugugcucuggauccucugagcgagacaaagugcacccugaaguccuucaccguggaaaagggcaucuaccagaccagcaacuuccgggugcagcccaccgaauccaucgugcgguuccccaauaucaccaaucugugccccuucggcgagguguucaaugccaccagauucgccucuguguacgccuggaaccggaagcggaucagcaauugcguggccgacuacuccgugcuguacaacuccgccagcuucagcaccuucaagugcuacggcguguccccuaccaagcugaacgaccugugcuucacaaacguguacgccgacagcuucgugauccggggagaugaagugcggcagauugccccuggacagacaggcaagaucgccgacuacaacuacaagcugcccgacgacuucaccggcugugugauugccuggaacagcaacaaccuggacuccaaagucggcggcaacuacaauuaccgcuaccggcuguuccggaaguccaaucugaagcccuucgagcgggacaucagcaccgaaaucuaucaggccggcagcaccccuugcaacggcguggaaggcuucaacugcuacuucccacugcaguccuacggcuuucagcccacaaauggcgugggcuaucagcccuacagagugguggugcugagcuucgaacugcugcaugcuccugccacagugugcggcccuaagaaaagcaccaaucucgugaagaacaaaugcgugaacuucaacuucaacggccugaccggcaccggcgugcugacagagagcaacaagaaguuccugccauuccagcaguuuggccgggauaucgccgauaccacagacgccguuagagauccccagacacuggaaauccuggacaucaccccaugcagcuucggcggagugucugugaucaccccuggcaccaacaccagcaaucagguggcagugcuguaccagggcgugaacuguaccgaagugcccguggccauucacgccgaucagcugacaccuacauggcggguguacuccaccggcagcaauguguuucagaccagagccggcugucugaucggagccgagcacgugaacaauagcuacgagugcgacauccccaucggcgcuggcaucugugccagcuaccagacacagacaaacagccccagacgggcuagaagcguggccagccagagcaucauugccuacacaaugucucugggcgccgagaacagcguggccuacuccaacaacucuaucgcuauccccaccaacuucaccaucagcgugaccaccgagauccugccuguguccaugaccaagaccagcguggacugcaccauguacaucugcggcgauuccaccgagugcuccaaccugcugcugcaguacggcagcuucugcacccagcugaauagagcccugacagggaucgccguggaacaggacaagaacacccaagagguguucgcccaagugaagcaaaucuacaagaccccuccuaucaaggacuucggcggcuucaauuucagccagauucugcccgauccuagcaagcccagcaagcggagcuucaucgaggaccugcuguucaacaaagugacacuggccgacgccggcuucaucaagcaguauggcgauugucugggcgacauugccgccagggaucugauuugcgcccagaaguuuaacggacugacagugcugccuccucugcugaccgaugagaugaucgcccaguacacaucugcccugcuggccggcacaaucacaagcggcuggacauuuggagcuggcgccgcucugcagauccccuuugcuaugcagauggccuaccgguucaacggcaucggagugacccagaaugugcuguacgagaaccagaagcugaucgccaaccaguucaacagcgccaucggcaagauccaggacagccugagcagcacagcaagcgcccugggaaagcugcaggacguggucaaccagaaugcccaggcacugaacacccuggucaagcagcuguccuccaacuucggcgccaucagcucugugcugaacgauauccugagcagacuggacccuccugaggccgaggugcagaucgacagacugaucacaggcagacugcagagccuccagacauacgugacccagcagcugaucagagccgccgagauuagagccucugccaaucuggccgccaccaagaugucugagugugugcugggccagagcaagagaguggacuuuugcggcaagggcuaccaccugaugagcuucccucagucugccccucacggcgugguguuucugcacgugacauaugugcccgcucaagagaagaauuucaccaccgcuccagccaucugccacgacggcaaagcccacuuuccuagagaaggcguguucguguccaacggcacccauugguucgugacacagcggaacuucuacgagccccagaucaucaccaccgacaacaccuucgugucuggcaacugcgacguugugaucggcauugugaacaauaccguguacgacccucugcagcccgagcuggacagcuucaaagaggaacuggacaaguacuuuaagaaccacacaagccccgacguggaccugggcgauaucagcggaaucaaugccagcgucgugaacauccagaaagagaucgaccggcugaacgagguggccaagaaucugaacgagagccugaucgaccugcaagaacuggggaaguacgagcaguacaucaaguggcccugguacaucuggcugggcuuuaucgccggacugauugccaucgugauggucacaaucaugcuguguugcaugaccagcugcuguagcugccugaagggcuguuguagcuguggcagcugcugcaaguucgacgaggacgauucugagcccgugcugaagggcgugaaacugcacuacaccugaugacucgagcugguacugcaugcacgcaaugcuagcugccccuuucccguccuggguaccccgagucucccccgaccucgggucccagguaugcucccaccuccaccugccccacucaccaccucugcuaguuccagacaccucccaagcacgcagcaaugcagcucaaaacgcuuagccuagccacacccccacgggaaacagcagugauuaaccuuuagcaauaaacgaaaguuuaacuaagcuauacuaaccccaggguuggucaauuucgugccagccacacccuggagcuagcaaaaaaaaaaaaaaaaaaaaaaaaaaaaaagcauaugacuaaaaaaaaaaaaaaaaaaaaaaaaaaaaaaaaaaaaaaaaaaaaaaaaaaaaaaaaaaaaaaaaaaaaaa

SEQ ID NO: 26907 - RNA, 4283 nt, Artificial Sequence
  SARS-CoV-2/Wuhan/WIV05/2019__EPI_ISL_402128 spike protein mRNA gc mod (1-1273)(K986P_V987P)
agaauaaacuaguauucuucugguccccacagacucagagagaacccgccaccauguucguguuccuggugcugcugccucugguguccagccagugugugaaccugaccaccagaacacagcugccuccagccuacaccaacagcuuuaccagaggcguguacuaccccgacaagguguucagauccagcgugcugcacucuacccaggaccuguuccugccuuucuucagcaacgugaccugguuccacgccauccacguguccggcaccaauggcaccaagagauucgacaaccccgugcugcccuucaacgacgggguguacuuugccagcaccgagaaguccaacaucaucagaggcuggaucuucggcaccacacuggacagcaagacccagagccugcugaucgugaacaacgccaccaacguggucaucaaagugugcgaguuccaguucugcaacgaccccuuccugggcgucuacuaccacaagaacaacaagagcuggauggaaagcgaguuccggguguacagcagcgccaacaacugcaccuucgaguacgugucccagccuuuccugauggaccuggaaggcaagcagggcaacuucaagaaccugcgcgaguucguguuuaagaacaucgacggcuacuucaagaucuacagcaagcacaccccuaucaaccucgugcgggaucugccucagggcuucucugcucuggaaccccugguggaucugcccaucggcaucaacaucacccgguuucagacacugcuggcccugcacagaagcuaccugacaccuggcgauagcagcagcggauggacagcuggugccgccgcuuacuaugugggcuaccugcagccuagaaccuuccugcugaaguacaacgagaacggcaccaucaccgacgccguggauugugcucuggauccucugagcgagacaaagugcacccugaaguccuucaccguggaaaagggcaucuaccagaccagcaacuuccgggugcagcccaccgaauccaucgugcgguuccccaauaucaccaaucugugccccuucggcgagguguucaaugccaccagauucgccucuguguacgccuggaaccggaagcggaucagcaauugcguggccgacuacuccgugcuguacaacuccgccagcuucagcaccuucaagugcuacggcguguccccuaccaagcugaacgaccugugcuucacaaacguguacgccgacagcuucgugauccggggagaugaagugcggcagauugccccuggacagacaggcaagaucgccgacuacaacuacaagcugcccgacgacuucaccggcugugugauugccuggaacagcaacaaccuggacuccaaagucggcggcaacuacaauuaccuguaccggcuguuccggaaguccaaucugaagcccuucgagcgggacaucuccaccgagaucuaucaggccggcagcaccccuuguaacggcguggaaggcuucaacugcuacuucccacugcaguccuacggcuuucagcccacaaauggcgugggcuaucagcccuacagagugguggugcugagcuucgaacugcugcaugccccugccacagugugcggcccuaagaaaagcaccaaucucgugaagaacaaaugcgugaacuucaacuucaacggccugaccggcaccggcgugcugacagagagcaacaagaaguuccugccauuccagcaguuuggccgggauaucgccgauaccacagacgccguuagagauccccagacacuggaaauccuggacaucaccccuugcagcuucggcggagugucugugaucaccccuggcaccaacaccagcaaucagguggcagugcuguaccaggacgugaacuguaccgaagugcccguggccauucacgccgaucagcugacaccuacauggcggguguacuccaccggcagcaauguguuucagaccagagccggcugucugaucggagccgagcacgugaacaauagcuacgagugcgacauccccaucggcgcuggaaucugcgccagcuaccagacacagacaaacagcccucggagagccagaagcguggccagccagagcaucauugccuacacaaugucucugggcgccgagaacagcguggccuacuccaacaacucuaucgcuauccccaccaacuucaccaucagcgugaccacagagauccugccuguguccaugaccaagaccagcguggacugcaccauguacaucugcggcgauuccaccgagugcuccaaccugcugcugcaguacggcagcuucugcacccagcugaauagagcccugacagggaucgccguggaacaggacaagaacacccaagagguguucgcccaagugaagcagaucuacaagaccccuccuaucaaggacuucggcggcuucaauuucagccagauucugcccgauccuagcaagcccagcaagcggagcuucaucgaggaccugcuguucaacaaagugacacuggccgacgccggcuucaucaagcaguauggcgauugucugggcgacauugccgccagggaucugauuugcgcccagaaguuuaacggacugacagugcugccuccucugcugaccgaugagaugaucgcccaguacacaucugcccugcuggccggcacaaucacaagcggcuggacauuuggagcaggcgccgcucugcagauccccuuugcuaugcagauggccuaccgguucaacggcaucggagugacccagaaugugcuguacgagaaccagaagcugaucgccaaccaguucaacagcgccaucggcaagauccaggacagccugagcagcacagcaagcgcccugggaaagcugcaggacguggucaaccagaaugcccaggcacugaacacccuggucaagcagcuguccuccaacuucggcgccaucagcucugugcugaacgauauccugagcagacuggacccuccugaggccgaggugcagaucgacagacugaucacaggcagacugcagagccuccagacauacgugacccagcagcugaucagagccgccgagauuagagccucugccaaucuggccgccaccaagaugucugagugugugcugggccagagcaagagaguggacuuuugcggcaagggcuaccaccugaugagcuucccucagucugccccucacggcgugguguuucugcacgugacauaugugcccgcucaagagaagaauuucaccaccgcuccagccaucugccacgacggcaaagcccacuuuccuagagaaggcguguucguguccaacggcacccauugguucgugacacagcggaacuucuacgagccccagaucaucaccaccgacaacaccuucgugucuggcaacugcgacgucgugaucggcauugugaacaauaccguguacgacccucugcagcccgagcuggacagcuucaaagaggaacuggacaaguacuuuaagaaccacacaagccccgacguggaccugggcgauaucagcggaaucaaugccagcgucgugaacauccagaaagagaucgaccggcugaacgagguggccaagaaucugaacgagagccugaucgaccugcaagaacuggggaaguacgagcaguacaucaaguggcccugguacaucuggcugggcuuuaucgccggacugauugccaucgugauggucacaaucaugcuguguugcaugaccagcugcuguagcugccugaagggcuguuguagcuguggcagcugcugcaaguucgacgaggacgauucugagcccgugcugaagggcgugaaacugcacuacacaugaugacucgagcugguacugcaugcacgcaaugcuagcugccccuuucccguccuggguaccccgagucucccccgaccucgggucccagguaugcucccaccuccaccugccccacucaccaccucugcuaguuccagacaccucccaagcacgcagcaaugcagcucaaaacgcuuagccuagccacacccccacgggaaacagcagugauuaaccuuuagcaauaaacgaaaguuuaacuaagcuauacuaaccccaggguuggucaauuucgugccagccacacccuggagcuagcaaaaaaaaaaaaaaaaaaaaaaaaaaaaaagcauaugacuaaaaaaaaaaaaaaaaaaaaaaaaaaaaaaaaaaaaaaaaaaaaaaaaaaaaaaaaaaaaaaaaaaaaaa

SEQ ID NO: 26908 - RNA, 4283 nt, Artificial Sequence
  SARS-CoV-2/Wuhan/WIV05/2019__EPI_ISL_402128 spike protein mRNA gc mod (1-1273)(K986P_V987P_ D614G)
agaauaaacuaguauucuucugguccccacagacucagagagaacccgccaccauguucguguuccuggugcugcugccucugguguccagccagugugugaaccugaccaccagaacacagcugccuccagccuacaccaacagcuuuaccagaggcguguacuaccccgacaagguguucagauccagcgugcugcacucuacccaggaccuguuccugccuuucuucagcaacgugaccugguuccacgccauccacguguccggcaccaauggcaccaagagauucgacaaccccgugcugcccuucaacgacgggguguacuuugccagcaccgagaaguccaacaucaucagaggcuggaucuucggcaccacacuggacagcaagacccagagccugcugaucgugaacaacgccaccaacguggucaucaaagugugcgaguuccaguucugcaacgaccccuuccugggcgucuacuaccacaagaacaacaagagcuggauggaaagcgaguuccggguguacagcagcgccaacaacugcaccuucgaguacgugucccagccuuuccugauggaccuggaaggcaagcagggcaacuucaagaaccugcgcgaguucguguuuaagaacaucgacggcuacuucaagaucuacagcaagcacaccccuaucaaccucgugcgggaucugccucagggcuucucugcucuggaaccccugguggaucugcccaucggcaucaacaucacccgguuucagacacugcuggcccugcacagaagcuaccugacaccuggcgauagcagcagcggauggacagcuggugccgccgcuuacuaugugggcuaccugcagccuagaaccuuccugcugaaguacaacgagaacggcaccaucaccgacgccguggauugugcucuggauccucugagcgagacaaagugcacccugaaguccuucaccguggaaaagggcaucuaccagaccagcaacuuccgggugcagcccaccgaauccaucgugcgguuccccaauaucaccaaucugugccccuucggcgagguguucaaugccaccagauucgccucuguguacgccuggaaccggaagcggaucagcaauugcguggccgacuacuccgugcuguacaacuccgccagcuucagcaccuucaagugcuacggcguguccccuaccaagcugaacgaccugugcuucacaaacguguacgccgacagcuucgugauccggggagaugaagugcggcagauugccccuggacagacaggcaagaucgccgacuacaacuacaagcugcccgacgacuucaccggcugugugauugccuggaacagcaacaaccuggacuccaaagucggcggcaacuacaauuaccuguaccggcuguuccggaaguccaaucugaagcccuucgagcgggacaucuccaccgagaucuaucaggccggcagcaccccuuguaacggcguggaaggcuucaacugcuacuucccacugcaguccuacggcuuucagcccacaaauggcgugggcuaucagcccuacagagugguggugcugagcuucgaacugcugcaugccccugccacagugugcggcccuaagaaaagcaccaaucucgugaagaacaaaugcgugaacuucaacuucaacggccugaccggcaccggcgugcugacagagagcaacaagaaguuccugccauuccagcaguuuggccgggauaucgccgauaccacagacgccguuagagauccccagacacuggaaauccuggacaucaccccuugcagcuucggcggagugucugugaucaccccuggcaccaacaccagcaaucagguggcagugcuguaccagggcgugaacuguaccgaagugcccguggccauucacgccgaucagcugacaccuacauggcggguguacuccaccggcagcaauguguuucagaccagagccggcugucugaucggagccgagcacgugaacaauagcuacgagugcgacauccccaucggcgcuggaaucugcgccagcuaccagacacagacaaacagcccucggagagccagaagcguggccagccagagcaucauugccuacacaaugucucugggcgccgagaacagcguggccuacuccaacaacucuaucgcuauccccaccaacuucaccaucagcgugaccacagagauccugccuguguccaugaccaagaccagcguggacugcaccauguacaucugcggcgauuccaccgagugcuccaaccugcugcugcaguacggcagcuucugcacccagcugaauagagcccugacagggaucgccguggaacaggacaagaacacccaagagguguucgcccaagugaagcagaucuacaagaccccuccuaucaaggacuucggcggcuucaauuucagccagauucugcccgauccuagcaagcccagcaagcggagcuucaucgaggaccugcuguucaacaaagugacacuggccgacgccggcuucaucaagcaguauggcgauugucugggcgacauugccgccagggaucugauuugcgcccagaaguuuaacggacugacagugcugccuccucugcugaccgaugagaugaucgcccaguacacaucugcccugcuggccggcacaaucacaagcggcuggacauuuggagcaggcgccgcucugcagauccccuuugcuaugcagauggccuaccgguucaacggcaucggagugacccagaaugugcuguacgagaaccagaagcugaucgccaaccaguucaacagcgccaucggcaagauccaggacagccugagcagcacagcaagcgcccugggaaagcugcaggacguggucaaccagaaugcccaggcacugaacacccuggucaagcagcuguccuccaacuucggcgccaucagcucugugcugaacgauauccugagcagacuggacccuccugaggccgaggugcagaucgacagacugaucacaggcagacugcagagccuccagacauacgugacccagcagcugaucagagccgccgagauuagagccucugccaaucuggccgccaccaagaugucugagugugugcugggccagagcaagagaguggacuuuugcggcaagggcuaccaccugaugagcuucccucagucugccccucacggcgugguguuucugcacgugacauaugugcccgcucaagagaagaauuucaccaccgcuccagccaucugccacgacggcaaagcccacuuuccuagagaaggcguguucguguccaacggcacccauugguucgugacacagcggaacuucuacgagccccagaucaucaccaccgacaacaccuucgugucuggcaacugcgacgucgugaucggcauugugaacaauaccguguacgacccucugcagcccgagcuggacagcuucaaagaggaacuggacaaguacuuuaagaaccacacaagccccgacguggaccugggcgauaucagcggaaucaaugccagcgucgugaacauccagaaagagaucgaccggcugaacgagguggccaagaaucugaacgagagccugaucgaccugcaagaacuggggaaguacgagcaguacaucaaguggcccugguacaucuggcugggcuuuaucgccggacugauugccaucgugauggucacaaucaugcuguguugcaugaccagcugcuguagcugccugaagggcuguuguagcuguggcagcugcugcaaguucgacgaggacgauucugagcccgugcugaagggcgugaaacugcacuacacaugaugacucgagcugguacugcaugcacgcaaugcuagcugccccuuucccguccuggguaccccgagucucccccgaccucgggucccagguaugcucccaccuccaccugccccacucaccaccucugcuaguuccagacaccucccaagcacgcagcaaugcagcucaaaacgcuuagccuagccacacccccacgggaaacagcagugauuaaccuuuagcaauaaacgaaaguuuaacuaagcuauacuaaccccaggguuggucaauuucgugccagccacacccuggagcuagcaaaaaaaaaaaaaaaaaaaaaaaaaaaaaagcauaugacuaaaaaaaaaaaaaaaaaaaaaaaaaaaaaaaaaaaaaaaaaaaaaaaaaaaaaaaaaaaaaaaaaaaaaa

SEQ ID NO: 26909 - RNA, 4283 nt, Artificial Sequence
  SARS-CoV-2/Wuhan/WIV05/2019__EPI_ISL_402128 spike protein mRNA gc mod (1-1273)(K986P_V987P_A222V_D614G)
agaauaaacuaguauucuucugguccccacagacucagagagaacccgccaccauguucguguuccuggugcugcugccucugguguccagccagugugugaaccugaccaccagaacacagcugccuccagccuacaccaacagcuuuaccagaggcguguacuaccccgacaagguguucagauccagcgugcugcacucuacccaggaccuguuccugccuuucuucagcaacgugaccugguuccacgccauccacguguccggcaccaauggcaccaagagauucgacaaccccgugcugcccuucaacgacgggguguacuuugccagcaccgagaaguccaacaucaucagaggcuggaucuucggcaccacacuggacagcaagacccagagccugcugaucgugaacaacgccaccaacguggucaucaaagugugcgaguuccaguucugcaacgaccccuuccugggcgucuacuaccacaagaacaacaagagcuggauggaaagcgaguuccggguguacagcagcgccaacaacugcaccuucgaguacgugucccagccuuuccugauggaccuggaaggcaagcagggcaacuucaagaaccugcgcgaguucguguuuaagaacaucgacggcuacuucaagaucuacagcaagcacaccccuaucaaccucgugcgggaucugccucagggcuucucugugcuggaaccccugguggaucugcccaucggcaucaacaucacccgguuucagacacugcuggcccugcacagaagcuaccugacaccuggcgauagcagcagcggauggacagcuggugccgccgcuuacuaugugggcuaccugcagccuagaaccuuccugcugaaguacaacgagaacggcaccaucaccgacgccguggauugugcucuggauccucugagcgagacaaagugcacccugaaguccuucaccguggaaaagggcaucuaccagaccagcaacuuccgggugcagcccaccgaauccaucgugcgguuccccaauaucaccaaucugugccccuucggcgagguguucaaugccaccagauucgccucuguguacgccuggaaccggaagcggaucagcaauugcguggccgacuacuccgugcuguacaacuccgccagcuucagcaccuucaagugcuacggcguguccccuaccaagcugaacgaccugugcuucacaaacguguacgccgacagcuucgugauccggggagaugaagugcggcagauugccccuggacagacaggcaagaucgccgacuacaacuacaagcugcccgacgacuucaccggcugugugauugccuggaacagcaacaaccuggacuccaaagucggcggcaacuacaauuaccuguaccggcuguuccggaaguccaaucugaagcccuucgagcgggacaucuccaccgagaucuaucaggccggcagcaccccuuguaacggcguggaaggcuucaacugcuacuucccacugcaguccuacggcuuucagcccacaaauggcgugggcuaucagcccuacagagugguggugcugagcuucgaacugcugcaugccccugccacagugugcggcccuaagaaaagcaccaaucucgugaagaacaaaugcgugaacuucaacuucaacggccugaccggcaccggcgugcugacagagagcaacaagaaguuccugccauuccagcaguuuggccgggauaucgccgauaccacagacgccguuagagauccccagacacuggaaauccuggacaucaccccuugcagcuucggcggagugucugugaucaccccuggcaccaacaccagcaaucagguggcagugcuguaccagggcgugaacuguaccgaagugcccguggccauucacgccgaucagcugacaccuacauggcggguguacuccaccggcagcaauguguuucagaccagagccggcugucugaucggagccgagcacgugaacaauagcuacgagugcgacauccccaucggcgcuggaaucugcgccagcuaccagacacagacaaacagcccucggagagccagaagcguggccagccagagcaucauugccuacacaaugucucugggcgccgagaacagcguggccuacuccaacaacucuaucgcuauccccaccaacuucaccaucagcgugaccacagagauccugccuguguccaugaccaagaccagcguggacugcaccauguacaucugcggcgauuccaccgagugcuccaaccugcugcugcaguacggcagcuucugcacccagcugaauagagcccugacagggaucgccguggaacaggacaagaacacccaagagguguucgcccaagugaagcagaucuacaagaccccuccuaucaaggacuucggcggcuucaauuucagccagauucugcccgauccuagcaagcccagcaagcggagcuucaucgaggaccugcuguucaacaaagugacacuggccgacgccggcuucaucaagcaguauggcgauugucugggcgacauugccgccagggaucugauuugcgcccagaaguuuaacggacugacagugcugccuccucugcugaccgaugagaugaucgcccaguacacaucugcccugcuggccggcacaaucacaagcggcuggacauuuggagcaggcgccgcucugcagauccccuuugcuaugcagauggccuaccgguucaacggcaucggagugacccagaaugugcuguacgagaaccagaagcugaucgccaaccaguucaacagcgccaucggcaagauccaggacagccugagcagcacagcaagcgcccugggaaagcugcaggacguggucaaccagaaugcccaggcacugaacacccuggucaagcagcuguccuccaacuucggcgccaucagcucugugcugaacgauauccugagcagacuggacccuccugaggccgaggugcagaucgacagacugaucacaggcagacugcagagccuccagacauacgugacccagcagcugaucagagccgccgagauuagagccucugccaaucuggccgccaccaagaugucugagugugugcugggccagagcaagagaguggacuuuugcggcaagggcuaccaccugaugagcuucccucagucugccccucacggcgugguguuucugcacgugacauaugugcccgcucaagagaagaauuucaccaccgcuccagccaucugccacgacggcaaagcccacuuuccuagagaaggcguguucguguccaacggcacccauugguucgugacacagcggaacuucuacgagccccagaucaucaccaccgacaacaccuucgugucuggcaacugcgacgucgugaucggcauugugaacaauaccguguacgacccucugcagcccgagcuggacagcuucaaagaggaacuggacaaguacuuuaagaaccacacaagccccgacguggaccugggcgauaucagcggaaucaaugccagcgucgugaacauccagaaagagaucgaccggcugaacgagguggccaagaaucugaacgagagccugaucgaccugcaagaacuggggaaguacgagcaguacaucaaguggcccugguacaucuggcugggcuuuaucgccggacugauugccaucgugauggucacaaucaugcuguguugcaugaccagcugcuguagcugccugaagggcuguuguagcuguggcagcugcugcaaguucgacgaggacgauucugagcccgugcugaagggcgugaaacugcacuacacaugaugacucgagcugguacugcaugcacgcaaugcuagcugccccuuucccguccuggguaccccgagucucccccgaccucgggucccagguaugcucccaccuccaccugccccacucaccaccucugcuaguuccagacaccucccaagcacgcagcaaugcagcucaaaacgcuuagccuagccacacccccacgggaaacagcagugauuaaccuuuagcaauaaacgaaaguuuaacuaagcuauacuaaccccaggguuggucaauuucgugccagccacacccuggagcuagcaaaaaaaaaaaaaaaaaaaaaaaaaaaaaagcauaugacuaaaaaaaaaaaaaaaaaaaaaaaaaaaaaaaaaaaaaaaaaaaaaaaaaaaaaaaaaaaaaaaaaaaaaa

SEQ ID NO: 26910 - RNA, 4283 nt, Artificial Sequence
  SARS-CoV-2/Wuhan/WIV05/2019__EPI_ISL_402128 spike protein mRNA gc mod (1-1273)(K986P_V987P_N439K_D614G)
agaauaaacuaguauucuucugguccccacagacucagagagaacccgccaccauguucguguuccuggugcugcugccucugguguccagccagugugugaaccugaccaccagaacacagcugccuccagccuacaccaacagcuuuaccagaggcguguacuaccccgacaagguguucagauccagcgugcugcacucuacccaggaccuguuccugccuuucuucagcaacgugaccugguuccacgccauccacguguccggcaccaauggcaccaagagauucgacaaccccgugcugcccuucaacgacgggguguacuuugccagcaccgagaaguccaacaucaucagaggcuggaucuucggcaccacacuggacagcaagacccagagccugcugaucgugaacaacgccaccaacguggucaucaaagugugcgaguuccaguucugcaacgaccccuuccugggcgucuacuaccacaagaacaacaagagcuggauggaaagcgaguuccggguguacagcagcgccaacaacugcaccuucgaguacgugucccagccuuuccugauggaccuggaaggcaagcagggcaacuucaagaaccugcgcgaguucguguuuaagaacaucgacggcuacuucaagaucuacagcaagcacaccccuaucaaccucgugcgggaucugccucagggcuucucugcucuggaaccccugguggaucugcccaucggcaucaacaucacccgguuucagacacugcuggcccugcacagaagcuaccugacaccuggcgauagcagcagcggauggacagcuggugccgccgcuuacuaugugggcuaccugcagccuagaaccuuccugcugaaguacaacgagaacggcaccaucaccgacgccguggauugugcucuggauccucugagcgagacaaagugcacccugaaguccuucaccguggaaaagggcaucuaccagaccagcaacuuccgggugcagcccaccgaauccaucgugcgguuccccaauaucaccaaucugugccccuucggcgagguguucaaugccaccagauucgccucuguguacgccuggaaccggaagcggaucagcaauugcguggccgacuacuccgugcuguacaacuccgccagcuucagcaccuucaagugcuacggcguguccccuaccaagcugaacgaccugugcuucacaaacguguacgccgacagcuucgugauccggggagaugaagugcggcagauugccccuggacagacaggcaagaucgccgacuacaacuacaagcugcccgacgacuucaccggcugugugauugccuggaacagcaagaaccuggacuccaaagucggcggcaacuacaauuaccuguaccggcuguuccggaaguccaaucugaagcccuucgagcgggacaucuccaccgagaucuaucaggccggcagcaccccuuguaacggcguggaaggcuucaacugcuacuucccacugcaguccuacggcuuucagcccacaaauggcgugggcuaucagcccuacagagugguggugcugagcuucgaacugcugcaugccccugccacagugugcggcccuaagaaaagcaccaaucucgugaagaacaaaugcgugaacuucaacuucaacggccugaccggcaccggcgugcugacagagagcaacaagaaguuccugccauuccagcaguuuggccgggauaucgccgauaccacagacgccguuagagauccccagacacuggaaauccuggacaucaccccuugcagcuucggcggagugucugugaucaccccuggcaccaacaccagcaaucagguggcagugcuguaccagggcgugaacuguaccgaagugcccguggccauucacgccgaucagcugacaccuacauggcggguguacuccaccggcagcaauguguuucagaccagagccggcugucugaucggagccgagcacgugaacaauagcuacgagugcgacauccccaucggcgcuggaaucugcgccagcuaccagacacagacaaacagcccucggagagccagaagcguggccagccagagcaucauugccuacacaaugucucugggcgccgagaacagcguggccuacuccaacaacucuaucgcuauccccaccaacuucaccaucagcgugaccacagagauccugccuguguccaugaccaagaccagcguggacugcaccauguacaucugcggcgauuccaccgagugcuccaaccugcugcugcaguacggcagcuucugcacccagcugaauagagcccugacagggaucgccguggaacaggacaagaacacccaagagguguucgcccaagugaagcagaucuacaagaccccuccuaucaaggacuucggcggcuucaauuucagccagauucugcccgauccuagcaagcccagcaagcggagcuucaucgaggaccugcuguucaacaaagugacacuggccgacgccggcuucaucaagcaguauggcgauugucugggcgacauugccgccagggaucugauuugcgcccagaaguuuaacggacugacagugcugccuccucugcugaccgaugagaugaucgcccaguacacaucugcccugcuggccggcacaaucacaagcggcuggacauuuggagcaggcgccgcucugcagauccccuuugcuaugcagauggccuaccgguucaacggcaucggagugacccagaaugugcuguacgagaaccagaagcugaucgccaaccaguucaacagcgccaucggcaagauccaggacagccugagcagcacagcaagcgcccugggaaagcugcaggacguggucaaccagaaugcccaggcacugaacacccuggucaagcagcuguccuccaacuucggcgccaucagcucugugcugaacgauauccugagcagacuggacccuccugaggccgaggugcagaucgacagacugaucacaggcagacugcagagccuccagacauacgugacccagcagcugaucagagccgccgagauuagagccucugccaaucuggccgccaccaagaugucugagugugugcugggccagagcaagagaguggacuuuugcggcaagggcuaccaccugaugagcuucccucagucugccccucacggcgugguguuucugcacgugacauaugugcccgcucaagagaagaauuucaccaccgcuccagccaucugccacgacggcaaagcccacuuuccuagagaaggcguguucguguccaacggcacccauugguucgugacacagcggaacuucuacgagccccagaucaucaccaccgacaacaccuucgugucuggcaacugcgacgucgugaucggcauugugaacaauaccguguacgacccucugcagcccgagcuggacagcuucaaagaggaacuggacaaguacuuuaagaaccacacaagccccgacguggaccugggcgauaucagcggaaucaaugccagcgucgugaacauccagaaagagaucgaccggcugaacgagguggccaagaaucugaacgagagccugaucgaccugcaagaacuggggaaguacgagcaguacaucaaguggcccugguacaucuggcugggcuuuaucgccggacugauugccaucgugauggucacaaucaugcuguguugcaugaccagcugcuguagcugccugaagggcuguuguagcuguggcagcugcugcaaguucgacgaggacgauucugagcccgugcugaagggcgugaaacugcacuacacaugaugacucgagcugguacugcaugcacgcaaugcuagcugccccuuucccguccuggguaccccgagucucccccgaccucgggucccagguaugcucccaccuccaccugccccacucaccaccucugcuaguuccagacaccucccaagcacgcagcaaugcagcucaaaacgcuuagccuagccacacccccacgggaaacagcagugauuaaccuuuagcaauaaacgaaaguuuaacuaagcuauacuaaccccaggguuggucaauuucgugccagccacacccuggagcuagcaaaaaaaaaaaaaaaaaaaaaaaaaaaaaagcauaugacuaaaaaaaaaaaaaaaaaaaaaaaaaaaaaaaaaaaaaaaaaaaaaaaaaaaaaaaaaaaaaaaaaaaaaa

SEQ ID NO: 26911 - RNA, 4283 nt, Artificial Sequence
  SARS-CoV-2/Wuhan/WIV05/2019__EPI_ISL_402128 spike protein mRNA gc mod (1-1273)(K986P_V987P_S477N_D614G)
agaauaaacuaguauucuucugguccccacagacucagagagaacccgccaccauguucguguuccuggugcugcugccucugguguccagccagugugugaaccugaccaccagaacacagcugccuccagccuacaccaacagcuuuaccagaggcguguacuaccccgacaagguguucagauccagcgugcugcacucuacccaggaccuguuccugccuuucuucagcaacgugaccugguuccacgccauccacguguccggcaccaauggcaccaagagauucgacaaccccgugcugcccuucaacgacgggguguacuuugccagcaccgagaaguccaacaucaucagaggcuggaucuucggcaccacacuggacagcaagacccagagccugcugaucgugaacaacgccaccaacguggucaucaaagugugcgaguuccaguucugcaacgaccccuuccugggcgucuacuaccacaagaacaacaagagcuggauggaaagcgaguuccggguguacagcagcgccaacaacugcaccuucgaguacgugucccagccuuuccugauggaccuggaaggcaagcagggcaacuucaagaaccugcgcgaguucguguuuaagaacaucgacggcuacuucaagaucuacagcaagcacaccccuaucaaccucgugcgggaucugccucagggcuucucugcucuggaaccccugguggaucugcccaucggcaucaacaucacccgguuucagacacugcuggcccugcacagaagcuaccugacaccuggcgauagcagcagcggauggacagcuggugccgccgcuuacuaugugggcuaccugcagccuagaaccuuccugcugaaguacaacgagaacggcaccaucaccgacgccguggauugugcucuggauccucugagcgagacaaagugcacccugaaguccuucaccguggaaaagggcaucuaccagaccagcaacuuccgggugcagcccaccgaauccaucgugcgguuccccaauaucaccaaucugugccccuucggcgagguguucaaugccaccagauucgccucuguguacgccuggaaccggaagcggaucagcaauugcguggccgacuacuccgugcuguacaacuccgccagcuucagcaccuucaagugcuacggcguguccccuaccaagcugaacgaccugugcuucacaaacguguacgccgacagcuucgugauccggggagaugaagugcggcagauugccccuggacagacaggcaagaucgccgacuacaacuacaagcugcccgacgacuucaccggcugugugauugccuggaacagcaacaaccuggacuccaaagucggcggcaacuacaauuaccuguaccggcuguuccggaaguccaaucugaagcccuucgagcgggacaucuccaccgagaucuaucaggccggcaacaccccuuguaacggcguggaaggcuucaacugcuacuucccacugcaguccuacggcuuucagcccacaaauggcgugggcuaucagcccuacagagugguggugcugagcuucgaacugcugcaugccccugccacagugugcggcccuaagaaaagcaccaaucucgugaagaacaaaugcgugaacuucaacuucaacggccugaccggcaccggcgugcugacagagagcaacaagaaguuccugccauuccagcaguuuggccgggauaucgccgauaccacagacgccguuagagauccccagacacuggaaauccuggacaucaccccuugcagcuucggcggagugucugugaucaccccuggcaccaacaccagcaaucagguggcagugcuguaccagggcgugaacuguaccgaagugcccguggccauucacgccgaucagcugacaccuacauggcggguguacuccaccggcagcaauguguuucagaccagagccggcugucugaucggagccgagcacgugaacaauagcuacgagugcgacauccccaucggcgcuggaaucugcgccagcuaccagacacagacaaacagcccucggagagccagaagcguggccagccagagcaucauugccuacacaaugucucugggcgccgagaacagcguggccuacuccaacaacucuaucgcuauccccaccaacuucaccaucagcgugaccacagagauccugccuguguccaugaccaagaccagcguggacugcaccauguacaucugcggcgauuccaccgagugcuccaaccugcugcugcaguacggcagcuucugcacccagcugaauagagcccugacagggaucgccguggaacaggacaagaacacccaagagguguucgcccaagugaagcagaucuacaagaccccuccuaucaaggacuucggcggcuucaauuucagccagauucugcccgauccuagcaagcccagcaagcggagcuucaucgaggaccugcuguucaacaaagugacacuggccgacgccggcuucaucaagcaguauggcgauugucugggcgacauugccgccagggaucugauuugcgcccagaaguuuaacggacugacagugcugccuccucugcugaccgaugagaugaucgcccaguacacaucugcccugcuggccggcacaaucacaagcggcuggacauuuggagcaggcgccgcucugcagauccccuuugcuaugcagauggccuaccgguucaacggcaucggagugacccagaaugugcuguacgagaaccagaagcugaucgccaaccaguucaacagcgccaucggcaagauccaggacagccugagcagcacagcaagcgcccugggaaagcugcaggacguggucaaccagaaugcccaggcacugaacacccuggucaagcagcuguccuccaacuucggcgccaucagcucugugcugaacgauauccugagcagacuggacccuccugaggccgaggugcagaucgacagacugaucacaggcagacugcagagccuccagacauacgugacccagcagcugaucagagccgccgagauuagagccucugccaaucuggccgccaccaagaugucugagugugugcugggccagagcaagagaguggacuuuugcggcaagggcuaccaccugaugagcuucccucagucugccccucacggcgugguguuucugcacgugacauaugugcccgcucaagagaagaauuucaccaccgcuccagccaucugccacgacggcaaagcccacuuuccuagagaaggcguguucguguccaacggcacccauugguucgugacacagcggaacuucuacgagccccagaucaucaccaccgacaacaccuucgugucuggcaacugcgacgucgugaucggcauugugaacaauaccguguacgacccucugcagcccgagcuggacagcuucaaagaggaacuggacaaguacuuuaagaaccacacaagccccgacguggaccugggcgauaucagcggaaucaaugccagcgucgugaacauccagaaagagaucgaccggcugaacgagguggccaagaaucugaacgagagccugaucgaccugcaagaacuggggaaguacgagcaguacaucaaguggcccugguacaucuggcugggcuuuaucgccggacugauugccaucgugauggucacaaucaugcuguguugcaugaccagcugcuguagcugccugaagggcuguuguagcuguggcagcugcugcaaguucgacgaggacgauucugagcccgugcugaagggcgugaaacugcacuacacaugaugacucgagcugguacugcaugcacgcaaugcuagcugccccuuucccguccuggguaccccgagucucccccgaccucgggucccagguaugcucccaccuccaccugccccacucaccaccucugcuaguuccagacaccucccaagcacgcagcaaugcagcucaaaacgcuuagccuagccacacccccacgggaaacagcagugauuaaccuuuagcaauaaacgaaaguuuaacuaagcuauacuaaccccaggguuggucaauuucgugccagccacacccuggagcuagcaaaaaaaaaaaaaaaaaaaaaaaaaaaaaagcauaugacuaaaaaaaaaaaaaaaaaaaaaaaaaaaaaaaaaaaaaaaaaaaaaaaaaaaaaaaaaaaaaaaaaaaaaa

SEQ ID NO: 26912 - RNA, 4283 nt, Artificial Sequence
  SARS-CoV-2/Wuhan/WIV05/2019__EPI_ISL_402128 spike protein mRNA gc mod (1-1273)(K986P_V987P_N501Y_D614G)
agaauaaacuaguauucuucugguccccacagacucagagagaacccgccaccauguucguguuccuggugcugcugccucugguguccagccagugugugaaccugaccaccagaacacagcugccuccagccuacaccaacagcuuuaccagaggcguguacuaccccgacaagguguucagauccagcgugcugcacucuacccaggaccuguuccugccuuucuucagcaacgugaccugguuccacgccauccacguguccggcaccaauggcaccaagagauucgacaaccccgugcugcccuucaacgacgggguguacuuugccagcaccgagaaguccaacaucaucagaggcuggaucuucggcaccacacuggacagcaagacccagagccugcugaucgugaacaacgccaccaacguggucaucaaagugugcgaguuccaguucugcaacgaccccuuccugggcgucuacuaccacaagaacaacaagagcuggauggaaagcgaguuccggguguacagcagcgccaacaacugcaccuucgaguacgugucccagccuuuccugauggaccuggaaggcaagcagggcaacuucaagaaccugcgcgaguucguguuuaagaacaucgacggcuacuucaagaucuacagcaagcacaccccuaucaaccucgugcgggaucugccucagggcuucucugcucuggaaccccugguggaucugcccaucggcaucaacaucacccgguuucagacacugcuggcccugcacagaagcuaccugacaccuggcgauagcagcagcggauggacagcuggugccgccgcuuacuaugugggcuaccugcagccuagaaccuuccugcugaaguacaacgagaacggcaccaucaccgacgccguggauugugcucuggauccucugagcgagacaaagugcacccugaaguccuucaccguggaaaagggcaucuaccagaccagcaacuuccgggugcagcccaccgaauccaucgugcgguuccccaauaucaccaaucugugccccuucggcgagguguucaaugccaccagauucgccucuguguacgccuggaaccggaagcggaucagcaauugcguggccgacuacuccgugcuguacaacuccgccagcuucagcaccuucaagugcuacggcguguccccuaccaagcugaacgaccugugcuucacaaacguguacgccgacagcuucgugauccggggagaugaagugcggcagauugccccuggacagacaggcaagaucgccgacuacaacuacaagcugcccgacgacuucaccggcugugugauugccuggaacagcaacaaccuggacuccaaagucggcggcaacuacaauuaccuguaccggcuguuccggaaguccaaucugaagcccuucgagcgggacaucuccaccgagaucuaucaggccggcagcaccccuuguaacggcguggaaggcuucaacugcuacuucccacugcaguccuacggcuuucagcccacauacggcgugggcuaucagcccuacagagugguggugcugagcuucgaacugcugcaugccccugccacagugugcggcccuaagaaaagcaccaaucucgugaagaacaaaugcgugaacuucaacuucaacggccugaccggcaccggcgugcugacagagagcaacaagaaguuccugccauuccagcaguuuggccgggauaucgccgauaccacagacgccguuagagauccccagacacuggaaauccuggacaucaccccuugcagcuucggcggagugucugugaucaccccuggcaccaacaccagcaaucagguggcagugcuguaccagggcgugaacuguaccgaagugcccguggccauucacgccgaucagcugacaccuacauggcggguguacuccaccggcagcaauguguuucagaccagagccggcugucugaucggagccgagcacgugaacaauagcuacgagugcgacauccccaucggcgcuggaaucugcgccagcuaccagacacagacaaacagcccucggagagccagaagcguggccagccagagcaucauugccuacacaaugucucugggcgccgagaacagcguggccuacuccaacaacucuaucgcuauccccaccaacuucaccaucagcgugaccacagagauccugccuguguccaugaccaagaccagcguggacugcaccauguacaucugcggcgauuccaccgagugcuccaaccugcugcugcaguacggcagcuucugcacccagcugaauagagcccugacagggaucgccguggaacaggacaagaacacccaagagguguucgcccaagugaagcagaucuacaagaccccuccuaucaaggacuucggcggcuucaauuucagccagauucugcccgauccuagcaagcccagcaagcggagcuucaucgaggaccugcuguucaacaaagugacacuggccgacgccggcuucaucaagcaguauggcgauugucugggcgacauugccgccagggaucugauuugcgcccagaaguuuaacggacugacagugcugccuccucugcugaccgaugagaugaucgcccaguacacaucugcccugcuggccggcacaaucacaagcggcuggacauuuggagcaggcgccgcucugcagauccccuuugcuaugcagauggccuaccgguucaacggcaucggagugacccagaaugugcuguacgagaaccagaagcugaucgccaaccaguucaacagcgccaucggcaagauccaggacagccugagcagcacagcaagcgcccugggaaagcugcaggacguggucaaccagaaugcccaggcacugaacacccuggucaagcagcuguccuccaacuucggcgccaucagcucugugcugaacgauauccugagcagacuggacccuccugaggccgaggugcagaucgacagacugaucacaggcagacugcagagccuccagacauacgugacccagcagcugaucagagccgccgagauuagagccucugccaaucuggccgccaccaagaugucugagugugugcugggccagagcaagagaguggacuuuugcggcaagggcuaccaccugaugagcuucccucagucugccccucacggcgugguguuucugcacgugacauaugugcccgcucaagagaagaauuucaccaccgcuccagccaucugccacgacggcaaagcccacuuuccuagagaaggcguguucguguccaacggcacccauugguucgugacacagcggaacuucuacgagccccagaucaucaccaccgacaacaccuucgugucuggcaacugcgacgucgugaucggcauugugaacaauaccguguacgacccucugcagcccgagcuggacagcuucaaagaggaacuggacaaguacuuuaagaaccacacaagccccgacguggaccugggcgauaucagcggaaucaaugccagcgucgugaacauccagaaagagaucgaccggcugaacgagguggccaagaaucugaacgagagccugaucgaccugcaagaacuggggaaguacgagcaguacaucaaguggcccugguacaucuggcugggcuuuaucgccggacugauugccaucgugauggucacaaucaugcuguguugcaugaccagcugcuguagcugccugaagggcuguuguagcuguggcagcugcugcaaguucgacgaggacgauucugagcccgugcugaagggcgugaaacugcacuacacaugaugacucgagcugguacugcaugcacgcaaugcuagcugccccuuucccguccuggguaccccgagucucccccgaccucgggucccagguaugcucccaccuccaccugccccacucaccaccucugcuaguuccagacaccucccaagcacgcagcaaugcagcucaaaacgcuuagccuagccacacccccacgggaaacagcagugauuaaccuuuagcaauaaacgaaaguuuaacuaagcuauacuaaccccaggguuggucaauuucgugccagccacacccuggagcuagcaaaaaaaaaaaaaaaaaaaaaaaaaaaaaagcauaugacuaaaaaaaaaaaaaaaaaaaaaaaaaaaaaaaaaaaaaaaaaaaaaaaaaaaaaaaaaaaaaaaaaaaaaa

SEQ ID NO: 26913 - RNA, 4277 nt, Artificial Sequence
  SARS-CoV-2/Wuhan/WIV05/2019__EPI_ISL_402128 spike protein mRNA gc mod (1-1273)(K986P_V987P_H69del_V70del_D614G)
agaauaaacuaguauucuucugguccccacagacucagagagaacccgccaccauguucguguuccuggugcugcugccucugguguccagccagugugugaaccugaccaccagaacacagcugccuccagccuacaccaacagcuuuaccagaggcguguacuaccccgacaagguguucagauccagcgugcugcacucuacccaggaccuguuccugccuuucuucagcaacgugaccugguuccacgccaucuccggcaccaauggcaccaagagauucgacaaccccgugcugcccuucaacgacgggguguacuuugccagcaccgagaaguccaacaucaucagaggcuggaucuucggcaccacacuggacagcaagacccagagccugcugaucgugaacaacgccaccaacguggucaucaaagugugcgaguuccaguucugcaacgaccccuuccugggcgucuacuaccacaagaacaacaagagcuggauggaaagcgaguuccggguguacagcagcgccaacaacugcaccuucgaguacgugucccagccuuuccugauggaccuggaaggcaagcagggcaacuucaagaaccugcgcgaguucguguuuaagaacaucgacggcuacuucaagaucuacagcaagcacaccccuaucaaccucgugcgggaucugccucagggcuucucugcucuggaaccccugguggaucugcccaucggcaucaacaucacccgguuucagacacugcuggcccugcacagaagcuaccugacaccuggcgauagcagcagcggauggacagcuggugccgccgcuuacuaugugggcuaccugcagccuagaaccuuccugcugaaguacaacgagaacggcaccaucaccgacgccguggauugugcucuggauccucugagcgagacaaagugcacccugaaguccuucaccguggaaaagggcaucuaccagaccagcaacuuccgggugcagcccaccgaauccaucgugcgguuccccaauaucaccaaucugugccccuucggcgagguguucaaugccaccagauucgccucuguguacgccuggaaccggaagcggaucagcaauugcguggccgacuacuccgugcuguacaacuccgccagcuucagcaccuucaagugcuacggcguguccccuaccaagcugaacgaccugugcuucacaaacguguacgccgacagcuucgugauccggggagaugaagugcggcagauugccccuggacagacaggcaagaucgccgacuacaacuacaagcugcccgacgacuucaccggcugugugauugccuggaacagcaacaaccuggacuccaaagucggcggcaacuacaauuaccuguaccggcuguuccggaaguccaaucugaagcccuucgagcgggacaucuccaccgagaucuaucaggccggcagcaccccuuguaacggcguggaaggcuucaacugcuacuucccacugcaguccuacggcuuucagcccacaaauggcgugggcuaucagcccuacagagugguggugcugagcuucgaacugcugcaugccccugccacagugugcggcccuaagaaaagcaccaaucucgugaagaacaaaugcgugaacuucaacuucaacggccugaccggcaccggcgugcugacagagagcaacaagaaguuccugccauuccagcaguuuggccgggauaucgccgauaccacagacgccguuagagauccccagacacuggaaauccuggacaucaccccuugcagcuucggcggagugucugugaucaccccuggcaccaacaccagcaaucagguggcagugcuguaccagggcgugaacuguaccgaagugcccguggccauucacgccgaucagcugacaccuacauggcggguguacuccaccggcagcaauguguuucagaccagagccggcugucugaucggagccgagcacgugaacaauagcuacgagugcgacauccccaucggcgcuggaaucugcgccagcuaccagacacagacaaacagcccucggagagccagaagcguggccagccagagcaucauugccuacacaaugucucugggcgccgagaacagcguggccuacuccaacaacucuaucgcuauccccaccaacuucaccaucagcgugaccacagagauccugccuguguccaugaccaagaccagcguggacugcaccauguacaucugcggcgauuccaccgagugcuccaaccugcugcugcaguacggcagcuucugcacccagcugaauagagcccugacagggaucgccguggaacaggacaagaacacccaagagguguucgcccaagugaagcagaucuacaagaccccuccuaucaaggacuucggcggcuucaauuucagccagauucugcccgauccuagcaagcccagcaagcggagcuucaucgaggaccugcuguucaacaaagugacacuggccgacgccggcuucaucaagcaguauggcgauugucugggcgacauugccgccagggaucugauuugcgcccagaaguuuaacggacugacagugcugccuccucugcugaccgaugagaugaucgcccaguacacaucugcccugcuggccggcacaaucacaagcggcuggacauuuggagcaggcgccgcucugcagauccccuuugcuaugcagauggccuaccgguucaacggcaucggagugacccagaaugugcuguacgagaaccagaagcugaucgccaaccaguucaacagcgccaucggcaagauccaggacagccugagcagcacagcaagcgcccugggaaagcugcaggacguggucaaccagaaugcccaggcacugaacacccuggucaagcagcuguccuccaacuucggcgccaucagcucugugcugaacgauauccugagcagacuggacccuccugaggccgaggugcagaucgacagacugaucacaggcagacugcagagccuccagacauacgugacccagcagcugaucagagccgccgagauuagagccucugccaaucuggccgccaccaagaugucugagugugugcugggccagagcaagagaguggacuuuugcggcaagggcuaccaccugaugagcuucccucagucugccccucacggcgugguguuucugcacgugacauaugugcccgcucaagagaagaauuucaccaccgcuccagccaucugccacgacggcaaagcccacuuuccuagagaaggcguguucguguccaacggcacccauugguucgugacacagcggaacuucuacgagccccagaucaucaccaccgacaacaccuucgugucuggcaacugcgacgucgugaucggcauugugaacaauaccguguacgacccucugcagcccgagcuggacagcuucaaagaggaacuggacaaguacuuuaagaaccacacaagccccgacguggaccugggcgauaucagcggaaucaaugccagcgucgugaacauccagaaagagaucgaccggcugaacgagguggccaagaaucugaacgagagccugaucgaccugcaagaacuggggaaguacgagcaguacaucaaguggcccugguacaucuggcugggcuuuaucgccggacugauugccaucgugauggucacaaucaugcuguguugcaugaccagcugcuguagcugccugaagggcuguuguagcuguggcagcugcugcaaguucgacgaggacgauucugagcccgugcugaagggcgugaaacugcacuacacaugaugacucgagcugguacugcaugcacgcaaugcuagcugccccuuucccguccuggguaccccgagucucccccgaccucgggucccagguaugcucccaccuccaccugccccacucaccaccucugcuaguuccagacaccucccaagcacgcagcaaugcagcucaaaacgcuuagccuagccacacccccacgggaaacagcagugauuaaccuuuagcaauaaacgaaaguuuaacuaagcuauacuaaccccaggguuggucaauuucgugccagccacacccuggagcuagcaaaaaaaaaaaaaaaaaaaaaaaaaaaaaagcauaugacuaaaaaaaaaaaaaaaaaaaaaaaaaaaaaaaaaaaaaaaaaaaaaaaaaaaaaaaaaaaaaaaaaaaaaa

SEQ ID NO: 26914 - RNA, 4283 nt, Artificial Sequence
  SARS-CoV-2/Wuhan/WIV05/2019__EPI_ISL_402128 spike protein mRNA gc mod (1-1273)(K986P_V987P_Y453F_D614G)
agaauaaacuaguauucuucugguccccacagacucagagagaacccgccaccauguucguguuccuggugcugcugccucugguguccagccagugugugaaccugaccaccagaacacagcugccuccagccuacaccaacagcuuuaccagaggcguguacuaccccgacaagguguucagauccagcgugcugcacucuacccaggaccuguuccugccuuucuucagcaacgugaccugguuccacgccauccacguguccggcaccaauggcaccaagagauucgacaaccccgugcugcccuucaacgacgggguguacuuugccagcaccgagaaguccaacaucaucagaggcuggaucuucggcaccacacuggacagcaagacccagagccugcugaucgugaacaacgccaccaacguggucaucaaagugugcgaguuccaguucugcaacgaccccuuccugggcgucuacuaccacaagaacaacaagagcuggauggaaagcgaguuccggguguacagcagcgccaacaacugcaccuucgaguacgugucccagccuuuccugauggaccuggaaggcaagcagggcaacuucaagaaccugcgcgaguucguguuuaagaacaucgacggcuacuucaagaucuacagcaagcacaccccuaucaaccucgugcgggaucugccucagggcuucucugcucuggaaccccugguggaucugcccaucggcaucaacaucacccgguuucagacacugcuggcccugcacagaagcuaccugacaccuggcgauagcagcagcggauggacagcuggugccgccgcuuacuaugugggcuaccugcagccuagaaccuuccugcugaaguacaacgagaacggcaccaucaccgacgccguggauugugcucuggauccucugagcgagacaaagugcacccugaaguccuucaccguggaaaagggcaucuaccagaccagcaacuuccgggugcagcccaccgaauccaucgugcgguuccccaauaucaccaaucugugccccuucggcgagguguucaaugccaccagauucgccucuguguacgccuggaaccggaagcggaucagcaauugcguggccgacuacuccgugcuguacaacuccgccagcuucagcaccuucaagugcuacggcguguccccuaccaagcugaacgaccugugcuucacaaacguguacgccgacagcuucgugauccggggagaugaagugcggcagauugccccuggacagacaggcaagaucgccgacuacaacuacaagcugcccgacgacuucaccggcugugugauugccuggaacagcaacaaccuggacuccaaagucggcggcaacuacaauuaccuguuccggcuguuccggaaguccaaucugaagcccuucgagcgggacaucuccaccgagaucuaucaggccggcagcaccccuuguaacggcguggaaggcuucaacugcuacuucccacugcaguccuacggcuuucagcccacaaauggcgugggcuaucagcccuacagagugguggugcugagcuucgaacugcugcaugccccugccacagugugcggcccuaagaaaagcaccaaucucgugaagaacaaaugcgugaacuucaacuucaacggccugaccggcaccggcgugcugacagagagcaacaagaaguuccugccauuccagcaguuuggccgggauaucgccgauaccacagacgccguuagagauccccagacacuggaaauccuggacaucaccccuugcagcuucggcggagugucugugaucaccccuggcaccaacaccagcaaucagguggcagugcuguaccagggcgugaacuguaccgaagugcccguggccauucacgccgaucagcugacaccuacauggcggguguacuccaccggcagcaauguguuucagaccagagccggcugucugaucggagccgagcacgugaacaauagcuacgagugcgacauccccaucggcgcuggaaucugcgccagcuaccagacacagacaaacagcccucggagagccagaagcguggccagccagagcaucauugccuacacaaugucucugggcgccgagaacagcguggccuacuccaacaacucuaucgcuauccccaccaacuucaccaucagcgugaccacagagauccugccuguguccaugaccaagaccagcguggacugcaccauguacaucugcggcgauuccaccgagugcuccaaccugcugcugcaguacggcagcuucugcacccagcugaauagagcccugacagggaucgccguggaacaggacaagaacacccaagagguguucgcccaagugaagcagaucuacaagaccccuccuaucaaggacuucggcggcuucaauuucagccagauucugcccgauccuagcaagcccagcaagcggagcuucaucgaggaccugcuguucaacaaagugacacuggccgacgccggcuucaucaagcaguauggcgauugucugggcgacauugccgccagggaucugauuugcgcccagaaguuuaacggacugacagugcugccuccucugcugaccgaugagaugaucgcccaguacacaucugcccugcuggccggcacaaucacaagcggcuggacauuuggagcaggcgccgcucugcagauccccuuugcuaugcagauggccuaccgguucaacggcaucggagugacccagaaugugcuguacgagaaccagaagcugaucgccaaccaguucaacagcgccaucggcaagauccaggacagccugagcagcacagcaagcgcccugggaaagcugcaggacguggucaaccagaaugcccaggcacugaacacccuggucaagcagcuguccuccaacuucggcgccaucagcucugugcugaacgauauccugagcagacuggacccuccugaggccgaggugcagaucgacagacugaucacaggcagacugcagagccuccagacauacgugacccagcagcugaucagagccgccgagauuagagccucugccaaucuggccgccaccaagaugucugagugugugcugggccagagcaagagaguggacuuuugcggcaagggcuaccaccugaugagcuucccucagucugccccucacggcgugguguuucugcacgugacauaugugcccgcucaagagaagaauuucaccaccgcuccagccaucugccacgacggcaaagcccacuuuccuagagaaggcguguucguguccaacggcacccauugguucgugacacagcggaacuucuacgagccccagaucaucaccaccgacaacaccuucgugucuggcaacugcgacgucgugaucggcauugugaacaauaccguguacgacccucugcagcccgagcuggacagcuucaaagaggaacuggacaaguacuuuaagaaccacacaagccccgacguggaccugggcgauaucagcggaaucaaugccagcgucgugaacauccagaaagagaucgaccggcugaacgagguggccaagaaucugaacgagagccugaucgaccugcaagaacuggggaaguacgagcaguacaucaaguggcccugguacaucuggcugggcuuuaucgccggacugauugccaucgugauggucacaaucaugcuguguugcaugaccagcugcuguagcugccugaagggcuguuguagcuguggcagcugcugcaaguucgacgaggacgauucugagcccgugcugaagggcgugaaacugcacuacacaugaugacucgagcugguacugcaugcacgcaaugcuagcugccccuuucccguccuggguaccccgagucucccccgaccucgggucccagguaugcucccaccuccaccugccccacucaccaccucugcuaguuccagacaccucccaagcacgcagcaaugcagcucaaaacgcuuagccuagccacacccccacgggaaacagcagugauuaaccuuuagcaauaaacgaaaguuuaacuaagcuauacuaaccccaggguuggucaauuucgugccagccacacccuggagcuagcaaaaaaaaaaaaaaaaaaaaaaaaaaaaaagcauaugacuaaaaaaaaaaaaaaaaaaaaaaaaaaaaaaaaaaaaaaaaaaaaaaaaaaaaaaaaaaaaaaaaaaaaaa

SEQ ID NO: 26915 - RNA, 4283 nt, Artificial Sequence
  SARS-CoV-2/Wuhan/WIV05/2019__EPI_ISL_402128 spike protein mRNA gc mod (1-1273)(K986P_V987P_D614G_I692V)
agaauaaacuaguauucuucugguccccacagacucagagagaacccgccaccauguucguguuccuggugcugcugccucugguguccagccagugugugaaccugaccaccagaacacagcugccuccagccuacaccaacagcuuuaccagaggcguguacuaccccgacaagguguucagauccagcgugcugcacucuacccaggaccuguuccugccuuucuucagcaacgugaccugguuccacgccauccacguguccggcaccaauggcaccaagagauucgacaaccccgugcugcccuucaacgacgggguguacuuugccagcaccgagaaguccaacaucaucagaggcuggaucuucggcaccacacuggacagcaagacccagagccugcugaucgugaacaacgccaccaacguggucaucaaagugugcgaguuccaguucugcaacgaccccuuccugggcgucuacuaccacaagaacaacaagagcuggauggaaagcgaguuccggguguacagcagcgccaacaacugcaccuucgaguacgugucccagccuuuccugauggaccuggaaggcaagcagggcaacuucaagaaccugcgcgaguucguguuuaagaacaucgacggcuacuucaagaucuacagcaagcacaccccuaucaaccucgugcgggaucugccucagggcuucucugcucuggaaccccugguggaucugcccaucggcaucaacaucacccgguuucagacacugcuggcccugcacagaagcuaccugacaccuggcgauagcagcagcggauggacagcuggugccgccgcuuacuaugugggcuaccugcagccuagaaccuuccugcugaaguacaacgagaacggcaccaucaccgacgccguggauugugcucuggauccucugagcgagacaaagugcacccugaaguccuucaccguggaaaagggcaucuaccagaccagcaacuuccgggugcagcccaccgaauccaucgugcgguuccccaauaucaccaaucugugccccuucggcgagguguucaaugccaccagauucgccucuguguacgccuggaaccggaagcggaucagcaauugcguggccgacuacuccgugcuguacaacuccgccagcuucagcaccuucaagugcuacggcguguccccuaccaagcugaacgaccugugcuucacaaacguguacgccgacagcuucgugauccggggagaugaagugcggcagauugccccuggacagacaggcaagaucgccgacuacaacuacaagcugcccgacgacuucaccggcugugugauugccuggaacagcaacaaccuggacuccaaagucggcggcaacuacaauuaccuguaccggcuguuccggaaguccaaucugaagcccuucgagcgggacaucuccaccgagaucuaucaggccggcagcaccccuuguaacggcguggaaggcuucaacugcuacuucccacugcaguccuacggcuuucagcccacaaauggcgugggcuaucagcccuacagagugguggugcugagcuucgaacugcugcaugccccugccacagugugcggcccuaagaaaagcaccaaucucgugaagaacaaaugcgugaacuucaacuucaacggccugaccggcaccggcgugcugacagagagcaacaagaaguuccugccauuccagcaguuuggccgggauaucgccgauaccacagacgccguuagagauccccagacacuggaaauccuggacaucaccccuugcagcuucggcggagugucugugaucaccccuggcaccaacaccagcaaucagguggcagugcuguaccagggcgugaacuguaccgaagugcccguggccauucacgccgaucagcugacaccuacauggcggguguacuccaccggcagcaauguguuucagaccagagccggcugucugaucggagccgagcacgugaacaauagcuacgagugcgacauccccaucggcgcuggaaucugcgccagcuaccagacacagacaaacagcccucggagagccagaagcguggccagccagagcgugauugccuacacaaugucucugggcgccgagaacagcguggccuacuccaacaacucuaucgcuauccccaccaacuucaccaucagcgugaccacagagauccugccuguguccaugaccaagaccagcguggacugcaccauguacaucugcggcgauuccaccgagugcuccaaccugcugcugcaguacggcagcuucugcacccagcugaauagagcccugacagggaucgccguggaacaggacaagaacacccaagagguguucgcccaagugaagcagaucuacaagaccccuccuaucaaggacuucggcggcuucaauuucagccagauucugcccgauccuagcaagcccagcaagcggagcuucaucgaggaccugcuguucaacaaagugacacuggccgacgccggcuucaucaagcaguauggcgauugucugggcgacauugccgccagggaucugauuugcgcccagaaguuuaacggacugacagugcugccuccucugcugaccgaugagaugaucgcccaguacacaucugcccugcuggccggcacaaucacaagcggcuggacauuuggagcaggcgccgcucugcagauccccuuugcuaugcagauggccuaccgguucaacggcaucggagugacccagaaugugcuguacgagaaccagaagcugaucgccaaccaguucaacagcgccaucggcaagauccaggacagccugagcagcacagcaagcgcccugggaaagcugcaggacguggucaaccagaaugcccaggcacugaacacccuggucaagcagcuguccuccaacuucggcgccaucagcucugugcugaacgauauccugagcagacuggacccuccugaggccgaggugcagaucgacagacugaucacaggcagacugcagagccuccagacauacgugacccagcagcugaucagagccgccgagauuagagccucugccaaucuggccgccaccaagaugucugagugugugcugggccagagcaagagaguggacuuuugcggcaagggcuaccaccugaugagcuucccucagucugccccucacggcgugguguuucugcacgugacauaugugcccgcucaagagaagaauuucaccaccgcuccagccaucugccacgacggcaaagcccacuuuccuagagaaggcguguucguguccaacggcacccauugguucgugacacagcggaacuucuacgagccccagaucaucaccaccgacaacaccuucgugucuggcaacugcgacgucgugaucggcauugugaacaauaccguguacgacccucugcagcccgagcuggacagcuucaaagaggaacuggacaaguacuuuaagaaccacacaagccccgacguggaccugggcgauaucagcggaaucaaugccagcgucgugaacauccagaaagagaucgaccggcugaacgagguggccaagaaucugaacgagagccugaucgaccugcaagaacuggggaaguacgagcaguacaucaaguggcccugguacaucuggcugggcuuuaucgccggacugauugccaucgugauggucacaaucaugcuguguugcaugaccagcugcuguagcugccugaagggcuguuguagcuguggcagcugcugcaaguucgacgaggacgauucugagcccgugcugaagggcgugaaacugcacuacacaugaugacucgagcugguacugcaugcacgcaaugcuagcugccccuuucccguccuggguaccccgagucucccccgaccucgggucccagguaugcucccaccuccaccugccccacucaccaccucugcuaguuccagacaccucccaagcacgcagcaaugcagcucaaaacgcuuagccuagccacacccccacgggaaacagcagugauuaaccuuuagcaauaaacgaaaguuuaacuaagcuauacuaaccccaggguuggucaauuucgugccagccacacccuggagcuagcaaaaaaaaaaaaaaaaaaaaaaaaaaaaaagcauaugacuaaaaaaaaaaaaaaaaaaaaaaaaaaaaaaaaaaaaaaaaaaaaaaaaaaaaaaaaaaaaaaaaaaaaaa

SEQ ID NO: 26916 - RNA, 4283 nt, Artificial Sequence
  SARS-CoV-2/Wuhan/WIV05/2019__EPI_ISL_402128 spike protein mRNA gc mod (1-1273)(K986P_V987P_D614G_M1229I)
agaauaaacuaguauucuucugguccccacagacucagagagaacccgccaccauguucguguuccuggugcugcugccucugguguccagccagugugugaaccugaccaccagaacacagcugccuccagccuacaccaacagcuuuaccagaggcguguacuaccccgacaagguguucagauccagcgugcugcacucuacccaggaccuguuccugccuuucuucagcaacgugaccugguuccacgccauccacguguccggcaccaauggcaccaagagauucgacaaccccgugcugcccuucaacgacgggguguacuuugccagcaccgagaaguccaacaucaucagaggcuggaucuucggcaccacacuggacagcaagacccagagccugcugaucgugaacaacgccaccaacguggucaucaaagugugcgaguuccaguucugcaacgaccccuuccugggcgucuacuaccacaagaacaacaagagcuggauggaaagcgaguuccggguguacagcagcgccaacaacugcaccuucgaguacgugucccagccuuuccugauggaccuggaaggcaagcagggcaacuucaagaaccugcgcgaguucguguuuaagaacaucgacggcuacuucaagaucuacagcaagcacaccccuaucaaccucgugcgggaucugccucagggcuucucugcucuggaaccccugguggaucugcccaucggcaucaacaucacccgguuucagacacugcuggcccugcacagaagcuaccugacaccuggcgauagcagcagcggauggacagcuggugccgccgcuuacuaugugggcuaccugcagccuagaaccuuccugcugaaguacaacgagaacggcaccaucaccgacgccguggauugugcucuggauccucugagcgagacaaagugcacccugaaguccuucaccguggaaaagggcaucuaccagaccagcaacuuccgggugcagcccaccgaauccaucgugcgguuccccaauaucaccaaucugugccccuucggcgagguguucaaugccaccagauucgccucuguguacgccuggaaccggaagcggaucagcaauugcguggccgacuacuccgugcuguacaacuccgccagcuucagcaccuucaagugcuacggcguguccccuaccaagcugaacgaccugugcuucacaaacguguacgccgacagcuucgugauccggggagaugaagugcggcagauugccccuggacagacaggcaagaucgccgacuacaacuacaagcugcccgacgacuucaccggcugugugauugccuggaacagcaacaaccuggacuccaaagucggcggcaacuacaauuaccuguaccggcuguuccggaaguccaaucugaagcccuucgagcgggacaucuccaccgagaucuaucaggccggcagcaccccuuguaacggcguggaaggcuucaacugcuacuucccacugcaguccuacggcuuucagcccacaaauggcgugggcuaucagcccuacagagugguggugcugagcuucgaacugcugcaugccccugccacagugugcggcccuaagaaaagcaccaaucucgugaagaacaaaugcgugaacuucaacuucaacggccugaccggcaccggcgugcugacagagagcaacaagaaguuccugccauuccagcaguuuggccgggauaucgccgauaccacagacgccguuagagauccccagacacuggaaauccuggacaucaccccuugcagcuucggcggagugucugugaucaccccuggcaccaacaccagcaaucagguggcagugcuguaccagggcgugaacuguaccgaagugcccguggccauucacgccgaucagcugacaccuacauggcggguguacuccaccggcagcaauguguuucagaccagagccggcugucugaucggagccgagcacgugaacaauagcuacgagugcgacauccccaucggcgcuggaaucugcgccagcuaccagacacagacaaacagcccucggagagccagaagcguggccagccagagcaucauugccuacacaaugucucugggcgccgagaacagcguggccuacuccaacaacucuaucgcuauccccaccaacuucaccaucagcgugaccacagagauccugccuguguccaugaccaagaccagcguggacugcaccauguacaucugcggcgauuccaccgagugcuccaaccugcugcugcaguacggcagcuucugcacccagcugaauagagcccugacagggaucgccguggaacaggacaagaacacccaagagguguucgcccaagugaagcagaucuacaagaccccuccuaucaaggacuucggcggcuucaauuucagccagauucugcccgauccuagcaagcccagcaagcggagcuucaucgaggaccugcuguucaacaaagugacacuggccgacgccggcuucaucaagcaguauggcgauugucugggcgacauugccgccagggaucugauuugcgcccagaaguuuaacggacugacagugcugccuccucugcugaccgaugagaugaucgcccaguacacaucugcccugcuggccggcacaaucacaagcggcuggacauuuggagcaggcgccgcucugcagauccccuuugcuaugcagauggccuaccgguucaacggcaucggagugacccagaaugugcuguacgagaaccagaagcugaucgccaaccaguucaacagcgccaucggcaagauccaggacagccugagcagcacagcaagcgcccugggaaagcugcaggacguggucaaccagaaugcccaggcacugaacacccuggucaagcagcuguccuccaacuucggcgccaucagcucugugcugaacgauauccugagcagacuggacccuccugaggccgaggugcagaucgacagacugaucacaggcagacugcagagccuccagacauacgugacccagcagcugaucagagccgccgagauuagagccucugccaaucuggccgccaccaagaugucugagugugugcugggccagagcaagagaguggacuuuugcggcaagggcuaccaccugaugagcuucccucagucugccccucacggcgugguguuucugcacgugacauaugugcccgcucaagagaagaauuucaccaccgcuccagccaucugccacgacggcaaagcccacuuuccuagagaaggcguguucguguccaacggcacccauugguucgugacacagcggaacuucuacgagccccagaucaucaccaccgacaacaccuucgugucuggcaacugcgacgucgugaucggcauugugaacaauaccguguacgacccucugcagcccgagcuggacagcuucaaagaggaacuggacaaguacuuuaagaaccacacaagccccgacguggaccugggcgauaucagcggaaucaaugccagcgucgugaacauccagaaagagaucgaccggcugaacgagguggccaagaaucugaacgagagccugaucgaccugcaagaacuggggaaguacgagcaguacaucaaguggcccugguacaucuggcugggcuuuaucgccggacugauugccaucgugaucgucacaaucaugcuguguugcaugaccagcugcuguagcugccugaagggcuguuguagcuguggcagcugcugcaaguucgacgaggacgauucugagcccgugcugaagggcgugaaacugcacuacacaugaugacucgagcugguacugcaugcacgcaaugcuagcugccccuuucccguccuggguaccccgagucucccccgaccucgggucccagguaugcucccaccuccaccugccccacucaccaccucugcuaguuccagacaccucccaagcacgcagcaaugcagcucaaaacgcuuagccuagccacacccccacgggaaacagcagugauuaaccuuuagcaauaaacgaaaguuuaacuaagcuauacuaaccccaggguuggucaauuucgugccagccacacccuggagcuagcaaaaaaaaaaaaaaaaaaaaaaaaaaaaaagcauaugacuaaaaaaaaaaaaaaaaaaaaaaaaaaaaaaaaaaaaaaaaaaaaaaaaaaaaaaaaaaaaaaaaaaaaaa

SEQ ID NO: 26917 - RNA, 4277 nt, Artificial Sequence
  SARS-CoV-2/Wuhan/WIV05/2019__EPI_ISL_402128 spike protein mRNA gc mod (1-1273)(K986P_V987P_H69del_V70del_A222V_Y453F_S477N_D614G_I692V)
agaauaaacuaguauucuucugguccccacagacucagagagaacccgccaccauguucguguuccuggugcugcugccucugguguccagccagugugugaaccugaccaccagaacacagcugccuccagccuacaccaacagcuuuaccagaggcguguacuaccccgacaagguguucagauccagcgugcugcacucuacccaggaccuguuccugccuuucuucagcaacgugaccugguuccacgccaucuccggcaccaauggcaccaagagauucgacaaccccgugcugcccuucaacgacgggguguacuuugccagcaccgagaaguccaacaucaucagaggcuggaucuucggcaccacacuggacagcaagacccagagccugcugaucgugaacaacgccaccaacguggucaucaaagugugcgaguuccaguucugcaacgaccccuuccugggcgucuacuaccacaagaacaacaagagcuggauggaaagcgaguuccggguguacagcagcgccaacaacugcaccuucgaguacgugucccagccuuuccugauggaccuggaaggcaagcagggcaacuucaagaaccugcgcgaguucguguuuaagaacaucgacggcuacuucaagaucuacagcaagcacaccccuaucaaccucgugcgggaucugccucagggcuucucugugcuggaaccccugguggaucugcccaucggcaucaacaucacccgguuucagacacugcuggcccugcacagaagcuaccugacaccuggcgauagcagcagcggauggacagcuggugccgccgcuuacuaugugggcuaccugcagccuagaaccuuccugcugaaguacaacgagaacggcaccaucaccgacgccguggauugugcucuggauccucugagcgagacaaagugcacccugaaguccuucaccguggaaaagggcaucuaccagaccagcaacuuccgggugcagcccaccgaauccaucgugcgguuccccaauaucaccaaucugugccccuucggcgagguguucaaugccaccagauucgccucuguguacgccuggaaccggaagcggaucagcaauugcguggccgacuacuccgugcuguacaacuccgccagcuucagcaccuucaagugcuacggcguguccccuaccaagcugaacgaccugugcuucacaaacguguacgccgacagcuucgugauccggggagaugaagugcggcagauugccccuggacagacaggcaagaucgccgacuacaacuacaagcugcccgacgacuucaccggcugugugauugccuggaacagcaacaaccuggacuccaaagucggcggcaacuacaauuaccuguuccggcuguuccggaaguccaaucugaagcccuucgagcgggacaucuccaccgagaucuaucaggccggcaacaccccuuguaacggcguggaaggcuucaacugcuacuucccacugcaguccuacggcuuucagcccacaaauggcgugggcuaucagcccuacagagugguggugcugagcuucgaacugcugcaugccccugccacagugugcggcccuaagaaaagcaccaaucucgugaagaacaaaugcgugaacuucaacuucaacggccugaccggcaccggcgugcugacagagagcaacaagaaguuccugccauuccagcaguuuggccgggauaucgccgauaccacagacgccguuagagauccccagacacuggaaauccuggacaucaccccuugcagcuucggcggagugucugugaucaccccuggcaccaacaccagcaaucagguggcagugcuguaccagggcgugaacuguaccgaagugcccguggccauucacgccgaucagcugacaccuacauggcggguguacuccaccggcagcaauguguuucagaccagagccggcugucugaucggagccgagcacgugaacaauagcuacgagugcgacauccccaucggcgcuggaaucugcgccagcuaccagacacagacaaacagcccucggagagccagaagcguggccagccagagcgugauugccuacacaaugucucugggcgccgagaacagcguggccuacuccaacaacucuaucgcuauccccaccaacuucaccaucagcgugaccacagagauccugccuguguccaugaccaagaccagcguggacugcaccauguacaucugcggcgauuccaccgagugcuccaaccugcugcugcaguacggcagcuucugcacccagcugaauagagcccugacagggaucgccguggaacaggacaagaacacccaagagguguucgcccaagugaagcagaucuacaagaccccuccuaucaaggacuucggcggcuucaauuucagccagauucugcccgauccuagcaagcccagcaagcggagcuucaucgaggaccugcuguucaacaaagugacacuggccgacgccggcuucaucaagcaguauggcgauugucugggcgacauugccgccagggaucugauuugcgcccagaaguuuaacggacugacagugcugccuccucugcugaccgaugagaugaucgcccaguacacaucugcccugcuggccggcacaaucacaagcggcuggacauuuggagcaggcgccgcucugcagauccccuuugcuaugcagauggccuaccgguucaacggcaucggagugacccagaaugugcuguacgagaaccagaagcugaucgccaaccaguucaacagcgccaucggcaagauccaggacagccugagcagcacagcaagcgcccugggaaagcugcaggacguggucaaccagaaugcccaggcacugaacacccuggucaagcagcuguccuccaacuucggcgccaucagcucugugcugaacgauauccugagcagacuggacccuccugaggccgaggugcagaucgacagacugaucacaggcagacugcagagccuccagacauacgugacccagcagcugaucagagccgccgagauuagagccucugccaaucuggccgccaccaagaugucugagugugugcugggccagagcaagagaguggacuuuugcggcaagggcuaccaccugaugagcuucccucagucugccccucacggcgugguguuucugcacgugacauaugugcccgcucaagagaagaauuucaccaccgcuccagccaucugccacgacggcaaagcccacuuuccuagagaaggcguguucguguccaacggcacccauugguucgugacacagcggaacuucuacgagccccagaucaucaccaccgacaacaccuucgugucuggcaacugcgacgucgugaucggcauugugaacaauaccguguacgacccucugcagcccgagcuggacagcuucaaagaggaacuggacaaguacuuuaagaaccacacaagccccgacguggaccugggcgauaucagcggaaucaaugccagcgucgugaacauccagaaagagaucgaccggcugaacgagguggccaagaaucugaacgagagccugaucgaccugcaagaacuggggaaguacgagcaguacaucaaguggcccugguacaucuggcugggcuuuaucgccggacugauugccaucgugauggucacaaucaugcuguguugcaugaccagcugcuguagcugccugaagggcuguuguagcuguggcagcugcugcaaguucgacgaggacgauucugagcccgugcugaagggcgugaaacugcacuacacaugaugacucgagcugguacugcaugcacgcaaugcuagcugccccuuucccguccuggguaccccgagucucccccgaccucgggucccagguaugcucccaccuccaccugccccacucaccaccucugcuaguuccagacaccucccaagcacgcagcaaugcagcucaaaacgcuuagccuagccacacccccacgggaaacagcagugauuaaccuuuagcaauaaacgaaaguuuaacuaagcuauacuaaccccaggguuggucaauuucgugccagccacacccuggagcuagcaaaaaaaaaaaaaaaaaaaaaaaaaaaaaagcauaugacuaaaaaaaaaaaaaaaaaaaaaaaaaaaaaaaaaaaaaaaaaaaaaaaaaaaaaaaaaaaaaaaaaaaaaa

SEQ ID NO: 26918 - RNA, 4277 nt, Artificial Sequence
  SARS-CoV-2/Wuhan/WIV05/2019__EPI_ISL_402128 spike protein mRNA gc mod (1-1273)(K986P_V987P_H69del_V70del_Y453F_D614G_I692V_M1229I)
agaauaaacuaguauucuucugguccccacagacucagagagaacccgccaccauguucguguuccuggugcugcugccucugguguccagccagugugugaaccugaccaccagaacacagcugccuccagccuacaccaacagcuuuaccagaggcguguacuaccccgacaagguguucagauccagcgugcugcacucuacccaggaccuguuccugccuuucuucagcaacgugaccugguuccacgccaucuccggcaccaauggcaccaagagauucgacaaccccgugcugcccuucaacgacgggguguacuuugccagcaccgagaaguccaacaucaucagaggcuggaucuucggcaccacacuggacagcaagacccagagccugcugaucgugaacaacgccaccaacguggucaucaaagugugcgaguuccaguucugcaacgaccccuuccugggcgucuacuaccacaagaacaacaagagcuggauggaaagcgaguuccggguguacagcagcgccaacaacugcaccuucgaguacgugucccagccuuuccugauggaccuggaaggcaagcagggcaacuucaagaaccugcgcgaguucguguuuaagaacaucgacggcuacuucaagaucuacagcaagcacaccccuaucaaccucgugcgggaucugccucagggcuucucugcucuggaaccccugguggaucugcccaucggcaucaacaucacccgguuucagacacugcuggcccugcacagaagcuaccugacaccuggcgauagcagcagcggauggacagcuggugccgccgcuuacuaugugggcuaccugcagccuagaaccuuccugcugaaguacaacgagaacggcaccaucaccgacgccguggauugugcucuggauccucugagcgagacaaagugcacccugaaguccuucaccguggaaaagggcaucuaccagaccagcaacuuccgggugcagcccaccgaauccaucgugcgguuccccaauaucaccaaucugugccccuucggcgagguguucaaugccaccagauucgccucuguguacgccuggaaccggaagcggaucagcaauugcguggccgacuacuccgugcuguacaacuccgccagcuucagcaccuucaagugcuacggcguguccccuaccaagcugaacgaccugugcuucacaaacguguacgccgacagcuucgugauccggggagaugaagugcggcagauugccccuggacagacaggcaagaucgccgacuacaacuacaagcugcccgacgacuucaccggcugugugauugccuggaacagcaacaaccuggacuccaaagucggcggcaacuacaauuaccuguuccggcuguuccggaaguccaaucugaagcccuucgagcgggacaucuccaccgagaucuaucaggccggcagcaccccuuguaacggcguggaaggcuucaacugcuacuucccacugcaguccuacggcuuucagcccacaaauggcgugggcuaucagcccuacagagugguggugcugagcuucgaacugcugcaugccccugccacagugugcggcccuaagaaaagcaccaaucucgugaagaacaaaugcgugaacuucaacuucaacggccugaccggcaccggcgugcugacagagagcaacaagaaguuccugccauuccagcaguuuggccgggauaucgccgauaccacagacgccguuagagauccccagacacuggaaauccuggacaucaccccuugcagcuucggcggagugucugugaucaccccuggcaccaacaccagcaaucagguggcagugcuguaccagggcgugaacuguaccgaagugcccguggccauucacgccgaucagcugacaccuacauggcggguguacuccaccggcagcaauguguuucagaccagagccggcugucugaucggagccgagcacgugaacaauagcuacgagugcgacauccccaucggcgcuggaaucugcgccagcuaccagacacagacaaacagcccucggagagccagaagcguggccagccagagcgugauugccuacacaaugucucugggcgccgagaacagcguggccuacuccaacaacucuaucgcuauccccaccaacuucaccaucagcgugaccacagagauccugccuguguccaugaccaagaccagcguggacugcaccauguacaucugcggcgauuccaccgagugcuccaaccugcugcugcaguacggcagcuucugcacccagcugaauagagcccugacagggaucgccguggaacaggacaagaacacccaagagguguucgcccaagugaagcagaucuacaagaccccuccuaucaaggacuucggcggcuucaauuucagccagauucugcccgauccuagcaagcccagcaagcggagcuucaucgaggaccugcuguucaacaaagugacacuggccgacgccggcuucaucaagcaguauggcgauugucugggcgacauugccgccagggaucugauuugcgcccagaaguuuaacggacugacagugcugccuccucugcugaccgaugagaugaucgcccaguacacaucugcccugcuggccggcacaaucacaagcggcuggacauuuggagcaggcgccgcucugcagauccccuuugcuaugcagauggccuaccgguucaacggcaucggagugacccagaaugugcuguacgagaaccagaagcugaucgccaaccaguucaacagcgccaucggcaagauccaggacagccugagcagcacagcaagcgcccugggaaagcugcaggacguggucaaccagaaugcccaggcacugaacacccuggucaagcagcuguccuccaacuucggcgccaucagcucugugcugaacgauauccugagcagacuggacccuccugaggccgaggugcagaucgacagacugaucacaggcagacugcagagccuccagacauacgugacccagcagcugaucagagccgccgagauuagagccucugccaaucuggccgccaccaagaugucugagugugugcugggccagagcaagagaguggacuuuugcggcaagggcuaccaccugaugagcuucccucagucugccccucacggcgugguguuucugcacgugacauaugugcccgcucaagagaagaauuucaccaccgcuccagccaucugccacgacggcaaagcccacuuuccuagagaaggcguguucguguccaacggcacccauugguucgugacacagcggaacuucuacgagccccagaucaucaccaccgacaacaccuucgugucuggcaacugcgacgucgugaucggcauugugaacaauaccguguacgacccucugcagcccgagcuggacagcuucaaagaggaacuggacaaguacuuuaagaaccacacaagccccgacguggaccugggcgauaucagcggaaucaaugccagcgucgugaacauccagaaagagaucgaccggcugaacgagguggccaagaaucugaacgagagccugaucgaccugcaagaacuggggaaguacgagcaguacaucaaguggcccugguacaucuggcugggcuuuaucgccggacugauugccaucgugaucgucacaaucaugcuguguugcaugaccagcugcuguagcugccugaagggcuguuguagcuguggcagcugcugcaaguucgacgaggacgauucugagcccgugcugaagggcgugaaacugcacuacacaugaugacucgagcugguacugcaugcacgcaaugcuagcugccccuuucccguccuggguaccccgagucucccccgaccucgggucccagguaugcucccaccuccaccugccccacucaccaccucugcuaguuccagacaccucccaagcacgcagcaaugcagcucaaaacgcuuagccuagccacacccccacgggaaacagcagugauuaaccuuuagcaauaaacgaaaguuuaacuaagcuauacuaaccccaggguuggucaauuucgugccagccacacccuggagcuagcaaaaaaaaaaaaaaaaaaaaaaaaaaaaaagcauaugacuaaaaaaaaaaaaaaaaaaaaaaaaaaaaaaaaaaaaaaaaaaaaaaaaaaaaaaaaaaaaaaaaaaaaaa

SEQ ID NO: 26919 - RNA, 4274 nt, Artificial Sequence
  SARS-CoV-2/Wuhan/WIV05/2019__EPI_ISL_402128 spike protein mRNA gc mod (1-1273)(K986P_V987P_K986P_V987P_H69del_V70del_Y144del_N501Y_A570 D_D614G_P681H_T716I_S982A_D1118H)
agaauaaacuaguauucuucugguccccacagacucagagagaacccgccaccauguucguguuccuggugcugcugccucugguguccagccagugugugaaccugaccaccagaacacagcugccuccagccuacaccaacagcuuuaccagaggcguguacuaccccgacaagguguucagauccagcgugcugcacucuacccaggaccuguuccugccuuucuucagcaacgugaccugguuccacgccaucuccggcaccaauggcaccaagagauucgacaaccccgugcugcccuucaacgacgggguguacuuugccagcaccgagaaguccaacaucaucagaggcuggaucuucggcaccacacuggacagcaagacccagagccugcugaucgugaacaacgccaccaacguggucaucaaagugugcgaguuccaguucugcaacgaccccuuccugggcgucuaccacaagaacaacaagagcuggauggaaagcgaguuccggguguacagcagcgccaacaacugcaccuucgaguacgugucccagccuuuccugauggaccuggaaggcaagcagggcaacuucaagaaccugcgcgaguucguguuuaagaacaucgacggcuacuucaagaucuacagcaagcacaccccuaucaaccucgugcgggaucugccucagggcuucucugcucuggaaccccugguggaucugcccaucggcaucaacaucacccgguuucagacacugcuggcccugcacagaagcuaccugacaccuggcgauagcagcagcggauggacagcuggugccgccgcuuacuaugugggcuaccugcagccuagaaccuuccugcugaaguacaacgagaacggcaccaucaccgacgccguggauugugcucuggauccucugagcgagacaaagugcacccugaaguccuucaccguggaaaagggcaucuaccagaccagcaacuuccgggugcagcccaccgaauccaucgugcgguuccccaauaucaccaaucugugccccuucggcgagguguucaaugccaccagauucgccucuguguacgccuggaaccggaagcggaucagcaauugcguggccgacuacuccgugcuguacaacuccgccagcuucagcaccuucaagugcuacggcguguccccuaccaagcugaacgaccugugcuucacaaacguguacgccgacagcuucgugauccggggagaugaagugcggcagauugccccuggacagacaggcaagaucgccgacuacaacuacaagcugcccgacgacuucaccggcugugugauugccuggaacagcaacaaccuggacuccaaagucggcggcaacuacaauuaccuguaccggcuguuccggaaguccaaucugaagcccuucgagcgggacaucuccaccgagaucuaucaggccggcagcaccccuuguaacggcguggaaggcuucaacugcuacuucccacugcaguccuacggcuuucagcccacauacggcgugggcuaucagcccuacagagugguggugcugagcuucgaacugcugcaugccccugccacagugugcggcccuaagaaaagcaccaaucucgugaagaacaaaugcgugaacuucaacuucaacggccugaccggcaccggcgugcugacagagagcaacaagaaguuccugccauuccagcaguuuggccgggauaucgacgauaccacagacgccguuagagauccccagacacuggaaauccuggacaucaccccuugcagcuucggcggagugucugugaucaccccuggcaccaacaccagcaaucagguggcagugcuguaccagggcgugaacuguaccgaagugcccguggccauucacgccgaucagcugacaccuacauggcggguguacuccaccggcagcaauguguuucagaccagagccggcugucugaucggagccgagcacgugaacaauagcuacgagugcgacauccccaucggcgcuggaaucugcgccagcuaccagacacagacaaacagccaccggagagccagaagcguggccagccagagcaucauugccuacacaaugucucugggcgccgagaacagcguggccuacuccaacaacucuaucgcuauccccaucaacuucaccaucagcgugaccacagagauccugccuguguccaugaccaagaccagcguggacugcaccauguacaucugcggcgauuccaccgagugcuccaaccugcugcugcaguacggcagcuucugcacccagcugaauagagcccugacagggaucgccguggaacaggacaagaacacccaagagguguucgcccaagugaagcagaucuacaagaccccuccuaucaaggacuucggcggcuucaauuucagccagauucugcccgauccuagcaagcccagcaagcggagcuucaucgaggaccugcuguucaacaaagugacacuggccgacgccggcuucaucaagcaguauggcgauugucugggcgacauugccgccagggaucugauuugcgcccagaaguuuaacggacugacagugcugccuccucugcugaccgaugagaugaucgcccaguacacaucugcccugcuggccggcacaaucacaagcggcuggacauuuggagcaggcgccgcucugcagauccccuuugcuaugcagauggccuaccgguucaacggcaucggagugacccagaaugugcuguacgagaaccagaagcugaucgccaaccaguucaacagcgccaucggcaagauccaggacagccugagcagcacagcaagcgcccugggaaagcugcaggacguggucaaccagaaugcccaggcacugaacacccuggucaagcagcuguccuccaacuucggcgccaucagcucugugcugaacgauauccuggccagacuggacccuccugaggccgaggugcagaucgacagacugaucacaggcagacugcagagccuccagacauacgugacccagcagcugaucagagccgccgagauuagagccucugccaaucuggccgccaccaagaugucugagugugugcugggccagagcaagagaguggacuuuugcggcaagggcuaccaccugaugagcuucccucagucugccccucacggcgugguguuucugcacgugacauaugugcccgcucaagagaagaauuucaccaccgcuccagccaucugccacgacggcaaagcccacuuuccuagagaaggcguguucguguccaacggcacccauugguucgugacacagcggaacuucuacgagccccagaucaucaccacccacaacaccuucgugucuggcaacugcgacgucgugaucggcauugugaacaauaccguguacgacccucugcagcccgagcuggacagcuucaaagaggaacuggacaaguacuuuaagaaccacacaagccccgacguggaccugggcgauaucagcggaaucaaugccagcgucgugaacauccagaaagagaucgaccggcugaacgagguggccaagaaucugaacgagagccugaucgaccugcaagaacuggggaaguacgagcaguacaucaaguggcccugguacaucuggcugggcuuuaucgccggacugauugccaucgugauggucacaaucaugcuguguugcaugaccagcugcuguagcugccugaagggcuguuguagcuguggcagcugcugcaaguucgacgaggacgauucugagcccgugcugaagggcgugaaacugcacuacacaugaugacucgagcugguacugcaugcacgcaaugcuagcugccccuuucccguccuggguaccccgagucucccccgaccucgggucccagguaugcucccaccuccaccugccccacucaccaccucugcuaguuccagacaccucccaagcacgcagcaaugcagcucaaaacgcuuagccuagccacacccccacgggaaacagcagugauuaaccuuuagcaauaaacgaaaguuuaacuaagcuauacuaaccccaggguuggucaauuucgugccagccacacccuggagcuagcaaaaaaaaaaaaaaaaaaaaaaaaaaaaaagcauaugacuaaaaaaaaaaaaaaaaaaaaaaaaaaaaaaaaaaaaaaaaaaaaaaaaaaaaaaaaaaaaaaaaaaaaaa

SEQ ID NO: 26920 - RNA, 4283 nt, Artificial Sequence
  SARS-CoV-2/Wuhan/WIV05/2019__EPI_ISL_402128 spike protein mRNA gc mod (1-1273)(K986P_V987P_K986P_V987P_K417N_E484K_N501Y_D614G)
agaauaaacuaguauucuucugguccccacagacucagagagaacccgccaccauguucguguuccuggugcugcugccucugguguccagccagugugugaaccugaccaccagaacacagcugccuccagccuacaccaacagcuuuaccagaggcguguacuaccccgacaagguguucagauccagcgugcugcacucuacccaggaccuguuccugccuuucuucagcaacgugaccugguuccacgccauccacguguccggcaccaauggcaccaagagauucgacaaccccgugcugcccuucaacgacgggguguacuuugccagcaccgagaaguccaacaucaucagaggcuggaucuucggcaccacacuggacagcaagacccagagccugcugaucgugaacaacgccaccaacguggucaucaaagugugcgaguuccaguucugcaacgaccccuuccugggcgucuacuaccacaagaacaacaagagcuggauggaaagcgaguuccggguguacagcagcgccaacaacugcaccuucgaguacgugucccagccuuuccugauggaccuggaaggcaagcagggcaacuucaagaaccugcgcgaguucguguuuaagaacaucgacggcuacuucaagaucuacagcaagcacaccccuaucaaccucgugcgggaucugccucagggcuucucugcucuggaaccccugguggaucugcccaucggcaucaacaucacccgguuucagacacugcuggcccugcacagaagcuaccugacaccuggcgauagcagcagcggauggacagcuggugccgccgcuuacuaugugggcuaccugcagccuagaaccuuccugcugaaguacaacgagaacggcaccaucaccgacgccguggauugugcucuggauccucugagcgagacaaagugcacccugaaguccuucaccguggaaaagggcaucuaccagaccagcaacuuccgggugcagcccaccgaauccaucgugcgguuccccaauaucaccaaucugugccccuucggcgagguguucaaugccaccagauucgccucuguguacgccuggaaccggaagcggaucagcaauugcguggccgacuacuccgugcuguacaacuccgccagcuucagcaccuucaagugcuacggcguguccccuaccaagcugaacgaccugugcuucacaaacguguacgccgacagcuucgugauccggggagaugaagugcggcagauugccccuggacagacaggcaacaucgccgacuacaacuacaagcugcccgacgacuucaccggcugugugauugccuggaacagcaacaaccuggacuccaaagucggcggcaacuacaauuaccuguaccggcuguuccggaaguccaaucugaagcccuucgagcgggacaucuccaccgagaucuaucaggccggcagcaccccuuguaacggcgugaagggcuucaacugcuacuucccacugcaguccuacggcuuucagcccacauacggcgugggcuaucagcccuacagagugguggugcugagcuucgaacugcugcaugccccugccacagugugcggcccuaagaaaagcaccaaucucgugaagaacaaaugcgugaacuucaacuucaacggccugaccggcaccggcgugcugacagagagcaacaagaaguuccugccauuccagcaguuuggccgggauaucgccgauaccacagacgccguuagagauccccagacacuggaaauccuggacaucaccccuugcagcuucggcggagugucugugaucaccccuggcaccaacaccagcaaucagguggcagugcuguaccagggcgugaacuguaccgaagugcccguggccauucacgccgaucagcugacaccuacauggcggguguacuccaccggcagcaauguguuucagaccagagccggcugucugaucggagccgagcacgugaacaauagcuacgagugcgacauccccaucggcgcuggaaucugcgccagcuaccagacacagacaaacagcccucggagagccagaagcguggccagccagagcaucauugccuacacaaugucucugggcgccgagaacagcguggccuacuccaacaacucuaucgcuauccccaccaacuucaccaucagcgugaccacagagauccugccuguguccaugaccaagaccagcguggacugcaccauguacaucugcggcgauuccaccgagugcuccaaccugcugcugcaguacggcagcuucugcacccagcugaauagagcccugacagggaucgccguggaacaggacaagaacacccaagagguguucgcccaagugaagcagaucuacaagaccccuccuaucaaggacuucggcggcuucaauuucagccagauucugcccgauccuagcaagcccagcaagcggagcuucaucgaggaccugcuguucaacaaagugacacuggccgacgccggcuucaucaagcaguauggcgauugucugggcgacauugccgccagggaucugauuugcgcccagaaguuuaacggacugacagugcugccuccucugcugaccgaugagaugaucgcccaguacacaucugcccugcuggccggcacaaucacaagcggcuggacauuuggagcaggcgccgcucugcagauccccuuugcuaugcagauggccuaccgguucaacggcaucggagugacccagaaugugcuguacgagaaccagaagcugaucgccaaccaguucaacagcgccaucggcaagauccaggacagccugagcagcacagcaagcgcccugggaaagcugcaggacguggucaaccagaaugcccaggcacugaacacccuggucaagcagcuguccuccaacuucggcgccaucagcucugugcugaacgauauccugagcagacuggacccuccugaggccgaggugcagaucgacagacugaucacaggcagacugcagagccuccagacauacgugacccagcagcugaucagagccgccgagauuagagccucugccaaucuggccgccaccaagaugucugagugugugcugggccagagcaagagaguggacuuuugcggcaagggcuaccaccugaugagcuucccucagucugccccucacggcgugguguuucugcacgugacauaugugcccgcucaagagaagaauuucaccaccgcuccagccaucugccacgacggcaaagcccacuuuccuagagaaggcguguucguguccaacggcacccauugguucgugacacagcggaacuucuacgagccccagaucaucaccaccgacaacaccuucgugucuggcaacugcgacgucgugaucggcauugugaacaauaccguguacgacccucugcagcccgagcuggacagcuucaaagaggaacuggacaaguacuuuaagaaccacacaagccccgacguggaccugggcgauaucagcggaaucaaugccagcgucgugaacauccagaaagagaucgaccggcugaacgagguggccaagaaucugaacgagagccugaucgaccugcaagaacuggggaaguacgagcaguacaucaaguggcccugguacaucuggcugggcuuuaucgccggacugauugccaucgugauggucacaaucaugcuguguugcaugaccagcugcuguagcugccugaagggcuguuguagcuguggcagcugcugcaaguucgacgaggacgauucugagcccgugcugaagggcgugaaacugcacuacacaugaugacucgagcugguacugcaugcacgcaaugcuagcugccccuuucccguccuggguaccccgagucucccccgaccucgggucccagguaugcucccaccuccaccugccccacucaccaccucugcuaguuccagacaccucccaagcacgcagcaaugcagcucaaaacgcuuagccuagccacacccccacgggaaacagcagugauuaaccuuuagcaauaaacgaaaguuuaacuaagcuauacuaaccccaggguuggucaauuucgugccagccacacccuggagcuagcaaaaaaaaaaaaaaaaaaaaaaaaaaaaaagcauaugacuaaaaaaaaaaaaaaaaaaaaaaaaaaaaaaaaaaaaaaaaaaaaaaaaaaaaaaaaaaaaaaaaaaaaaa

SEQ ID NO: 26921 - RNA, 4274 nt, Artificial Sequence
  SARS-CoV-2/Wuhan/WIV05/2019__EPI_ISL_402128 spike protein mRNA gc mod (1-1273)(K986P_V987P_K986P_V987P_L18F_D80A_D215G_L242del_A243del_ L244del_R246I_K417N_E484K_N501Y_D614G_A701V)
agaauaaacuaguauucuucugguccccacagacucagagagaacccgccaccauguucguguuccuggugcugcugccucugguguccagccagugugugaacuucaccaccagaacacagcugccuccagccuacaccaacagcuuuaccagaggcguguacuaccccgacaagguguucagauccagcgugcugcacucuacccaggaccuguuccugccuuucuucagcaacgugaccugguuccacgccauccacguguccggcaccaauggcaccaagagauucgccaaccccgugcugcccuucaacgacgggguguacuuugccagcaccgagaaguccaacaucaucagaggcuggaucuucggcaccacacuggacagcaagacccagagccugcugaucgugaacaacgccaccaacguggucaucaaagugugcgaguuccaguucugcaacgaccccuuccugggcgucuacuaccacaagaacaacaagagcuggauggaaagcgaguuccggguguacagcagcgccaacaacugcaccuucgaguacgugucccagccuuuccugauggaccuggaaggcaagcagggcaacuucaagaaccugcgcgaguucguguuuaagaacaucgacggcuacuucaagaucuacagcaagcacaccccuaucaaccucgugcggggccugccucagggcuucucugcucuggaaccccugguggaucugcccaucggcaucaacaucacccgguuucagacacugcacaucagcuaccugacaccuggcgauagcagcagcggauggacagcuggugccgccgcuuacuaugugggcuaccugcagccuagaaccuuccugcugaaguacaacgagaacggcaccaucaccgacgccguggauugugcucuggauccucugagcgagacaaagugcacccugaaguccuucaccguggaaaagggcaucuaccagaccagcaacuuccgggugcagcccaccgaauccaucgugcgguuccccaauaucaccaaucugugccccuucggcgagguguucaaugccaccagauucgccucuguguacgccuggaaccggaagcggaucagcaauugcguggccgacuacuccgugcuguacaacuccgccagcuucagcaccuucaagugcuacggcguguccccuaccaagcugaacgaccugugcuucacaaacguguacgccgacagcuucgugauccggggagaugaagugcggcagauugccccuggacagacaggcaacaucgccgacuacaacuacaagcugcccgacgacuucaccggcugugugauugccuggaacagcaacaaccuggacuccaaagucggcggcaacuacaauuaccuguaccggcuguuccggaaguccaaucugaagcccuucgagcgggacaucuccaccgagaucuaucaggccggcagcaccccuuguaacggcgugaagggcuucaacugcuacuucccacugcaguccuacggcuuucagcccacauacggcgugggcuaucagcccuacagagugguggugcugagcuucgaacugcugcaugccccugccacagugugcggcccuaagaaaagcaccaaucucgugaagaacaaaugcgugaacuucaacuucaacggccugaccggcaccggcgugcugacagagagcaacaagaaguuccugccauuccagcaguuuggccgggauaucgccgauaccacagacgccguuagagauccccagacacuggaaauccuggacaucaccccuugcagcuucggcggagugucugugaucaccccuggcaccaacaccagcaaucagguggcagugcuguaccagggcgugaacuguaccgaagugcccguggccauucacgccgaucagcugacaccuacauggcggguguacuccaccggcagcaauguguuucagaccagagccggcugucugaucggagccgagcacgugaacaauagcuacgagugcgacauccccaucggcgcuggaaucugcgccagcuaccagacacagacaaacagcccucggagagccagaagcguggccagccagagcaucauugccuacacaaugucucugggcguggagaacagcguggccuacuccaacaacucuaucgcuauccccaccaacuucaccaucagcgugaccacagagauccugccuguguccaugaccaagaccagcguggacugcaccauguacaucugcggcgauuccaccgagugcuccaaccugcugcugcaguacggcagcuucugcacccagcugaauagagcccugacagggaucgccguggaacaggacaagaacacccaagagguguucgcccaagugaagcagaucuacaagaccccuccuaucaaggacuucggcggcuucaauuucagccagauucugcccgauccuagcaagcccagcaagcggagcuucaucgaggaccugcuguucaacaaagugacacuggccgacgccggcuucaucaagcaguauggcgauugucugggcgacauugccgccagggaucugauuugcgcccagaaguuuaacggacugacagugcugccuccucugcugaccgaugagaugaucgcccaguacacaucugcccugcuggccggcacaaucacaagcggcuggacauuuggagcaggcgccgcucugcagauccccuuugcuaugcagauggccuaccgguucaacggcaucggagugacccagaaugugcuguacgagaaccagaagcugaucgccaaccaguucaacagcgccaucggcaagauccaggacagccugagcagcacagcaagcgcccugggaaagcugcaggacguggucaaccagaaugcccaggcacugaacacccuggucaagcagcuguccuccaacuucggcgccaucagcucugugcugaacgauauccugagcagacuggacccuccugaggccgaggugcagaucgacagacugaucacaggcagacugcagagccuccagacauacgugacccagcagcugaucagagccgccgagauuagagccucugccaaucuggccgccaccaagaugucugagugugugcugggccagagcaagagaguggacuuuugcggcaagggcuaccaccugaugagcuucccucagucugccccucacggcgugguguuucugcacgugacauaugugcccgcucaagagaagaauuucaccaccgcuccagccaucugccacgacggcaaagcccacuuuccuagagaaggcguguucguguccaacggcacccauugguucgugacacagcggaacuucuacgagccccagaucaucaccaccgacaacaccuucgugucuggcaacugcgacgucgugaucggcauugugaacaauaccguguacgacccucugcagcccgagcuggacagcuucaaagaggaacuggacaaguacuuuaagaaccacacaagccccgacguggaccugggcgauaucagcggaaucaaugccagcgucgugaacauccagaaagagaucgaccggcugaacgagguggccaagaaucugaacgagagccugaucgaccugcaagaacuggggaaguacgagcaguacaucaaguggcccugguacaucuggcugggcuuuaucgccggacugauugccaucgugauggucacaaucaugcuguguugcaugaccagcugcuguagcugccugaagggcuguuguagcuguggcagcugcugcaaguucgacgaggacgauucugagcccgugcugaagggcgugaaacugcacuacacaugaugacucgagcugguacugcaugcacgcaaugcuagcugccccuuucccguccuggguaccccgagucucccccgaccucgggucccagguaugcucccaccuccaccugccccacucaccaccucugcuaguuccagacaccucccaagcacgcagcaaugcagcucaaaacgcuuagccuagccacacccccacgggaaacagcagugauuaaccuuuagcaauaaacgaaaguuuaacuaagcuauacuaaccccaggguuggucaauuucgugccagccacacccuggagcuagcaaaaaaaaaaaaaaaaaaaaaaaaaaaaaagcauaugacuaaaaaaaaaaaaaaaaaaaaaaaaaaaaaaaaaaaaaaaaaaaaaaaaaaaaaaaaaaaaaaaaaaaaaa

SEQ ID NO: 26922 - RNA, 4283 nt, Artificial Sequence
  SARS-CoV-2/Wuhan/WIV05/2019__EPI_ISL_402128 spike protein mRNA gc mod (1-1273)(K986P_V987P_K986P_V987P_E484K_D614G)
agaauaaacuaguauucuucugguccccacagacucagagagaacccgccaccauguucguguuccuggugcugcugccucugguguccagccagugugugaaccugaccaccagaacacagcugccuccagccuacaccaacagcuuuaccagaggcguguacuaccccgacaagguguucagauccagcgugcugcacucuacccaggaccuguuccugccuuucuucagcaacgugaccugguuccacgccauccacguguccggcaccaauggcaccaagagauucgacaaccccgugcugcccuucaacgacgggguguacuuugccagcaccgagaaguccaacaucaucagaggcuggaucuucggcaccacacuggacagcaagacccagagccugcugaucgugaacaacgccaccaacguggucaucaaagugugcgaguuccaguucugcaacgaccccuuccugggcgucuacuaccacaagaacaacaagagcuggauggaaagcgaguuccggguguacagcagcgccaacaacugcaccuucgaguacgugucccagccuuuccugauggaccuggaaggcaagcagggcaacuucaagaaccugcgcgaguucguguuuaagaacaucgacggcuacuucaagaucuacagcaagcacaccccuaucaaccucgugcgggaucugccucagggcuucucugcucuggaaccccugguggaucugcccaucggcaucaacaucacccgguuucagacacugcuggcccugcacagaagcuaccugacaccuggcgauagcagcagcggauggacagcuggugccgccgcuuacuaugugggcuaccugcagccuagaaccuuccugcugaaguacaacgagaacggcaccaucaccgacgccguggauugugcucuggauccucugagcgagacaaagugcacccugaaguccuucaccguggaaaagggcaucuaccagaccagcaacuuccgggugcagcccaccgaauccaucgugcgguuccccaauaucaccaaucugugccccuucggcgagguguucaaugccaccagauucgccucuguguacgccuggaaccggaagcggaucagcaauugcguggccgacuacuccgugcuguacaacuccgccagcuucagcaccuucaagugcuacggcguguccccuaccaagcugaacgaccugugcuucacaaacguguacgccgacagcuucgugauccggggagaugaagugcggcagauugccccuggacagacaggcaagaucgccgacuacaacuacaagcugcccgacgacuucaccggcugugugauugccuggaacagcaacaaccuggacuccaaagucggcggcaacuacaauuaccuguaccggcuguuccggaaguccaaucugaagcccuucgagcgggacaucuccaccgagaucuaucaggccggcagcaccccuuguaacggcgugaagggcuucaacugcuacuucccacugcaguccuacggcuuucagcccacaaauggcgugggcuaucagcccuacagagugguggugcugagcuucgaacugcugcaugccccugccacagugugcggcccuaagaaaagcaccaaucucgugaagaacaaaugcgugaacuucaacuucaacggccugaccggcaccggcgugcugacagagagcaacaagaaguuccugccauuccagcaguuuggccgggauaucgccgauaccacagacgccguuagagauccccagacacuggaaauccuggacaucaccccuugcagcuucggcggagugucugugaucaccccuggcaccaacaccagcaaucagguggcagugcuguaccagggcgugaacuguaccgaagugcccguggccauucacgccgaucagcugacaccuacauggcggguguacuccaccggcagcaauguguuucagaccagagccggcugucugaucggagccgagcacgugaacaauagcuacgagugcgacauccccaucggcgcuggaaucugcgccagcuaccagacacagacaaacagcccucggagagccagaagcguggccagccagagcaucauugccuacacaaugucucugggcgccgagaacagcguggccuacuccaacaacucuaucgcuauccccaccaacuucaccaucagcgugaccacagagauccugccuguguccaugaccaagaccagcguggacugcaccauguacaucugcggcgauuccaccgagugcuccaaccugcugcugcaguacggcagcuucugcacccagcugaauagagcccugacagggaucgccguggaacaggacaagaacacccaagagguguucgcccaagugaagcagaucuacaagaccccuccuaucaaggacuucggcggcuucaauuucagccagauucugcccgauccuagcaagcccagcaagcggagcuucaucgaggaccugcuguucaacaaagugacacuggccgacgccggcuucaucaagcaguauggcgauugucugggcgacauugccgccagggaucugauuugcgcccagaaguuuaacggacugacagugcugccuccucugcugaccgaugagaugaucgcccaguacacaucugcccugcuggccggcacaaucacaagcggcuggacauuuggagcaggcgccgcucugcagauccccuuugcuaugcagauggccuaccgguucaacggcaucggagugacccagaaugugcuguacgagaaccagaagcugaucgccaaccaguucaacagcgccaucggcaagauccaggacagccugagcagcacagcaagcgcccugggaaagcugcaggacguggucaaccagaaugcccaggcacugaacacccuggucaagcagcuguccuccaacuucggcgccaucagcucugugcugaacgauauccugagcagacuggacccuccugaggccgaggugcagaucgacagacugaucacaggcagacugcagagccuccagacauacgugacccagcagcugaucagagccgccgagauuagagccucugccaaucuggccgccaccaagaugucugagugugugcugggccagagcaagagaguggacuuuugcggcaagggcuaccaccugaugagcuucccucagucugccccucacggcgugguguuucugcacgugacauaugugcccgcucaagagaagaauuucaccaccgcuccagccaucugccacgacggcaaagcccacuuuccuagagaaggcguguucguguccaacggcacccauugguucgugacacagcggaacuucuacgagccccagaucaucaccaccgacaacaccuucgugucuggcaacugcgacgucgugaucggcauugugaacaauaccguguacgacccucugcagcccgagcuggacagcuucaaagaggaacuggacaaguacuuuaagaaccacacaagccccgacguggaccugggcgauaucagcggaaucaaugccagcgucgugaacauccagaaagagaucgaccggcugaacgagguggccaagaaucugaacgagagccugaucgaccugcaagaacuggggaaguacgagcaguacaucaaguggcccugguacaucuggcugggcuuuaucgccggacugauugccaucgugauggucacaaucaugcuguguugcaugaccagcugcuguagcugccugaagggcuguuguagcuguggcagcugcugcaaguucgacgaggacgauucugagcccgugcugaagggcgugaaacugcacuacacaugaugacucgagcugguacugcaugcacgcaaugcuagcugccccuuucccguccuggguaccccgagucucccccgaccucgggucccagguaugcucccaccuccaccugccccacucaccaccucugcuaguuccagacaccucccaagcacgcagcaaugcagcucaaaacgcuuagccuagccacacccccacgggaaacagcagugauuaaccuuuagcaauaaacgaaaguuuaacuaagcuauacuaaccccaggguuggucaauuucgugccagccacacccuggagcuagcaaaaaaaaaaaaaaaaaaaaaaaaaaaaaagcauaugacuaaaaaaaaaaaaaaaaaaaaaaaaaaaaaaaaaaaaaaaaaaaaaaaaaaaaaaaaaaaaaaaaaaaaaa

SEQ ID NO: 26923 - RNA, 4283 nt, Artificial Sequence
  SARS-CoV-2/Wuhan/WIV05/2019__EPI_ISL_402128 spike protein mRNA gc mod (1-1273)(K986P_V987P_K986P_V987P_L18F_T20N_P26S_D138Y_R190S_K417T _E484K_N501Y_D614G_H655Y_T1027I)
agaauaaacuaguauucuucugguccccacagacucagagagaacccgccaccauguucguguuccuggugcugcugccucugguguccagccagugugugaacuucaccaacagaacacagcugccuagcgccuacaccaacagcuuuaccagaggcguguacuaccccgacaagguguucagauccagcgugcugcacucuacccaggaccuguuccugccuuucuucagcaacgugaccugguuccacgccauccacguguccggcaccaauggcaccaagagauucgacaaccccgugcugcccuucaacgacgggguguacuuugccagcaccgagaaguccaacaucaucagaggcuggaucuucggcaccacacuggacagcaagacccagagccugcugaucgugaacaacgccaccaacguggucaucaaagugugcgaguuccaguucugcaacuaccccuuccugggcgucuacuaccacaagaacaacaagagcuggauggaaagcgaguuccggguguacagcagcgccaacaacugcaccuucgaguacgugucccagccuuuccugauggaccuggaaggcaagcagggcaacuucaagaaccugagcgaguucguguuuaagaacaucgacggcuacuucaagaucuacagcaagcacaccccuaucaaccucgugcgggaucugccucagggcuucucugcucuggaaccccugguggaucugcccaucggcaucaacaucacccgguuucagacacugcuggcccugcacagaagcuaccugacaccuggcgauagcagcagcggauggacagcuggugccgccgcuuacuaugugggcuaccugcagccuagaaccuuccugcugaaguacaacgagaacggcaccaucaccgacgccguggauugugcucuggauccucugagcgagacaaagugcacccugaaguccuucaccguggaaaagggcaucuaccagaccagcaacuuccgggugcagcccaccgaauccaucgugcgguuccccaauaucaccaaucugugccccuucggcgagguguucaaugccaccagauucgccucuguguacgccuggaaccggaagcggaucagcaauugcguggccgacuacuccgugcuguacaacuccgccagcuucagcaccuucaagugcuacggcguguccccuaccaagcugaacgaccugugcuucacaaacguguacgccgacagcuucgugauccggggagaugaagugcggcagauugccccuggacagacaggcaccaucgccgacuacaacuacaagcugcccgacgacuucaccggcugugugauugccuggaacagcaacaaccuggacuccaaagucggcggcaacuacaauuaccuguaccggcuguuccggaaguccaaucugaagcccuucgagcgggacaucuccaccgagaucuaucaggccggcagcaccccuuguaacggcgugaagggcuucaacugcuacuucccacugcaguccuacggcuuucagcccacauacggcgugggcuaucagcccuacagagugguggugcugagcuucgaacugcugcaugccccugccacagugugcggcccuaagaaaagcaccaaucucgugaagaacaaaugcgugaacuucaacuucaacggccugaccggcaccggcgugcugacagagagcaacaagaaguuccugccauuccagcaguuuggccgggauaucgccgauaccacagacgccguuagagauccccagacacuggaaauccuggacaucaccccuugcagcuucggcggagugucugugaucaccccuggcaccaacaccagcaaucagguggcagugcuguaccagggcgugaacuguaccgaagugcccguggccauucacgccgaucagcugacaccuacauggcggguguacuccaccggcagcaauguguuucagaccagagccggcugucugaucggagccgaguacgugaacaauagcuacgagugcgacauccccaucggcgcuggaaucugcgccagcuaccagacacagacaaacagcccucggagagccagaagcguggccagccagagcaucauugccuacacaaugucucugggcgccgagaacagcguggccuacuccaacaacucuaucgcuauccccaccaacuucaccaucagcgugaccacagagauccugccuguguccaugaccaagaccagcguggacugcaccauguacaucugcggcgauuccaccgagugcuccaaccugcugcugcaguacggcagcuucugcacccagcugaauagagcccugacagggaucgccguggaacaggacaagaacacccaagagguguucgcccaagugaagcagaucuacaagaccccuccuaucaaggacuucggcggcuucaauuucagccagauucugcccgauccuagcaagcccagcaagcggagcuucaucgaggaccugcuguucaacaaagugacacuggccgacgccggcuucaucaagcaguauggcgauugucugggcgacauugccgccagggaucugauuugcgcccagaaguuuaacggacugacagugcugccuccucugcugaccgaugagaugaucgcccaguacacaucugcccugcuggccggcacaaucacaagcggcuggacauuuggagcaggcgccgcucugcagauccccuuugcuaugcagauggccuaccgguucaacggcaucggagugacccagaaugugcuguacgagaaccagaagcugaucgccaaccaguucaacagcgccaucggcaagauccaggacagccugagcagcacagcaagcgcccugggaaagcugcaggacguggucaaccagaaugcccaggcacugaacacccuggucaagcagcuguccuccaacuucggcgccaucagcucugugcugaacgauauccugagcagacuggacccuccugaggccgaggugcagaucgacagacugaucacaggcagacugcagagccuccagacauacgugacccagcagcugaucagagccgccgagauuagagccucugccaaucuggccgccaucaagaugucugagugugugcugggccagagcaagagaguggacuuuugcggcaagggcuaccaccugaugagcuucccucagucugccccucacggcgugguguuucugcacgugacauaugugcccgcucaagagaagaauuucaccaccgcuccagccaucugccacgacggcaaagcccacuuuccuagagaaggcguguucguguccaacggcacccauugguucgugacacagcggaacuucuacgagccccagaucaucaccaccgacaacaccuucgugucuggcaacugcgacgucgugaucggcauugugaacaauaccguguacgacccucugcagcccgagcuggacagcuucaaagaggaacuggacaaguacuuuaagaaccacacaagccccgacguggaccugggcgauaucagcggaaucaaugccagcgucgugaacauccagaaagagaucgaccggcugaacgagguggccaagaaucugaacgagagccugaucgaccugcaagaacuggggaaguacgagcaguacaucaaguggcccugguacaucuggcugggcuuuaucgccggacugauugccaucgugauggucacaaucaugcuguguugcaugaccagcugcuguagcugccugaagggcuguuguagcuguggcagcugcugcaaguucgacgaggacgauucugagcccgugcugaagggcgugaaacugcacuacacaugaugacucgagcugguacugcaugcacgcaaugcuagcugccccuuucccguccuggguaccccgagucucccccgaccucgggucccagguaugcucccaccuccaccugccccacucaccaccucugcuaguuccagacaccucccaagcacgcagcaaugcagcucaaaacgcuuagccuagccacacccccacgggaaacagcagugauuaaccuuuagcaauaaacgaaaguuuaacuaagcuauacuaaccccaggguuggucaauuucgugccagccacacccuggagcuagcaaaaaaaaaaaaaaaaaaaaaaaaaaaaaagcauaugacuaaaaaaaaaaaaaaaaaaaaaaaaaaaaaaaaaaaaaaaaaaaaaaaaaaaaaaaaaaaaaaaaaaaaaa

SEQ ID NO: 26924 - RNA, 4283 nt, Artificial Sequence
  SARS-CoV-2/Wuhan/WIV05/2019__EPI_ISL_402128 spike protein mRNA gc mod (1-1273)(K986P_V987P_K986P_V987P_S13I_W152C_L452R_D614G)
agaauaaacuaguauucuucugguccccacagacucagagagaacccgccaccauguucguguuccuggugcugcugccucugguguccauccagugugugaaccugaccaccagaacacagcugccuccagccuacaccaacagcuuuaccagaggcguguacuaccccgacaagguguucagauccagcgugcugcacucuacccaggaccuguuccugccuuucuucagcaacgugaccugguuccacgccauccacguguccggcaccaauggcaccaagagauucgacaaccccgugcugcccuucaacgacgggguguacuuugccagcaccgagaaguccaacaucaucagaggcuggaucuucggcaccacacuggacagcaagacccagagccugcugaucgugaacaacgccaccaacguggucaucaaagugugcgaguuccaguucugcaacgaccccuuccugggcgucuacuaccacaagaacaacaagagcugcauggaaagcgaguuccggguguacagcagcgccaacaacugcaccuucgaguacgugucccagccuuuccugauggaccuggaaggcaagcagggcaacuucaagaaccugcgcgaguucguguuuaagaacaucgacggcuacuucaagaucuacagcaagcacaccccuaucaaccucgugcgggaucugccucagggcuucucugcucuggaaccccugguggaucugcccaucggcaucaacaucacccgguuucagacacugcuggcccugcacagaagcuaccugacaccuggcgauagcagcagcggauggacagcuggugccgccgcuuacuaugugggcuaccugcagccuagaaccuuccugcugaaguacaacgagaacggcaccaucaccgacgccguggauugugcucuggauccucugagcgagacaaagugcacccugaaguccuucaccguggaaaagggcaucuaccagaccagcaacuuccgggugcagcccaccgaauccaucgugcgguuccccaauaucaccaaucugugccccuucggcgagguguucaaugccaccagauucgccucuguguacgccuggaaccggaagcggaucagcaauugcguggccgacuacuccgugcuguacaacuccgccagcuucagcaccuucaagugcuacggcguguccccuaccaagcugaacgaccugugcuucacaaacguguacgccgacagcuucgugauccggggagaugaagugcggcagauugccccuggacagacaggcaagaucgccgacuacaacuacaagcugcccgacgacuucaccggcugugugauugccuggaacagcaacaaccuggacuccaaagucggcggcaacuacaauuaccgcuaccggcuguuccggaaguccaaucugaagcccuucgagcgggacaucuccaccgagaucuaucaggccggcagcaccccuuguaacggcguggaaggcuucaacugcuacuucccacugcaguccuacggcuuucagcccacaaauggcgugggcuaucagcccuacagagugguggugcugagcuucgaacugcugcaugccccugccacagugugcggcccuaagaaaagcaccaaucucgugaagaacaaaugcgugaacuucaacuucaacggccugaccggcaccggcgugcugacagagagcaacaagaaguuccugccauuccagcaguuuggccgggauaucgccgauaccacagacgccguuagagauccccagacacuggaaauccuggacaucaccccuugcagcuucggcggagugucugugaucaccccuggcaccaacaccagcaaucagguggcagugcuguaccagggcgugaacuguaccgaagugcccguggccauucacgccgaucagcugacaccuacauggcggguguacuccaccggcagcaauguguuucagaccagagccggcugucugaucggagccgagcacgugaacaauagcuacgagugcgacauccccaucggcgcuggaaucugcgccagcuaccagacacagacaaacagcccucggagagccagaagcguggccagccagagcaucauugccuacacaaugucucugggcgccgagaacagcguggccuacuccaacaacucuaucgcuauccccaccaacuucaccaucagcgugaccacagagauccugccuguguccaugaccaagaccagcguggacugcaccauguacaucugcggcgauuccaccgagugcuccaaccugcugcugcaguacggcagcuucugcacccagcugaauagagcccugacagggaucgccguggaacaggacaagaacacccaagagguguucgcccaagugaagcagaucuacaagaccccuccuaucaaggacuucggcggcuucaauuucagccagauucugcccgauccuagcaagcccagcaagcggagcuucaucgaggaccugcuguucaacaaagugacacuggccgacgccggcuucaucaagcaguauggcgauugucugggcgacauugccgccagggaucugauuugcgcccagaaguuuaacggacugacagugcugccuccucugcugaccgaugagaugaucgcccaguacacaucugcccugcuggccggcacaaucacaagcggcuggacauuuggagcaggcgccgcucugcagauccccuuugcuaugcagauggccuaccgguucaacggcaucggagugacccagaaugugcuguacgagaaccagaagcugaucgccaaccaguucaacagcgccaucggcaagauccaggacagccugagcagcacagcaagcgcccugggaaagcugcaggacguggucaaccagaaugcccaggcacugaacacccuggucaagcagcuguccuccaacuucggcgccaucagcucugugcugaacgauauccugagcagacuggacccuccugaggccgaggugcagaucgacagacugaucacaggcagacugcagagccuccagacauacgugacccagcagcugaucagagccgccgagauuagagccucugccaaucuggccgccaccaagaugucugagugugugcugggccagagcaagagaguggacuuuugcggcaagggcuaccaccugaugagcuucccucagucugccccucacggcgugguguuucugcacgugacauaugugcccgcucaagagaagaauuucaccaccgcuccagccaucugccacgacggcaaagcccacuuuccuagagaaggcguguucguguccaacggcacccauugguucgugacacagcggaacuucuacgagccccagaucaucaccaccgacaacaccuucgugucuggcaacugcgacgucgugaucggcauugugaacaauaccguguacgacccucugcagcccgagcuggacagcuucaaagaggaacuggacaaguacuuuaagaaccacacaagccccgacguggaccugggcgauaucagcggaaucaaugccagcgucgugaacauccagaaagagaucgaccggcugaacgagguggccaagaaucugaacgagagccugaucgaccugcaagaacuggggaaguacgagcaguacaucaaguggcccugguacaucuggcugggcuuuaucgccggacugauugccaucgugauggucacaaucaugcuguguugcaugaccagcugcuguagcugccugaagggcuguuguagcuguggcagcugcugcaaguucgacgaggacgauucugagcccgugcugaagggcgugaaacugcacuacacaugaugacucgagcugguacugcaugcacgcaaugcuagcugccccuuucccguccuggguaccccgagucucccccgaccucgggucccagguaugcucccaccuccaccugccccacucaccaccucugcuaguuccagacaccucccaagcacgcagcaaugcagcucaaaacgcuuagccuagccacacccccacgggaaacagcagugauuaaccuuuagcaauaaacgaaaguuuaacuaagcuauacuaaccccaggguuggucaauuucgugccagccacacccuggagcuagcaaaaaaaaaaaaaaaaaaaaaaaaaaaaaagcauaugacuaaaaaaaaaaaaaaaaaaaaaaaaaaaaaaaaaaaaaaaaaaaaaaaaaaaaaaaaaaaaaaaaaaaaaa

SEQ ID NO: 26925 - RNA, 4019 nt, Artificial Sequence
  SARS-CoV-2/Wuhan/WIV05/2019__EPI_ISL_402128 spike protein mRNA gc (1-1273)(K986P_V987P) R10300
aggagagucccgcagucggcguccagcggcucugcuuguucgugugugugucguugcaggccuuauucaagcuuaccauguucguguuccugguccuccugccccuggugagcucccagugcgugaaccucaccacccgcacgcagcugccgcccgccuacaccaacagcuucacccggggcgucuacuaccccgacaagguguuccgcuccagcgugcugcacuccacccaggaccucuuccugcccuucuucagcaacgucacgugguuccacgccauccacguguccgggaccaacggcaccaagcgguucgacaacccggugcugcccuucaacgacggggucuacuucgcgagcaccgagaaguccaacaucauccgcggcuggaucuucgggacgacccucgacagcaagacccagucccugcugaucgugaacaacgccaccaacguggucaucaaggugugcgaguuccaguucugcaacgaccccuuccucggcguguacuaccacaagaacaacaagagcuggauggaguccgaguuccgggucuacagcuccgccaacaacugcacguucgaguacgugagccagcccuuccugauggaccuggagggcaagcaggggaacuucaagaaccuccgcgaguucguguucaagaacaucgacggcuacuucaagaucuacuccaagcacaccccgaucaaccugguccgggaccugccccagggguucagcgcccucgagccccugguggaccugcccaucggcaucaacaucacccgcuuccagacccuccuggcccugcaccgguccuaccucacgccgggggacagcagcuccggcuggaccgcgggcgccgccgccuacuacgugggguaccugcagccccgcaccuuccugcucaaguacaacgagaacggcaccaucacggacgcggucgacugcgcccuggacccccugagcgagaccaagugcacccucaaguccuucaccguggagaaggggaucuaccagacgagcaacuuccgggugcagcccaccgaguccaucguccgcuucccgaacaucaccaaccugugccccuucggcgagguguucaacgccacccgguucgccagcgucuacgccuggaaccgcaagcggaucuccaacugcguggcggacuacagcgugcuguacaacuccgccagcuucuccacguucaagugcuacggcgucagccccaccaagcucaacgaccugugcuucaccaacguguacgccgacuccuucgugauccgcggggacgagguccggcagaucgcccccggccagaccgggaagaucgccgacuacaacuacaagcugccggacgacuucacgggcugcgugaucgcguggaacagcaacaaccucgacuccaaggucgggggcaacuacaacuaccuguaccgccuguuccgcaagagcaaccucaagcccuucgagcgggacaucuccaccgagaucuaccaggccggcagcacccccugcaacgggguggagggcuucaacugcuacuucccccugcaguccuacggguuccagccgaccaacggcgugggguaccagcccuaccggguggucgugcugagcuucgagcuccugcacgcccccgccacggugugcggccccaagaaguccaccaaccuggucaagaacaagugcgugaacuucaacuucaacggccucaccgggaccggcgugcugaccgagagcaacaagaaguuccugccguuccagcaguucgggcgcgacaucgccgacacgaccgacgcgguccgcgacccccagacccuggagauccucgacaucacccccugcagcuucggcgggguguccgugaucacgccgggcaccaacaccagcaaccaggucgccgugcuguaccaggacgugaacugcaccgagguccccguggccauccacgccgaccagcugacgcccaccuggcggguguacuccaccggcagcaacgucuuccagacccgcgccgggugccucaucggcgcggagcacgugaacaacuccuacgagugcgacauccccaucggggccggcaucugcgccagcuaccagacgcagaccaacuccccgcggcgcgcccggagcguggcgucccagagcaucaucgccuacaccaugucccugggcgccgagaacagcgucgccuacuccaacaacagcaucgccauccccaccaacuucacgaucuccgugaccaccgagauccugcccgugagcaugaccaagacgagcgucgacugcaccauguacaucugcggggacuccaccgagugcagcaaccuccugcugcaguacggcuccuucugcacccagcucaaccgcgcgcugacggggaucgccguggagcaggacaagaacacccaggagguguucgcccaggucaagcagaucuacaagacgcccccgaucaaggacuucggcggguucaacuucagccagauccugcccgaccccuccaagcccagcaagcgguccuucaucgaggaccuccuguucaacaaggugacccuggccgacgccggcuucaucaagcaguacggcgacugccucggggacaucgcggcccgcgaccugaucugcgcccagaaguucaacggccugaccgugcucccgccccugcugaccgacgagaugaucgcccaguacaccagcgcccuccuggcggggaccaucacguccggcuggaccuucggggccggcgccgcccugcagauccccuucgcgaugcagauggccuaccgguucaacggcaucggggucacccagaacgugcucuacgagaaccagaagcugaucgccaaccaguucaacagcgccaucggcaagauccaggacucccugagcuccaccgccagcgcgcucgggaagcugcaggacguggucaaccagaacgcccaggcccugaacacgcucgugaagcagcuguccagcaacuucggcgccaucuccagcgugcugaacgacauccucucccgccuggacccgcccgaggccgaggugcagaucgaccggcugaucaccgggcgccuccagagccugcagaccuacgugacccagcagcugauccgggcggccgagauccgcgccagcgccaaccucgccgcgaccaagauguccgagugcguccugggccagagcaagcggguggacuucugcggcaagggguaccaccugauguccuucccccagagcgccccgcacggcguggucuuccuccacgugacguacguccccgcccaggagaagaacuucaccaccgcccccgcgaucugccacgacgggaaggcccacuucccccgcgagggcguguucguguccaacgggacccacugguucgucacgcagcggaacuucuacgagccgcagaucaucaccaccgacaacaccuucgugagcggcaacugcgacguggucaucggcaucgugaacaacacgguguacgacccccugcagcccgagcuggacuccuucaaggaggagcucgacaaguacuucaagaaccacaccagccccgacgucgaccugggggacaucuccggcaucaacgccagcguggugaacauccagaaggagaucgaccgccugaacgaggucgccaagaaccucaacgagucccugaucgaccugcaggagcucgggaaguacgagcaguacaucaaguggccgugguacaucuggcugggcuucaucgccggccugaucgcgaucgugauggugaccaucaugcucugcugcaugaccagcugcugcuccugccugaaggggugcugcagcugcggcuccugcugcaaguucgacgaggacgacagcgagcccguccugaagggggugaagcuccacuacacgugaggacuagucccuguucccagagcccacuuuuuuuucuuuuuuugaaauaaaauagccugucuuucagaucucaaaggcucuuuucagagccaccaaaaaaaaaaaaaaaaaaaaaaaaaa

SEQ ID NO: 26926 - RNA, 4054 nt, Artificial Sequence
  SARS-CoV-2/Wuhan/WIV05/2019__EPI_ISL_402128 spike protein mRNA gc (1-1273)(K986P_V987P) R10301
aggagagucccgcagucggcguccagcggcucugcuuguucgugugugugucguugcaggccuuauucaagcuuaccauguucguguuccugguccuccugccccuggugagcucccagugcgugaaccucaccacccgcacgcagcugccgcccgccuacaccaacagcuucacccggggcgucuacuaccccgacaagguguuccgcuccagcgugcugcacuccacccaggaccucuuccugcccuucuucagcaacgucacgugguuccacgccauccacguguccgggaccaacggcaccaagcgguucgacaacccggugcugcccuucaacgacggggucuacuucgcgagcaccgagaaguccaacaucauccgcggcuggaucuucgggacgacccucgacagcaagacccagucccugcugaucgugaacaacgccaccaacguggucaucaaggugugcgaguuccaguucugcaacgaccccuuccucggcguguacuaccacaagaacaacaagagcuggauggaguccgaguuccgggucuacagcuccgccaacaacugcacguucgaguacgugagccagcccuuccugauggaccuggagggcaagcaggggaacuucaagaaccuccgcgaguucguguucaagaacaucgacggcuacuucaagaucuacuccaagcacaccccgaucaaccugguccgggaccugccccagggguucagcgcccucgagccccugguggaccugcccaucggcaucaacaucacccgcuuccagacccuccuggcccugcaccgguccuaccucacgccgggggacagcagcuccggcuggaccgcgggcgccgccgccuacuacgugggguaccugcagccccgcaccuuccugcucaaguacaacgagaacggcaccaucacggacgcggucgacugcgcccuggacccccugagcgagaccaagugcacccucaaguccuucaccguggagaaggggaucuaccagacgagcaacuuccgggugcagcccaccgaguccaucguccgcuucccgaacaucaccaaccugugccccuucggcgagguguucaacgccacccgguucgccagcgucuacgccuggaaccgcaagcggaucuccaacugcguggcggacuacagcgugcuguacaacuccgccagcuucuccacguucaagugcuacggcgucagccccaccaagcucaacgaccugugcuucaccaacguguacgccgacuccuucgugauccgcggggacgagguccggcagaucgcccccggccagaccgggaagaucgccgacuacaacuacaagcugccggacgacuucacgggcugcgugaucgcguggaacagcaacaaccucgacuccaaggucgggggcaacuacaacuaccuguaccgccuguuccgcaagagcaaccucaagcccuucgagcgggacaucuccaccgagaucuaccaggccggcagcacccccugcaacgggguggagggcuucaacugcuacuucccccugcaguccuacggguuccagccgaccaacggcgugggguaccagcccuaccggguggucgugcugagcuucgagcuccugcacgcccccgccacggugugcggccccaagaaguccaccaaccuggucaagaacaagugcgugaacuucaacuucaacggccucaccgggaccggcgugcugaccgagagcaacaagaaguuccugccguuccagcaguucgggcgcgacaucgccgacacgaccgacgcgguccgcgacccccagacccuggagauccucgacaucacccccugcagcuucggcgggguguccgugaucacgccgggcaccaacaccagcaaccaggucgccgugcuguaccaggacgugaacugcaccgagguccccguggccauccacgccgaccagcugacgcccaccuggcggguguacuccaccggcagcaacgucuuccagacccgcgccgggugccucaucggcgcggagcacgugaacaacuccuacgagugcgacauccccaucggggccggcaucugcgccagcuaccagacgcagaccaacuccccgcggcgcgcccggagcguggcgucccagagcaucaucgccuacaccaugucccugggcgccgagaacagcgucgccuacuccaacaacagcaucgccauccccaccaacuucacgaucuccgugaccaccgagauccugcccgugagcaugaccaagacgagcgucgacugcaccauguacaucugcggggacuccaccgagugcagcaaccuccugcugcaguacggcuccuucugcacccagcucaaccgcgcgcugacggggaucgccguggagcaggacaagaacacccaggagguguucgcccaggucaagcagaucuacaagacgcccccgaucaaggacuucggcggguucaacuucagccagauccugcccgaccccuccaagcccagcaagcgguccuucaucgaggaccuccuguucaacaaggugacccuggccgacgccggcuucaucaagcaguacggcgacugccucggggacaucgcggcccgcgaccugaucugcgcccagaaguucaacggccugaccgugcucccgccccugcugaccgacgagaugaucgcccaguacaccagcgcccuccuggcggggaccaucacguccggcuggaccuucggggccggcgccgcccugcagauccccuucgcgaugcagauggccuaccgguucaacggcaucggggucacccagaacgugcucuacgagaaccagaagcugaucgccaaccaguucaacagcgccaucggcaagauccaggacucccugagcuccaccgccagcgcgcucgggaagcugcaggacguggucaaccagaacgcccaggcccugaacacgcucgugaagcagcuguccagcaacuucggcgccaucuccagcgugcugaacgacauccucucccgccuggacccgcccgaggccgaggugcagaucgaccggcugaucaccgggcgccuccagagccugcagaccuacgugacccagcagcugauccgggcggccgagauccgcgccagcgccaaccucgccgcgaccaagauguccgagugcguccugggccagagcaagcggguggacuucugcggcaagggguaccaccugauguccuucccccagagcgccccgcacggcguggucuuccuccacgugacguacguccccgcccaggagaagaacuucaccaccgcccccgcgaucugccacgacgggaaggcccacuucccccgcgagggcguguucguguccaacgggacccacugguucgucacgcagcggaacuucuacgagccgcagaucaucaccaccgacaacaccuucgugagcggcaacugcgacguggucaucggcaucgugaacaacacgguguacgacccccugcagcccgagcuggacuccuucaaggaggagcucgacaaguacuucaagaaccacaccagccccgacgucgaccugggggacaucuccggcaucaacgccagcguggugaacauccagaaggagaucgaccgccugaacgaggucgccaagaaccucaacgagucccugaucgaccugcaggagcucgggaaguacgagcaguacaucaaguggccgugguacaucuggcugggcuucaucgccggccugaucgcgaucgugauggugaccaucaugcucugcugcaugaccagcugcugcuccugccugaaggggugcugcagcugcggcuccugcugcaaguucgacgaggacgacagcgagcccguccugaagggggugaagcuccacuacacgugaggacuagucccuguucccagagcccacuuuuuuuucuuuuuuugaaauaaaauagccugucuuucagaucucaaaggcucuuuucagagccaccaaaaaaaaaaaaaaaaaaaaaaaaaaaaaaaaaaaaaaaaaaaaaaaaaaaaaaaaaaaaa

SEQ ID NO: 26927 - RNA, 4074 nt, Artificial Sequence
  SARS-CoV-2/Wuhan/WIV05/2019__EPI_ISL_402128 spike protein mRNA gc (1-1273)(K986P_V987P) R10302
aggagagucccgcagucggcguccagcggcucugcuuguucgugugugugucguugcaggccuuauucaagcuuaccauguucguguuccugguccuccugccccuggugagcucccagugcgugaaccucaccacccgcacgcagcugccgcccgccuacaccaacagcuucacccggggcgucuacuaccccgacaagguguuccgcuccagcgugcugcacuccacccaggaccucuuccugcccuucuucagcaacgucacgugguuccacgccauccacguguccgggaccaacggcaccaagcgguucgacaacccggugcugcccuucaacgacggggucuacuucgcgagcaccgagaaguccaacaucauccgcggcuggaucuucgggacgacccucgacagcaagacccagucccugcugaucgugaacaacgccaccaacguggucaucaaggugugcgaguuccaguucugcaacgaccccuuccucggcguguacuaccacaagaacaacaagagcuggauggaguccgaguuccgggucuacagcuccgccaacaacugcacguucgaguacgugagccagcccuuccugauggaccuggagggcaagcaggggaacuucaagaaccuccgcgaguucguguucaagaacaucgacggcuacuucaagaucuacuccaagcacaccccgaucaaccugguccgggaccugccccagggguucagcgcccucgagccccugguggaccugcccaucggcaucaacaucacccgcuuccagacccuccuggcccugcaccgguccuaccucacgccgggggacagcagcuccggcuggaccgcgggcgccgccgccuacuacgugggguaccugcagccccgcaccuuccugcucaaguacaacgagaacggcaccaucacggacgcggucgacugcgcccuggacccccugagcgagaccaagugcacccucaaguccuucaccguggagaaggggaucuaccagacgagcaacuuccgggugcagcccaccgaguccaucguccgcuucccgaacaucaccaaccugugccccuucggcgagguguucaacgccacccgguucgccagcgucuacgccuggaaccgcaagcggaucuccaacugcguggcggacuacagcgugcuguacaacuccgccagcuucuccacguucaagugcuacggcgucagccccaccaagcucaacgaccugugcuucaccaacguguacgccgacuccuucgugauccgcggggacgagguccggcagaucgcccccggccagaccgggaagaucgccgacuacaacuacaagcugccggacgacuucacgggcugcgugaucgcguggaacagcaacaaccucgacuccaaggucgggggcaacuacaacuaccuguaccgccuguuccgcaagagcaaccucaagcccuucgagcgggacaucuccaccgagaucuaccaggccggcagcacccccugcaacgggguggagggcuucaacugcuacuucccccugcaguccuacggguuccagccgaccaacggcgugggguaccagcccuaccggguggucgugcugagcuucgagcuccugcacgcccccgccacggugugcggccccaagaaguccaccaaccuggucaagaacaagugcgugaacuucaacuucaacggccucaccgggaccggcgugcugaccgagagcaacaagaaguuccugccguuccagcaguucgggcgcgacaucgccgacacgaccgacgcgguccgcgacccccagacccuggagauccucgacaucacccccugcagcuucggcgggguguccgugaucacgccgggcaccaacaccagcaaccaggucgccgugcuguaccaggacgugaacugcaccgagguccccguggccauccacgccgaccagcugacgcccaccuggcggguguacuccaccggcagcaacgucuuccagacccgcgccgggugccucaucggcgcggagcacgugaacaacuccuacgagugcgacauccccaucggggccggcaucugcgccagcuaccagacgcagaccaacuccccgcggcgcgcccggagcguggcgucccagagcaucaucgccuacaccaugucccugggcgccgagaacagcgucgccuacuccaacaacagcaucgccauccccaccaacuucacgaucuccgugaccaccgagauccugcccgugagcaugaccaagacgagcgucgacugcaccauguacaucugcggggacuccaccgagugcagcaaccuccugcugcaguacggcuccuucugcacccagcucaaccgcgcgcugacggggaucgccguggagcaggacaagaacacccaggagguguucgcccaggucaagcagaucuacaagacgcccccgaucaaggacuucggcggguucaacuucagccagauccugcccgaccccuccaagcccagcaagcgguccuucaucgaggaccuccuguucaacaaggugacccuggccgacgccggcuucaucaagcaguacggcgacugccucggggacaucgcggcccgcgaccugaucugcgcccagaaguucaacggccugaccgugcucccgccccugcugaccgacgagaugaucgcccaguacaccagcgcccuccuggcggggaccaucacguccggcuggaccuucggggccggcgccgcccugcagauccccuucgcgaugcagauggccuaccgguucaacggcaucggggucacccagaacgugcucuacgagaaccagaagcugaucgccaaccaguucaacagcgccaucggcaagauccaggacucccugagcuccaccgccagcgcgcucgggaagcugcaggacguggucaaccagaacgcccaggcccugaacacgcucgugaagcagcuguccagcaacuucggcgccaucuccagcgugcugaacgacauccucucccgccuggacccgcccgaggccgaggugcagaucgaccggcugaucaccgggcgccuccagagccugcagaccuacgugacccagcagcugauccgggcggccgagauccgcgccagcgccaaccucgccgcgaccaagauguccgagugcguccugggccagagcaagcggguggacuucugcggcaagggguaccaccugauguccuucccccagagcgccccgcacggcguggucuuccuccacgugacguacguccccgcccaggagaagaacuucaccaccgcccccgcgaucugccacgacgggaaggcccacuucccccgcgagggcguguucguguccaacgggacccacugguucgucacgcagcggaacuucuacgagccgcagaucaucaccaccgacaacaccuucgugagcggcaacugcgacguggucaucggcaucgugaacaacacgguguacgacccccugcagcccgagcuggacuccuucaaggaggagcucgacaaguacuucaagaaccacaccagccccgacgucgaccugggggacaucuccggcaucaacgccagcguggugaacauccagaaggagaucgaccgccugaacgaggucgccaagaaccucaacgagucccugaucgaccugcaggagcucgggaaguacgagcaguacaucaaguggccgugguacaucuggcugggcuucaucgccggccugaucgcgaucgugauggugaccaucaugcucugcugcaugaccagcugcugcuccugccugaaggggugcugcagcugcggcuccugcugcaaguucgacgaggacgacagcgagcccguccugaagggggugaagcuccacuacacgugaggacuagucccuguucccagagcccacuuuuuuuucuuuuuuugaaauaaaauagccugucuuucagaucucaaaggcucuuuucagagccaccaaaaaaaaaaaaaaaaaaaaaaaaaaaaaaaaaaaaaaaaaaaaaaaaaaaaaaaaaaaaaaaaaaaaaaaaaaaaaaaaa

SEQ ID NO: 26928 - RNA, 4084 nt, Artificial Sequence
  SARS-CoV-2/Wuhan/WIV05/2019__EPI_ISL_402128 spike protein mRNA gc (1-1273)(K986P_V987P) R10303
aggagagucccgcagucggcguccagcggcucugcuuguucgugugugugucguugcaggccuuauucaagcuuaccauguucguguuccugguccuccugccccuggugagcucccagugcgugaaccucaccacccgcacgcagcugccgcccgccuacaccaacagcuucacccggggcgucuacuaccccgacaagguguuccgcuccagcgugcugcacuccacccaggaccucuuccugcccuucuucagcaacgucacgugguuccacgccauccacguguccgggaccaacggcaccaagcgguucgacaacccggugcugcccuucaacgacggggucuacuucgcgagcaccgagaaguccaacaucauccgcggcuggaucuucgggacgacccucgacagcaagacccagucccugcugaucgugaacaacgccaccaacguggucaucaaggugugcgaguuccaguucugcaacgaccccuuccucggcguguacuaccacaagaacaacaagagcuggauggaguccgaguuccgggucuacagcuccgccaacaacugcacguucgaguacgugagccagcccuuccugauggaccuggagggcaagcaggggaacuucaagaaccuccgcgaguucguguucaagaacaucgacggcuacuucaagaucuacuccaagcacaccccgaucaaccugguccgggaccugccccagggguucagcgcccucgagccccugguggaccugcccaucggcaucaacaucacccgcuuccagacccuccuggcccugcaccgguccuaccucacgccgggggacagcagcuccggcuggaccgcgggcgccgccgccuacuacgugggguaccugcagccccgcaccuuccugcucaaguacaacgagaacggcaccaucacggacgcggucgacugcgcccuggacccccugagcgagaccaagugcacccucaaguccuucaccguggagaaggggaucuaccagacgagcaacuuccgggugcagcccaccgaguccaucguccgcuucccgaacaucaccaaccugugccccuucggcgagguguucaacgccacccgguucgccagcgucuacgccuggaaccgcaagcggaucuccaacugcguggcggacuacagcgugcuguacaacuccgccagcuucuccacguucaagugcuacggcgucagccccaccaagcucaacgaccugugcuucaccaacguguacgccgacuccuucgugauccgcggggacgagguccggcagaucgcccccggccagaccgggaagaucgccgacuacaacuacaagcugccggacgacuucacgggcugcgugaucgcguggaacagcaacaaccucgacuccaaggucgggggcaacuacaacuaccuguaccgccuguuccgcaagagcaaccucaagcccuucgagcgggacaucuccaccgagaucuaccaggccggcagcacccccugcaacgggguggagggcuucaacugcuacuucccccugcaguccuacggguuccagccgaccaacggcgugggguaccagcccuaccggguggucgugcugagcuucgagcuccugcacgcccccgccacggugugcggccccaagaaguccaccaaccuggucaagaacaagugcgugaacuucaacuucaacggccucaccgggaccggcgugcugaccgagagcaacaagaaguuccugccguuccagcaguucgggcgcgacaucgccgacacgaccgacgcgguccgcgacccccagacccuggagauccucgacaucacccccugcagcuucggcgggguguccgugaucacgccgggcaccaacaccagcaaccaggucgccgugcuguaccaggacgugaacugcaccgagguccccguggccauccacgccgaccagcugacgcccaccuggcggguguacuccaccggcagcaacgucuuccagacccgcgccgggugccucaucggcgcggagcacgugaacaacuccuacgagugcgacauccccaucggggccggcaucugcgccagcuaccagacgcagaccaacuccccgcggcgcgcccggagcguggcgucccagagcaucaucgccuacaccaugucccugggcgccgagaacagcgucgccuacuccaacaacagcaucgccauccccaccaacuucacgaucuccgugaccaccgagauccugcccgugagcaugaccaagacgagcgucgacugcaccauguacaucugcggggacuccaccgagugcagcaaccuccugcugcaguacggcuccuucugcacccagcucaaccgcgcgcugacggggaucgccguggagcaggacaagaacacccaggagguguucgcccaggucaagcagaucuacaagacgcccccgaucaaggacuucggcggguucaacuucagccagauccugcccgaccccuccaagcccagcaagcgguccuucaucgaggaccuccuguucaacaaggugacccuggccgacgccggcuucaucaagcaguacggcgacugccucggggacaucgcggcccgcgaccugaucugcgcccagaaguucaacggccugaccgugcucccgccccugcugaccgacgagaugaucgcccaguacaccagcgcccuccuggcggggaccaucacguccggcuggaccuucggggccggcgccgcccugcagauccccuucgcgaugcagauggccuaccgguucaacggcaucggggucacccagaacgugcucuacgagaaccagaagcugaucgccaaccaguucaacagcgccaucggcaagauccaggacucccugagcuccaccgccagcgcgcucgggaagcugcaggacguggucaaccagaacgcccaggcccugaacacgcucgugaagcagcuguccagcaacuucggcgccaucuccagcgugcugaacgacauccucucccgccuggacccgcccgaggccgaggugcagaucgaccggcugaucaccgggcgccuccagagccugcagaccuacgugacccagcagcugauccgggcggccgagauccgcgccagcgccaaccucgccgcgaccaagauguccgagugcguccugggccagagcaagcggguggacuucugcggcaagggguaccaccugauguccuucccccagagcgccccgcacggcguggucuuccuccacgugacguacguccccgcccaggagaagaacuucaccaccgcccccgcgaucugccacgacgggaaggcccacuucccccgcgagggcguguucguguccaacgggacccacugguucgucacgcagcggaacuucuacgagccgcagaucaucaccaccgacaacaccuucgugagcggcaacugcgacguggucaucggcaucgugaacaacacgguguacgacccccugcagcccgagcuggacuccuucaaggaggagcucgacaaguacuucaagaaccacaccagccccgacgucgaccugggggacaucuccggcaucaacgccagcguggugaacauccagaaggagaucgaccgccugaacgaggucgccaagaaccucaacgagucccugaucgaccugcaggagcucgggaaguacgagcaguacaucaaguggccgugguacaucuggcugggcuucaucgccggccugaucgcgaucgugauggugaccaucaugcucugcugcaugaccagcugcugcuccugccugaaggggugcugcagcugcggcuccugcugcaaguucgacgaggacgacagcgagcccguccugaagggggugaagcuccacuacacgugaggacuagucccuguucccagagcccacuuuuuuuucuuuuuuugaaauaaaauagccugucuuucagaucucaaaggcucuuuucagagccaccaaaaaaaaaaaaaaaaaaaaaaaaaaaaaaaaaaaaaaaaaaaaaaaaaaaaaaaaaaaaaaaaaaaaaaaaaaaaaaaaaaaaaaaaaaa

SEQ ID NO: 26929 - RNA, 4104 nt, Artificial Sequence
  SARS-CoV-2/Wuhan/WIV05/2019__EPI_ISL_402128 spike protein mRNA gc (1-1273)(K986P_V987P) R10304
aggagagucccgcagucggcguccagcggcucugcuuguucgugugugugucguugcaggccuuauucaagcuuaccauguucguguuccugguccuccugccccuggugagcucccagugcgugaaccucaccacccgcacgcagcugccgcccgccuacaccaacagcuucacccggggcgucuacuaccccgacaagguguuccgcuccagcgugcugcacuccacccaggaccucuuccugcccuucuucagcaacgucacgugguuccacgccauccacguguccgggaccaacggcaccaagcgguucgacaacccggugcugcccuucaacgacggggucuacuucgcgagcaccgagaaguccaacaucauccgcggcuggaucuucgggacgacccucgacagcaagacccagucccugcugaucgugaacaacgccaccaacguggucaucaaggugugcgaguuccaguucugcaacgaccccuuccucggcguguacuaccacaagaacaacaagagcuggauggaguccgaguuccgggucuacagcuccgccaacaacugcacguucgaguacgugagccagcccuuccugauggaccuggagggcaagcaggggaacuucaagaaccuccgcgaguucguguucaagaacaucgacggcuacuucaagaucuacuccaagcacaccccgaucaaccugguccgggaccugccccagggguucagcgcccucgagccccugguggaccugcccaucggcaucaacaucacccgcuuccagacccuccuggcccugcaccgguccuaccucacgccgggggacagcagcuccggcuggaccgcgggcgccgccgccuacuacgugggguaccugcagccccgcaccuuccugcucaaguacaacgagaacggcaccaucacggacgcggucgacugcgcccuggacccccugagcgagaccaagugcacccucaaguccuucaccguggagaaggggaucuaccagacgagcaacuuccgggugcagcccaccgaguccaucguccgcuucccgaacaucaccaaccugugccccuucggcgagguguucaacgccacccgguucgccagcgucuacgccuggaaccgcaagcggaucuccaacugcguggcggacuacagcgugcuguacaacuccgccagcuucuccacguucaagugcuacggcgucagccccaccaagcucaacgaccugugcuucaccaacguguacgccgacuccuucgugauccgcggggacgagguccggcagaucgcccccggccagaccgggaagaucgccgacuacaacuacaagcugccggacgacuucacgggcugcgugaucgcguggaacagcaacaaccucgacuccaaggucgggggcaacuacaacuaccuguaccgccuguuccgcaagagcaaccucaagcccuucgagcgggacaucuccaccgagaucuaccaggccggcagcacccccugcaacgggguggagggcuucaacugcuacuucccccugcaguccuacggguuccagccgaccaacggcgugggguaccagcccuaccggguggucgugcugagcuucgagcuccugcacgcccccgccacggugugcggccccaagaaguccaccaaccuggucaagaacaagugcgugaacuucaacuucaacggccucaccgggaccggcgugcugaccgagagcaacaagaaguuccugccguuccagcaguucgggcgcgacaucgccgacacgaccgacgcgguccgcgacccccagacccuggagauccucgacaucacccccugcagcuucggcgggguguccgugaucacgccgggcaccaacaccagcaaccaggucgccgugcuguaccaggacgugaacugcaccgagguccccguggccauccacgccgaccagcugacgcccaccuggcggguguacuccaccggcagcaacgucuuccagacccgcgccgggugccucaucggcgcggagcacgugaacaacuccuacgagugcgacauccccaucggggccggcaucugcgccagcuaccagacgcagaccaacuccccgcggcgcgcccggagcguggcgucccagagcaucaucgccuacaccaugucccugggcgccgagaacagcgucgccuacuccaacaacagcaucgccauccccaccaacuucacgaucuccgugaccaccgagauccugcccgugagcaugaccaagacgagcgucgacugcaccauguacaucugcggggacuccaccgagugcagcaaccuccugcugcaguacggcuccuucugcacccagcucaaccgcgcgcugacggggaucgccguggagcaggacaagaacacccaggagguguucgcccaggucaagcagaucuacaagacgcccccgaucaaggacuucggcggguucaacuucagccagauccugcccgaccccuccaagcccagcaagcgguccuucaucgaggaccuccuguucaacaaggugacccuggccgacgccggcuucaucaagcaguacggcgacugccucggggacaucgcggcccgcgaccugaucugcgcccagaaguucaacggccugaccgugcucccgccccugcugaccgacgagaugaucgcccaguacaccagcgcccuccuggcggggaccaucacguccggcuggaccuucggggccggcgccgcccugcagauccccuucgcgaugcagauggccuaccgguucaacggcaucggggucacccagaacgugcucuacgagaaccagaagcugaucgccaaccaguucaacagcgccaucggcaagauccaggacucccugagcuccaccgccagcgcgcucgggaagcugcaggacguggucaaccagaacgcccaggcccugaacacgcucgugaagcagcuguccagcaacuucggcgccaucuccagcgugcugaacgacauccucucccgccuggacccgcccgaggccgaggugcagaucgaccggcugaucaccgggcgccuccagagccugcagaccuacgugacccagcagcugauccgggcggccgagauccgcgccagcgccaaccucgccgcgaccaagauguccgagugcguccugggccagagcaagcggguggacuucugcggcaagggguaccaccugauguccuucccccagagcgccccgcacggcguggucuuccuccacgugacguacguccccgcccaggagaagaacuucaccaccgcccccgcgaucugccacgacgggaaggcccacuucccccgcgagggcguguucguguccaacgggacccacugguucgucacgcagcggaacuucuacgagccgcagaucaucaccaccgacaacaccuucgugagcggcaacugcgacguggucaucggcaucgugaacaacacgguguacgacccccugcagcccgagcuggacuccuucaaggaggagcucgacaaguacuucaagaaccacaccagccccgacgucgaccugggggacaucuccggcaucaacgccagcguggugaacauccagaaggagaucgaccgccugaacgaggucgccaagaaccucaacgagucccugaucgaccugcaggagcucgggaaguacgagcaguacaucaaguggccgugguacaucuggcugggcuucaucgccggccugaucgcgaucgugauggugaccaucaugcucugcugcaugaccagcugcugcuccugccugaaggggugcugcagcugcggcuccugcugcaaguucgacgaggacgacagcgagcccguccugaagggggugaagcuccacuacacgugaggacuagucccuguucccagagcccacuuuuuuuucuuuuuuugaaauaaaauagccugucuuucagaucucaaaggcucuuuucagagccaccaaaaaaaaaaaaaaaaaaaaaaaaaaaaaaaaaaaaaaaaaaaaaaaaaaaaaaaaaaaaaaaaaaaaaaaaaaaaaaaaaaaaaaaaaaaaaaaaaaaaaaaaaaaaaaa

SEQ ID NO: 26930 - RNA, 4114 nt, Artificial Sequence
  SARS-CoV-2/Wuhan/WIV05/2019__EPI_ISL_402128 spike protein mRNA gc (1-1273)(K986P_V987P) R10305
aggagagucccgcagucggcguccagcggcucugcuuguucgugugugugucguugcaggccuuauucaagcuuaccauguucguguuccugguccuccugccccuggugagcucccagugcgugaaccucaccacccgcacgcagcugccgcccgccuacaccaacagcuucacccggggcgucuacuaccccgacaagguguuccgcuccagcgugcugcacuccacccaggaccucuuccugcccuucuucagcaacgucacgugguuccacgccauccacguguccgggaccaacggcaccaagcgguucgacaacccggugcugcccuucaacgacggggucuacuucgcgagcaccgagaaguccaacaucauccgcggcuggaucuucgggacgacccucgacagcaagacccagucccugcugaucgugaacaacgccaccaacguggucaucaaggugugcgaguuccaguucugcaacgaccccuuccucggcguguacuaccacaagaacaacaagagcuggauggaguccgaguuccgggucuacagcuccgccaacaacugcacguucgaguacgugagccagcccuuccugauggaccuggagggcaagcaggggaacuucaagaaccuccgcgaguucguguucaagaacaucgacggcuacuucaagaucuacuccaagcacaccccgaucaaccugguccgggaccugccccagggguucagcgcccucgagccccugguggaccugcccaucggcaucaacaucacccgcuuccagacccuccuggcccugcaccgguccuaccucacgccgggggacagcagcuccggcuggaccgcgggcgccgccgccuacuacgugggguaccugcagccccgcaccuuccugcucaaguacaacgagaacggcaccaucacggacgcggucgacugcgcccuggacccccugagcgagaccaagugcacccucaaguccuucaccguggagaaggggaucuaccagacgagcaacuuccgggugcagcccaccgaguccaucguccgcuucccgaacaucaccaaccugugccccuucggcgagguguucaacgccacccgguucgccagcgucuacgccuggaaccgcaagcggaucuccaacugcguggcggacuacagcgugcuguacaacuccgccagcuucuccacguucaagugcuacggcgucagccccaccaagcucaacgaccugugcuucaccaacguguacgccgacuccuucgugauccgcggggacgagguccggcagaucgcccccggccagaccgggaagaucgccgacuacaacuacaagcugccggacgacuucacgggcugcgugaucgcguggaacagcaacaaccucgacuccaaggucgggggcaacuacaacuaccuguaccgccuguuccgcaagagcaaccucaagcccuucgagcgggacaucuccaccgagaucuaccaggccggcagcacccccugcaacgggguggagggcuucaacugcuacuucccccugcaguccuacggguuccagccgaccaacggcgugggguaccagcccuaccggguggucgugcugagcuucgagcuccugcacgcccccgccacggugugcggccccaagaaguccaccaaccuggucaagaacaagugcgugaacuucaacuucaacggccucaccgggaccggcgugcugaccgagagcaacaagaaguuccugccguuccagcaguucgggcgcgacaucgccgacacgaccgacgcgguccgcgacccccagacccuggagauccucgacaucacccccugcagcuucggcgggguguccgugaucacgccgggcaccaacaccagcaaccaggucgccgugcuguaccaggacgugaacugcaccgagguccccguggccauccacgccgaccagcugacgcccaccuggcggguguacuccaccggcagcaacgucuuccagacccgcgccgggugccucaucggcgcggagcacgugaacaacuccuacgagugcgacauccccaucggggccggcaucugcgccagcuaccagacgcagaccaacuccccgcggcgcgcccggagcguggcgucccagagcaucaucgccuacaccaugucccugggcgccgagaacagcgucgccuacuccaacaacagcaucgccauccccaccaacuucacgaucuccgugaccaccgagauccugcccgugagcaugaccaagacgagcgucgacugcaccauguacaucugcggggacuccaccgagugcagcaaccuccugcugcaguacggcuccuucugcacccagcucaaccgcgcgcugacggggaucgccguggagcaggacaagaacacccaggagguguucgcccaggucaagcagaucuacaagacgcccccgaucaaggacuucggcggguucaacuucagccagauccugcccgaccccuccaagcccagcaagcgguccuucaucgaggaccuccuguucaacaaggugacccuggccgacgccggcuucaucaagcaguacggcgacugccucggggacaucgcggcccgcgaccugaucugcgcccagaaguucaacggccugaccgugcucccgccccugcugaccgacgagaugaucgcccaguacaccagcgcccuccuggcggggaccaucacguccggcuggaccuucggggccggcgccgcccugcagauccccuucgcgaugcagauggccuaccgguucaacggcaucggggucacccagaacgugcucuacgagaaccagaagcugaucgccaaccaguucaacagcgccaucggcaagauccaggacucccugagcuccaccgccagcgcgcucgggaagcugcaggacguggucaaccagaacgcccaggcccugaacacgcucgugaagcagcuguccagcaacuucggcgccaucuccagcgugcugaacgacauccucucccgccuggacccgcccgaggccgaggugcagaucgaccggcugaucaccgggcgccuccagagccugcagaccuacgugacccagcagcugauccgggcggccgagauccgcgccagcgccaaccucgccgcgaccaagauguccgagugcguccugggccagagcaagcggguggacuucugcggcaagggguaccaccugauguccuucccccagagcgccccgcacggcguggucuuccuccacgugacguacguccccgcccaggagaagaacuucaccaccgcccccgcgaucugccacgacgggaaggcccacuucccccgcgagggcguguucguguccaacgggacccacugguucgucacgcagcggaacuucuacgagccgcagaucaucaccaccgacaacaccuucgugagcggcaacugcgacguggucaucggcaucgugaacaacacgguguacgacccccugcagcccgagcuggacuccuucaaggaggagcucgacaaguacuucaagaaccacaccagccccgacgucgaccugggggacaucuccggcaucaacgccagcguggugaacauccagaaggagaucgaccgccugaacgaggucgccaagaaccucaacgagucccugaucgaccugcaggagcucgggaaguacgagcaguacaucaaguggccgugguacaucuggcugggcuucaucgccggccugaucgcgaucgugauggugaccaucaugcucugcugcaugaccagcugcugcuccugccugaaggggugcugcagcugcggcuccugcugcaaguucgacgaggacgacagcgagcccguccugaagggggugaagcuccacuacacgugaggacuagucccuguucccagagcccacuuuuuuuucuuuuuuugaaauaaaauagccugucuuucagaucucaaaggcucuuuucagagccaccaaaaaaaaaaaaaaaaaaaaaaaaaaaaaaaaaaaaaaaaaaaaaaaaaaaaaaaaaaaaaaaaaaaaaaaaaaaaaaaaaaaaaaaaaaaaaaaaaaaaaaaaaaaaaaaaaaaaaaaaa

SEQ ID NO: 26931 - RNA, 4134 nt, Artificial Sequence
  SARS-CoV-2/Wuhan/WIV05/2019__EPI_ISL_402128 spike protein mRNA gc (1-1273)(K986P_V987P) R10306
aggagagucccgcagucggcguccagcggcucugcuuguucgugugugugucguugcaggccuuauucaagcuuaccauguucguguuccugguccuccugccccuggugagcucccagugcgugaaccucaccacccgcacgcagcugccgcccgccuacaccaacagcuucacccggggcgucuacuaccccgacaagguguuccgcuccagcgugcugcacuccacccaggaccucuuccugcccuucuucagcaacgucacgugguuccacgccauccacguguccgggaccaacggcaccaagcgguucgacaacccggugcugcccuucaacgacggggucuacuucgcgagcaccgagaaguccaacaucauccgcggcuggaucuucgggacgacccucgacagcaagacccagucccugcugaucgugaacaacgccaccaacguggucaucaaggugugcgaguuccaguucugcaacgaccccuuccucggcguguacuaccacaagaacaacaagagcuggauggaguccgaguuccgggucuacagcuccgccaacaacugcacguucgaguacgugagccagcccuuccugauggaccuggagggcaagcaggggaacuucaagaaccuccgcgaguucguguucaagaacaucgacggcuacuucaagaucuacuccaagcacaccccgaucaaccugguccgggaccugccccagggguucagcgcccucgagccccugguggaccugcccaucggcaucaacaucacccgcuuccagacccuccuggcccugcaccgguccuaccucacgccgggggacagcagcuccggcuggaccgcgggcgccgccgccuacuacgugggguaccugcagccccgcaccuuccugcucaaguacaacgagaacggcaccaucacggacgcggucgacugcgcccuggacccccugagcgagaccaagugcacccucaaguccuucaccguggagaaggggaucuaccagacgagcaacuuccgggugcagcccaccgaguccaucguccgcuucccgaacaucaccaaccugugccccuucggcgagguguucaacgccacccgguucgccagcgucuacgccuggaaccgcaagcggaucuccaacugcguggcggacuacagcgugcuguacaacuccgccagcuucuccacguucaagugcuacggcgucagccccaccaagcucaacgaccugugcuucaccaacguguacgccgacuccuucgugauccgcggggacgagguccggcagaucgcccccggccagaccgggaagaucgccgacuacaacuacaagcugccggacgacuucacgggcugcgugaucgcguggaacagcaacaaccucgacuccaaggucgggggcaacuacaacuaccuguaccgccuguuccgcaagagcaaccucaagcccuucgagcgggacaucuccaccgagaucuaccaggccggcagcacccccugcaacgggguggagggcuucaacugcuacuucccccugcaguccuacggguuccagccgaccaacggcgugggguaccagcccuaccggguggucgugcugagcuucgagcuccugcacgcccccgccacggugugcggccccaagaaguccaccaaccuggucaagaacaagugcgugaacuucaacuucaacggccucaccgggaccggcgugcugaccgagagcaacaagaaguuccugccguuccagcaguucgggcgcgacaucgccgacacgaccgacgcgguccgcgacccccagacccuggagauccucgacaucacccccugcagcuucggcgggguguccgugaucacgccgggcaccaacaccagcaaccaggucgccgugcuguaccaggacgugaacugcaccgagguccccguggccauccacgccgaccagcugacgcccaccuggcggguguacuccaccggcagcaacgucuuccagacccgcgccgggugccucaucggcgcggagcacgugaacaacuccuacgagugcgacauccccaucggggccggcaucugcgccagcuaccagacgcagaccaacuccccgcggcgcgcccggagcguggcgucccagagcaucaucgccuacaccaugucccugggcgccgagaacagcgucgccuacuccaacaacagcaucgccauccccaccaacuucacgaucuccgugaccaccgagauccugcccgugagcaugaccaagacgagcgucgacugcaccauguacaucugcggggacuccaccgagugcagcaaccuccugcugcaguacggcuccuucugcacccagcucaaccgcgcgcugacggggaucgccguggagcaggacaagaacacccaggagguguucgcccaggucaagcagaucuacaagacgcccccgaucaaggacuucggcggguucaacuucagccagauccugcccgaccccuccaagcccagcaagcgguccuucaucgaggaccuccuguucaacaaggugacccuggccgacgccggcuucaucaagcaguacggcgacugccucggggacaucgcggcccgcgaccugaucugcgcccagaaguucaacggccugaccgugcucccgccccugcugaccgacgagaugaucgcccaguacaccagcgcccuccuggcggggaccaucacguccggcuggaccuucggggccggcgccgcccugcagauccccuucgcgaugcagauggccuaccgguucaacggcaucggggucacccagaacgugcucuacgagaaccagaagcugaucgccaaccaguucaacagcgccaucggcaagauccaggacucccugagcuccaccgccagcgcgcucgggaagcugcaggacguggucaaccagaacgcccaggcccugaacacgcucgugaagcagcuguccagcaacuucggcgccaucuccagcgugcugaacgacauccucucccgccuggacccgcccgaggccgaggugcagaucgaccggcugaucaccgggcgccuccagagccugcagaccuacgugacccagcagcugauccgggcggccgagauccgcgccagcgccaaccucgccgcgaccaagauguccgagugcguccugggccagagcaagcggguggacuucugcggcaagggguaccaccugauguccuucccccagagcgccccgcacggcguggucuuccuccacgugacguacguccccgcccaggagaagaacuucaccaccgcccccgcgaucugccacgacgggaaggcccacuucccccgcgagggcguguucguguccaacgggacccacugguucgucacgcagcggaacuucuacgagccgcagaucaucaccaccgacaacaccuucgugagcggcaacugcgacguggucaucggcaucgugaacaacacgguguacgacccccugcagcccgagcuggacuccuucaaggaggagcucgacaaguacuucaagaaccacaccagccccgacgucgaccugggggacaucuccggcaucaacgccagcguggugaacauccagaaggagaucgaccgccugaacgaggucgccaagaaccucaacgagucccugaucgaccugcaggagcucgggaaguacgagcaguacaucaaguggccgugguacaucuggcugggcuucaucgccggccugaucgcgaucgugauggugaccaucaugcucugcugcaugaccagcugcugcuccugccugaaggggugcugcagcugcggcuccugcugcaaguucgacgaggacgacagcgagcccguccugaagggggugaagcuccacuacacgugaggacuagucccuguucccagagcccacuuuuuuuucuuuuuuugaaauaaaauagccugucuuucagaucucaaaggcucuuuucagagccaccaaaaaaaaaaaaaaaaaaaaaaaaaaaaaaaaaaaaaaaaaaaaaaaaaaaaaaaaaaaaaaaaaaaaaaaaaaaaaaaaaaaaaaaaaaaaaaaaaaaaaaaaaaaaaaaaaaaaaaaaaaaaaaaaaaaaaaaaaaaaa

SEQ ID NO: 26932 - RNA, 3994 nt, Artificial Sequence
  SARS-CoV-2/Wuhan/WIV05/2019__EPI_ISL_402128 spike protein mRNA gc (1-1273)(K986P_V987P) R10307
aggagagucccgcagucggcguccagcggcucugcuuguucgugugugugucguugcaggccuuauucaagcuuaccauguucguguuccugguccuccugccccuggugagcucccagugcgugaaccucaccacccgcacgcagcugccgcccgccuacaccaacagcuucacccggggcgucuacuaccccgacaagguguuccgcuccagcgugcugcacuccacccaggaccucuuccugcccuucuucagcaacgucacgugguuccacgccauccacguguccgggaccaacggcaccaagcgguucgacaacccggugcugcccuucaacgacggggucuacuucgcgagcaccgagaaguccaacaucauccgcggcuggaucuucgggacgacccucgacagcaagacccagucccugcugaucgugaacaacgccaccaacguggucaucaaggugugcgaguuccaguucugcaacgaccccuuccucggcguguacuaccacaagaacaacaagagcuggauggaguccgaguuccgggucuacagcuccgccaacaacugcacguucgaguacgugagccagcccuuccugauggaccuggagggcaagcaggggaacuucaagaaccuccgcgaguucguguucaagaacaucgacggcuacuucaagaucuacuccaagcacaccccgaucaaccugguccgggaccugccccagggguucagcgcccucgagccccugguggaccugcccaucggcaucaacaucacccgcuuccagacccuccuggcccugcaccgguccuaccucacgccgggggacagcagcuccggcuggaccgcgggcgccgccgccuacuacgugggguaccugcagccccgcaccuuccugcucaaguacaacgagaacggcaccaucacggacgcggucgacugcgcccuggacccccugagcgagaccaagugcacccucaaguccuucaccguggagaaggggaucuaccagacgagcaacuuccgggugcagcccaccgaguccaucguccgcuucccgaacaucaccaaccugugccccuucggcgagguguucaacgccacccgguucgccagcgucuacgccuggaaccgcaagcggaucuccaacugcguggcggacuacagcgugcuguacaacuccgccagcuucuccacguucaagugcuacggcgucagccccaccaagcucaacgaccugugcuucaccaacguguacgccgacuccuucgugauccgcggggacgagguccggcagaucgcccccggccagaccgggaagaucgccgacuacaacuacaagcugccggacgacuucacgggcugcgugaucgcguggaacagcaacaaccucgacuccaaggucgggggcaacuacaacuaccuguaccgccuguuccgcaagagcaaccucaagcccuucgagcgggacaucuccaccgagaucuaccaggccggcagcacccccugcaacgggguggagggcuucaacugcuacuucccccugcaguccuacggguuccagccgaccaacggcgugggguaccagcccuaccggguggucgugcugagcuucgagcuccugcacgcccccgccacggugugcggccccaagaaguccaccaaccuggucaagaacaagugcgugaacuucaacuucaacggccucaccgggaccggcgugcugaccgagagcaacaagaaguuccugccguuccagcaguucgggcgcgacaucgccgacacgaccgacgcgguccgcgacccccagacccuggagauccucgacaucacccccugcagcuucggcgggguguccgugaucacgccgggcaccaacaccagcaaccaggucgccgugcuguaccaggacgugaacugcaccgagguccccguggccauccacgccgaccagcugacgcccaccuggcggguguacuccaccggcagcaacgucuuccagacccgcgccgggugccucaucggcgcggagcacgugaacaacuccuacgagugcgacauccccaucggggccggcaucugcgccagcuaccagacgcagaccaacuccccgcggcgcgcccggagcguggcgucccagagcaucaucgccuacaccaugucccugggcgccgagaacagcgucgccuacuccaacaacagcaucgccauccccaccaacuucacgaucuccgugaccaccgagauccugcccgugagcaugaccaagacgagcgucgacugcaccauguacaucugcggggacuccaccgagugcagcaaccuccugcugcaguacggcuccuucugcacccagcucaaccgcgcgcugacggggaucgccguggagcaggacaagaacacccaggagguguucgcccaggucaagcagaucuacaagacgcccccgaucaaggacuucggcggguucaacuucagccagauccugcccgaccccuccaagcccagcaagcgguccuucaucgaggaccuccuguucaacaaggugacccuggccgacgccggcuucaucaagcaguacggcgacugccucggggacaucgcggcccgcgaccugaucugcgcccagaaguucaacggccugaccgugcucccgccccugcugaccgacgagaugaucgcccaguacaccagcgcccuccuggcggggaccaucacguccggcuggaccuucggggccggcgccgcccugcagauccccuucgcgaugcagauggccuaccgguucaacggcaucggggucacccagaacgugcucuacgagaaccagaagcugaucgccaaccaguucaacagcgccaucggcaagauccaggacucccugagcuccaccgccagcgcgcucgggaagcugcaggacguggucaaccagaacgcccaggcccugaacacgcucgugaagcagcuguccagcaacuucggcgccaucuccagcgugcugaacgacauccucucccgccuggacccgcccgaggccgaggugcagaucgaccggcugaucaccgggcgccuccagagccugcagaccuacgugacccagcagcugauccgggcggccgagauccgcgccagcgccaaccucgccgcgaccaagauguccgagugcguccugggccagagcaagcggguggacuucugcggcaagggguaccaccugauguccuucccccagagcgccccgcacggcguggucuuccuccacgugacguacguccccgcccaggagaagaacuucaccaccgcccccgcgaucugccacgacgggaaggcccacuucccccgcgagggcguguucguguccaacgggacccacugguucgucacgcagcggaacuucuacgagccgcagaucaucaccaccgacaacaccuucgugagcggcaacugcgacguggucaucggcaucgugaacaacacgguguacgacccccugcagcccgagcuggacuccuucaaggaggagcucgacaaguacuucaagaaccacaccagccccgacgucgaccugggggacaucuccggcaucaacgccagcguggugaacauccagaaggagaucgaccgccugaacgaggucgccaagaaccucaacgagucccugaucgaccugcaggagcucgggaaguacgagcaguacaucaaguggccgugguacaucuggcugggcuucaucgccggccugaucgcgaucgugauggugaccaucaugcucugcugcaugaccagcugcugcuccugccugaaggggugcugcagcugcggcuccugcugcaaguucgacgaggacgacagcgagcccguccugaagggggugaagcuccacuacacgugaggacuagucccuguucccagagcccacuuuuuuuucuuuuuuugaaauaaaauagccugucuuucagaucucaaaggcucuuuucagagccacca

SEQ ID NO: 26933 - RNA, 4025 nt, Artificial Sequence
  SARS-CoV-2/Wuhan/WIV05/2019__EPI_ISL_402128 spike protein mRNA gc (1-1273)(K986P_V987P) R10308
aggagaaagcuuaccauguucguguuccugguccuccugccccuggugagcucccagugcgugaaccucaccacccgcacgcagcugccgcccgccuacaccaacagcuucacccggggcgucuacuaccccgacaagguguuccgcuccagcgugcugcacuccacccaggaccucuuccugcccuucuucagcaacgucacgugguuccacgccauccacguguccgggaccaacggcaccaagcgguucgacaacccggugcugcccuucaacgacggggucuacuucgcgagcaccgagaaguccaacaucauccgcggcuggaucuucgggacgacccucgacagcaagacccagucccugcugaucgugaacaacgccaccaacguggucaucaaggugugcgaguuccaguucugcaacgaccccuuccucggcguguacuaccacaagaacaacaagagcuggauggaguccgaguuccgggucuacagcuccgccaacaacugcacguucgaguacgugagccagcccuuccugauggaccuggagggcaagcaggggaacuucaagaaccuccgcgaguucguguucaagaacaucgacggcuacuucaagaucuacuccaagcacaccccgaucaaccugguccgggaccugccccagggguucagcgcccucgagccccugguggaccugcccaucggcaucaacaucacccgcuuccagacccuccuggcccugcaccgguccuaccucacgccgggggacagcagcuccggcuggaccgcgggcgccgccgccuacuacgugggguaccugcagccccgcaccuuccugcucaaguacaacgagaacggcaccaucacggacgcggucgacugcgcccuggacccccugagcgagaccaagugcacccucaaguccuucaccguggagaaggggaucuaccagacgagcaacuuccgggugcagcccaccgaguccaucguccgcuucccgaacaucaccaaccugugccccuucggcgagguguucaacgccacccgguucgccagcgucuacgccuggaaccgcaagcggaucuccaacugcguggcggacuacagcgugcuguacaacuccgccagcuucuccacguucaagugcuacggcgucagccccaccaagcucaacgaccugugcuucaccaacguguacgccgacuccuucgugauccgcggggacgagguccggcagaucgcccccggccagaccgggaagaucgccgacuacaacuacaagcugccggacgacuucacgggcugcgugaucgcguggaacagcaacaaccucgacuccaaggucgggggcaacuacaacuaccuguaccgccuguuccgcaagagcaaccucaagcccuucgagcgggacaucuccaccgagaucuaccaggccggcagcacccccugcaacgggguggagggcuucaacugcuacuucccccugcaguccuacggguuccagccgaccaacggcgugggguaccagcccuaccggguggucgugcugagcuucgagcuccugcacgcccccgccacggugugcggccccaagaaguccaccaaccuggucaagaacaagugcgugaacuucaacuucaacggccucaccgggaccggcgugcugaccgagagcaacaagaaguuccugccguuccagcaguucgggcgcgacaucgccgacacgaccgacgcgguccgcgacccccagacccuggagauccucgacaucacccccugcagcuucggcgggguguccgugaucacgccgggcaccaacaccagcaaccaggucgccgugcuguaccaggacgugaacugcaccgagguccccguggccauccacgccgaccagcugacgcccaccuggcggguguacuccaccggcagcaacgucuuccagacccgcgccgggugccucaucggcgcggagcacgugaacaacuccuacgagugcgacauccccaucggggccggcaucugcgccagcuaccagacgcagaccaacuccccgcggcgcgcccggagcguggcgucccagagcaucaucgccuacaccaugucccugggcgccgagaacagcgucgccuacuccaacaacagcaucgccauccccaccaacuucacgaucuccgugaccaccgagauccugcccgugagcaugaccaagacgagcgucgacugcaccauguacaucugcggggacuccaccgagugcagcaaccuccugcugcaguacggcuccuucugcacccagcucaaccgcgcgcugacggggaucgccguggagcaggacaagaacacccaggagguguucgcccaggucaagcagaucuacaagacgcccccgaucaaggacuucggcggguucaacuucagccagauccugcccgaccccuccaagcccagcaagcgguccuucaucgaggaccuccuguucaacaaggugacccuggccgacgccggcuucaucaagcaguacggcgacugccucggggacaucgcggcccgcgaccugaucugcgcccagaaguucaacggccugaccgugcucccgccccugcugaccgacgagaugaucgcccaguacaccagcgcccuccuggcggggaccaucacguccggcuggaccuucggggccggcgccgcccugcagauccccuucgcgaugcagauggccuaccgguucaacggcaucggggucacccagaacgugcucuacgagaaccagaagcugaucgccaaccaguucaacagcgccaucggcaagauccaggacucccugagcuccaccgccagcgcgcucgggaagcugcaggacguggucaaccagaacgcccaggcccugaacacgcucgugaagcagcuguccagcaacuucggcgccaucuccagcgugcugaacgacauccucucccgccuggacccgcccgaggccgaggugcagaucgaccggcugaucaccgggcgccuccagagccugcagaccuacgugacccagcagcugauccgggcggccgagauccgcgccagcgccaaccucgccgcgaccaagauguccgagugcguccugggccagagcaagcggguggacuucugcggcaagggguaccaccugauguccuucccccagagcgccccgcacggcguggucuuccuccacgugacguacguccccgcccaggagaagaacuucaccaccgcccccgcgaucugccacgacgggaaggcccacuucccccgcgagggcguguucguguccaacgggacccacugguucgucacgcagcggaacuucuacgagccgcagaucaucaccaccgacaacaccuucgugagcggcaacugcgacguggucaucggcaucgugaacaacacgguguacgacccccugcagcccgagcuggacuccuucaaggaggagcucgacaaguacuucaagaaccacaccagccccgacgucgaccugggggacaucuccggcaucaacgccagcguggugaacauccagaaggagaucgaccgccugaacgaggucgccaagaaccucaacgagucccugaucgaccugcaggagcucgggaaguacgagcaguacaucaaguggccgugguacaucuggcugggcuucaucgccggccugaucgcgaucgugauggugaccaucaugcucugcugcaugaccagcugcugcuccugccugaaggggugcugcagcugcggcuccugcugcaaguucgacgaggacgacagcgagcccguccugaagggggugaagcuccacuacacgugaggacuaguuauaagacugacuagcccgaugggccucccaacgggcccuccuccccuccuugcaccgagauuaauaaaaaaaaaaaaaaaaaaaaaaaaaaaaaaaaaaaaaaaaaaaaaaaaaaugcaucccccccccccccccccccccccccccccccaaaggcucuuuucagagccaccagaauu

SEQ ID NO: 26934 - RNA, 4010 nt, Artificial Sequence
  SARS-CoV-2/Wuhan/WIV05/2019__EPI_ISL_402128 spike protein mRNA gc (1-1273)(K986P_V987P) R10309
aggagaaagcuuaccauguucguguuccugguccuccugccccuggugagcucccagugcgugaaccucaccacccgcacgcagcugccgcccgccuacaccaacagcuucacccggggcgucuacuaccccgacaagguguuccgcuccagcgugcugcacuccacccaggaccucuuccugcccuucuucagcaacgucacgugguuccacgccauccacguguccgggaccaacggcaccaagcgguucgacaacccggugcugcccuucaacgacggggucuacuucgcgagcaccgagaaguccaacaucauccgcggcuggaucuucgggacgacccucgacagcaagacccagucccugcugaucgugaacaacgccaccaacguggucaucaaggugugcgaguuccaguucugcaacgaccccuuccucggcguguacuaccacaagaacaacaagagcuggauggaguccgaguuccgggucuacagcuccgccaacaacugcacguucgaguacgugagccagcccuuccugauggaccuggagggcaagcaggggaacuucaagaaccuccgcgaguucguguucaagaacaucgacggcuacuucaagaucuacuccaagcacaccccgaucaaccugguccgggaccugccccagggguucagcgcccucgagccccugguggaccugcccaucggcaucaacaucacccgcuuccagacccuccuggcccugcaccgguccuaccucacgccgggggacagcagcuccggcuggaccgcgggcgccgccgccuacuacgugggguaccugcagccccgcaccuuccugcucaaguacaacgagaacggcaccaucacggacgcggucgacugcgcccuggacccccugagcgagaccaagugcacccucaaguccuucaccguggagaaggggaucuaccagacgagcaacuuccgggugcagcccaccgaguccaucguccgcuucccgaacaucaccaaccugugccccuucggcgagguguucaacgccacccgguucgccagcgucuacgccuggaaccgcaagcggaucuccaacugcguggcggacuacagcgugcuguacaacuccgccagcuucuccacguucaagugcuacggcgucagccccaccaagcucaacgaccugugcuucaccaacguguacgccgacuccuucgugauccgcggggacgagguccggcagaucgcccccggccagaccgggaagaucgccgacuacaacuacaagcugccggacgacuucacgggcugcgugaucgcguggaacagcaacaaccucgacuccaaggucgggggcaacuacaacuaccuguaccgccuguuccgcaagagcaaccucaagcccuucgagcgggacaucuccaccgagaucuaccaggccggcagcacccccugcaacgggguggagggcuucaacugcuacuucccccugcaguccuacggguuccagccgaccaacggcgugggguaccagcccuaccggguggucgugcugagcuucgagcuccugcacgcccccgccacggugugcggccccaagaaguccaccaaccuggucaagaacaagugcgugaacuucaacuucaacggccucaccgggaccggcgugcugaccgagagcaacaagaaguuccugccguuccagcaguucgggcgcgacaucgccgacacgaccgacgcgguccgcgacccccagacccuggagauccucgacaucacccccugcagcuucggcgggguguccgugaucacgccgggcaccaacaccagcaaccaggucgccgugcuguaccaggacgugaacugcaccgagguccccguggccauccacgccgaccagcugacgcccaccuggcggguguacuccaccggcagcaacgucuuccagacccgcgccgggugccucaucggcgcggagcacgugaacaacuccuacgagugcgacauccccaucggggccggcaucugcgccagcuaccagacgcagaccaacuccccgcggcgcgcccggagcguggcgucccagagcaucaucgccuacaccaugucccugggcgccgagaacagcgucgccuacuccaacaacagcaucgccauccccaccaacuucacgaucuccgugaccaccgagauccugcccgugagcaugaccaagacgagcgucgacugcaccauguacaucugcggggacuccaccgagugcagcaaccuccugcugcaguacggcuccuucugcacccagcucaaccgcgcgcugacggggaucgccguggagcaggacaagaacacccaggagguguucgcccaggucaagcagaucuacaagacgcccccgaucaaggacuucggcggguucaacuucagccagauccugcccgaccccuccaagcccagcaagcgguccuucaucgaggaccuccuguucaacaaggugacccuggccgacgccggcuucaucaagcaguacggcgacugccucggggacaucgcggcccgcgaccugaucugcgcccagaaguucaacggccugaccgugcucccgccccugcugaccgacgagaugaucgcccaguacaccagcgcccuccuggcggggaccaucacguccggcuggaccuucggggccggcgccgcccugcagauccccuucgcgaugcagauggccuaccgguucaacggcaucggggucacccagaacgugcucuacgagaaccagaagcugaucgccaaccaguucaacagcgccaucggcaagauccaggacucccugagcuccaccgccagcgcgcucgggaagcugcaggacguggucaaccagaacgcccaggcccugaacacgcucgugaagcagcuguccagcaacuucggcgccaucuccagcgugcugaacgacauccucucccgccuggacccgcccgaggccgaggugcagaucgaccggcugaucaccgggcgccuccagagccugcagaccuacgugacccagcagcugauccgggcggccgagauccgcgccagcgccaaccucgccgcgaccaagauguccgagugcguccugggccagagcaagcggguggacuucugcggcaagggguaccaccugauguccuucccccagagcgccccgcacggcguggucuuccuccacgugacguacguccccgcccaggagaagaacuucaccaccgcccccgcgaucugccacgacgggaaggcccacuucccccgcgagggcguguucguguccaacgggacccacugguucgucacgcagcggaacuucuacgagccgcagaucaucaccaccgacaacaccuucgugagcggcaacugcgacguggucaucggcaucgugaacaacacgguguacgacccccugcagcccgagcuggacuccuucaaggaggagcucgacaaguacuucaagaaccacaccagccccgacgucgaccugggggacaucuccggcaucaacgccagcguggugaacauccagaaggagaucgaccgccugaacgaggucgccaagaaccucaacgagucccugaucgaccugcaggagcucgggaaguacgagcaguacaucaaguggccgugguacaucuggcugggcuucaucgccggccugaucgcgaucgugauggugaccaucaugcucugcugcaugaccagcugcugcuccugccugaaggggugcugcagcugcggcuccugcugcaaguucgacgaggacgacagcgagcccguccugaagggggugaagcuccacuacacgugaggacuaguuauaagacugacuagcccgaugggccucccaacgggcccuccuccccuccuugcaccgagauuaauaaaaaaaaaaaaaaaaaaaaaaaaaaaaaaaaaaaugcaucccccccccccccccccccccccccccccccaaaggcucuuuucagagccaccagaauu

SEQ ID NO: 26935 - RNA, 4000 nt, Artificial Sequence
  SARS-CoV-2/Wuhan/WIV05/2019__EPI_ISL_402128 spike protein mRNA gc (1-1273)(K986P_V987P) R10310
aggagaaagcuuaccauguucguguuccugguccuccugccccuggugagcucccagugcgugaaccucaccacccgcacgcagcugccgcccgccuacaccaacagcuucacccggggcgucuacuaccccgacaagguguuccgcuccagcgugcugcacuccacccaggaccucuuccugcccuucuucagcaacgucacgugguuccacgccauccacguguccgggaccaacggcaccaagcgguucgacaacccggugcugcccuucaacgacggggucuacuucgcgagcaccgagaaguccaacaucauccgcggcuggaucuucgggacgacccucgacagcaagacccagucccugcugaucgugaacaacgccaccaacguggucaucaaggugugcgaguuccaguucugcaacgaccccuuccucggcguguacuaccacaagaacaacaagagcuggauggaguccgaguuccgggucuacagcuccgccaacaacugcacguucgaguacgugagccagcccuuccugauggaccuggagggcaagcaggggaacuucaagaaccuccgcgaguucguguucaagaacaucgacggcuacuucaagaucuacuccaagcacaccccgaucaaccugguccgggaccugccccagggguucagcgcccucgagccccugguggaccugcccaucggcaucaacaucacccgcuuccagacccuccuggcccugcaccgguccuaccucacgccgggggacagcagcuccggcuggaccgcgggcgccgccgccuacuacgugggguaccugcagccccgcaccuuccugcucaaguacaacgagaacggcaccaucacggacgcggucgacugcgcccuggacccccugagcgagaccaagugcacccucaaguccuucaccguggagaaggggaucuaccagacgagcaacuuccgggugcagcccaccgaguccaucguccgcuucccgaacaucaccaaccugugccccuucggcgagguguucaacgccacccgguucgccagcgucuacgccuggaaccgcaagcggaucuccaacugcguggcggacuacagcgugcuguacaacuccgccagcuucuccacguucaagugcuacggcgucagccccaccaagcucaacgaccugugcuucaccaacguguacgccgacuccuucgugauccgcggggacgagguccggcagaucgcccccggccagaccgggaagaucgccgacuacaacuacaagcugccggacgacuucacgggcugcgugaucgcguggaacagcaacaaccucgacuccaaggucgggggcaacuacaacuaccuguaccgccuguuccgcaagagcaaccucaagcccuucgagcgggacaucuccaccgagaucuaccaggccggcagcacccccugcaacgggguggagggcuucaacugcuacuucccccugcaguccuacggguuccagccgaccaacggcgugggguaccagcccuaccggguggucgugcugagcuucgagcuccugcacgcccccgccacggugugcggccccaagaaguccaccaaccuggucaagaacaagugcgugaacuucaacuucaacggccucaccgggaccggcgugcugaccgagagcaacaagaaguuccugccguuccagcaguucgggcgcgacaucgccgacacgaccgacgcgguccgcgacccccagacccuggagauccucgacaucacccccugcagcuucggcgggguguccgugaucacgccgggcaccaacaccagcaaccaggucgccgugcuguaccaggacgugaacugcaccgagguccccguggccauccacgccgaccagcugacgcccaccuggcggguguacuccaccggcagcaacgucuuccagacccgcgccgggugccucaucggcgcggagcacgugaacaacuccuacgagugcgacauccccaucggggccggcaucugcgccagcuaccagacgcagaccaacuccccgcggcgcgcccggagcguggcgucccagagcaucaucgccuacaccaugucccugggcgccgagaacagcgucgccuacuccaacaacagcaucgccauccccaccaacuucacgaucuccgugaccaccgagauccugcccgugagcaugaccaagacgagcgucgacugcaccauguacaucugcggggacuccaccgagugcagcaaccuccugcugcaguacggcuccuucugcacccagcucaaccgcgcgcugacggggaucgccguggagcaggacaagaacacccaggagguguucgcccaggucaagcagaucuacaagacgcccccgaucaaggacuucggcggguucaacuucagccagauccugcccgaccccuccaagcccagcaagcgguccuucaucgaggaccuccuguucaacaaggugacccuggccgacgccggcuucaucaagcaguacggcgacugccucggggacaucgcggcccgcgaccugaucugcgcccagaaguucaacggccugaccgugcucccgccccugcugaccgacgagaugaucgcccaguacaccagcgcccuccuggcggggaccaucacguccggcuggaccuucggggccggcgccgcccugcagauccccuucgcgaugcagauggccuaccgguucaacggcaucggggucacccagaacgugcucuacgagaaccagaagcugaucgccaaccaguucaacagcgccaucggcaagauccaggacucccugagcuccaccgccagcgcgcucgggaagcugcaggacguggucaaccagaacgcccaggcccugaacacgcucgugaagcagcuguccagcaacuucggcgccaucuccagcgugcugaacgacauccucucccgccuggacccgcccgaggccgaggugcagaucgaccggcugaucaccgggcgccuccagagccugcagaccuacgugacccagcagcugauccgggcggccgagauccgcgccagcgccaaccucgccgcgaccaagauguccgagugcguccugggccagagcaagcggguggacuucugcggcaagggguaccaccugauguccuucccccagagcgccccgcacggcguggucuuccuccacgugacguacguccccgcccaggagaagaacuucaccaccgcccccgcgaucugccacgacgggaaggcccacuucccccgcgagggcguguucguguccaacgggacccacugguucgucacgcagcggaacuucuacgagccgcagaucaucaccaccgacaacaccuucgugagcggcaacugcgacguggucaucggcaucgugaacaacacgguguacgacccccugcagcccgagcuggacuccuucaaggaggagcucgacaaguacuucaagaaccacaccagccccgacgucgaccugggggacaucuccggcaucaacgccagcguggugaacauccagaaggagaucgaccgccugaacgaggucgccaagaaccucaacgagucccugaucgaccugcaggagcucgggaaguacgagcaguacaucaaguggccgugguacaucuggcugggcuucaucgccggccugaucgcgaucgugauggugaccaucaugcucugcugcaugaccagcugcugcuccugccugaaggggugcugcagcugcggcuccugcugcaaguucgacgaggacgacagcgagcccguccugaagggggugaagcuccacuacacgugaggacuaguuauaagacugacuagcccgaugggccucccaacgggcccuccuccccuccuugcaccgagauuaauaaaaaaaaaaaaaaaaaaaaaaaaaugcaucccccccccccccccccccccccccccccccaaaggcucuuuucagagccaccagaauu

SEQ ID NO: 26936 - RNA, 4048 nt, Artificial Sequence
  SARS-CoV-2/Wuhan/WIV05/2019__EPI_ISL_402128 spike protein mRNA gc (1-1273)(K986P_V987P) R10311
aggagaaagcuuaccauguucguguuccugguccuccugccccuggugagcucccagugcgugaaccucaccacccgcacgcagcugccgcccgccuacaccaacagcuucacccggggcgucuacuaccccgacaagguguuccgcuccagcgugcugcacuccacccaggaccucuuccugcccuucuucagcaacgucacgugguuccacgccauccacguguccgggaccaacggcaccaagcgguucgacaacccggugcugcccuucaacgacggggucuacuucgcgagcaccgagaaguccaacaucauccgcggcuggaucuucgggacgacccucgacagcaagacccagucccugcugaucgugaacaacgccaccaacguggucaucaaggugugcgaguuccaguucugcaacgaccccuuccucggcguguacuaccacaagaacaacaagagcuggauggaguccgaguuccgggucuacagcuccgccaacaacugcacguucgaguacgugagccagcccuuccugauggaccuggagggcaagcaggggaacuucaagaaccuccgcgaguucguguucaagaacaucgacggcuacuucaagaucuacuccaagcacaccccgaucaaccugguccgggaccugccccagggguucagcgcccucgagccccugguggaccugcccaucggcaucaacaucacccgcuuccagacccuccuggcccugcaccgguccuaccucacgccgggggacagcagcuccggcuggaccgcgggcgccgccgccuacuacgugggguaccugcagccccgcaccuuccugcucaaguacaacgagaacggcaccaucacggacgcggucgacugcgcccuggacccccugagcgagaccaagugcacccucaaguccuucaccguggagaaggggaucuaccagacgagcaacuuccgggugcagcccaccgaguccaucguccgcuucccgaacaucaccaaccugugccccuucggcgagguguucaacgccacccgguucgccagcgucuacgccuggaaccgcaagcggaucuccaacugcguggcggacuacagcgugcuguacaacuccgccagcuucuccacguucaagugcuacggcgucagccccaccaagcucaacgaccugugcuucaccaacguguacgccgacuccuucgugauccgcggggacgagguccggcagaucgcccccggccagaccgggaagaucgccgacuacaacuacaagcugccggacgacuucacgggcugcgugaucgcguggaacagcaacaaccucgacuccaaggucgggggcaacuacaacuaccuguaccgccuguuccgcaagagcaaccucaagcccuucgagcgggacaucuccaccgagaucuaccaggccggcagcacccccugcaacgggguggagggcuucaacugcuacuucccccugcaguccuacggguuccagccgaccaacggcgugggguaccagcccuaccggguggucgugcugagcuucgagcuccugcacgcccccgccacggugugcggccccaagaaguccaccaaccuggucaagaacaagugcgugaacuucaacuucaacggccucaccgggaccggcgugcugaccgagagcaacaagaaguuccugccguuccagcaguucgggcgcgacaucgccgacacgaccgacgcgguccgcgacccccagacccuggagauccucgacaucacccccugcagcuucggcgggguguccgugaucacgccgggcaccaacaccagcaaccaggucgccgugcuguaccaggacgugaacugcaccgagguccccguggccauccacgccgaccagcugacgcccaccuggcggguguacuccaccggcagcaacgucuuccagacccgcgccgggugccucaucggcgcggagcacgugaacaacuccuacgagugcgacauccccaucggggccggcaucugcgccagcuaccagacgcagaccaacuccccgcggcgcgcccggagcguggcgucccagagcaucaucgccuacaccaugucccugggcgccgagaacagcgucgccuacuccaacaacagcaucgccauccccaccaacuucacgaucuccgugaccaccgagauccugcccgugagcaugaccaagacgagcgucgacugcaccauguacaucugcggggacuccaccgagugcagcaaccuccugcugcaguacggcuccuucugcacccagcucaaccgcgcgcugacggggaucgccguggagcaggacaagaacacccaggagguguucgcccaggucaagcagaucuacaagacgcccccgaucaaggacuucggcggguucaacuucagccagauccugcccgaccccuccaagcccagcaagcgguccuucaucgaggaccuccuguucaacaaggugacccuggccgacgccggcuucaucaagcaguacggcgacugccucggggacaucgcggcccgcgaccugaucugcgcccagaaguucaacggccugaccgugcucccgccccugcugaccgacgagaugaucgcccaguacaccagcgcccuccuggcggggaccaucacguccggcuggaccuucggggccggcgccgcccugcagauccccuucgcgaugcagauggccuaccgguucaacggcaucggggucacccagaacgugcucuacgagaaccagaagcugaucgccaaccaguucaacagcgccaucggcaagauccaggacucccugagcuccaccgccagcgcgcucgggaagcugcaggacguggucaaccagaacgcccaggcccugaacacgcucgugaagcagcuguccagcaacuucggcgccaucuccagcgugcugaacgacauccucucccgccuggacccgcccgaggccgaggugcagaucgaccggcugaucaccgggcgccuccagagccugcagaccuacgugacccagcagcugauccgggcggccgagauccgcgccagcgccaaccucgccgcgaccaagauguccgagugcguccugggccagagcaagcggguggacuucugcggcaagggguaccaccugauguccuucccccagagcgccccgcacggcguggucuuccuccacgugacguacguccccgcccaggagaagaacuucaccaccgcccccgcgaucugccacgacgggaaggcccacuucccccgcgagggcguguucguguccaacgggacccacugguucgucacgcagcggaacuucuacgagccgcagaucaucaccaccgacaacaccuucgugagcggcaacugcgacguggucaucggcaucgugaacaacacgguguacgacccccugcagcccgagcuggacuccuucaaggaggagcucgacaaguacuucaagaaccacaccagccccgacgucgaccugggggacaucuccggcaucaacgccagcguggugaacauccagaaggagaucgaccgccugaacgaggucgccaagaaccucaacgagucccugaucgaccugcaggagcucgggaaguacgagcaguacaucaaguggccgugguacaucuggcugggcuucaucgccggccugaucgcgaucgugauggugaccaucaugcucugcugcaugaccagcugcugcuccugccugaaggggugcugcagcugcggcuccugcugcaaguucgacgaggacgacagcgagcccguccugaagggggugaagcuccacuacacgugaggacuaguuauaagacugacuagcccgaugggccucccaacgggcccuccuccccuccuugcaccgagauuaauaaaaaaaaaaaaaaaaaaaaaaaaaaaaaaaaaaaaaaaaaaaaaaaaaaaaaaaaaaaaaaaaaaaaaaaaaugcaucccccccccccccccccccccccccccccccaaaggcucuuuucagagccaccagaauu

SEQ ID NO: 26937 - RNA, 3940 nt, Artificial Sequence
  SARS-CoV-2/Wuhan/WIV05/2019__EPI_ISL_402128 spike protein mRNA gc (1-1273)(K986P_V987P) R10312
aggagaaagcuuaccauguucguguuccugguccuccugccccuggugagcucccagugcgugaaccucaccacccgcacgcagcugccgcccgccuacaccaacagcuucacccggggcgucuacuaccccgacaagguguuccgcuccagcgugcugcacuccacccaggaccucuuccugcccuucuucagcaacgucacgugguuccacgccauccacguguccgggaccaacggcaccaagcgguucgacaacccggugcugcccuucaacgacggggucuacuucgcgagcaccgagaaguccaacaucauccgcggcuggaucuucgggacgacccucgacagcaagacccagucccugcugaucgugaacaacgccaccaacguggucaucaaggugugcgaguuccaguucugcaacgaccccuuccucggcguguacuaccacaagaacaacaagagcuggauggaguccgaguuccgggucuacagcuccgccaacaacugcacguucgaguacgugagccagcccuuccugauggaccuggagggcaagcaggggaacuucaagaaccuccgcgaguucguguucaagaacaucgacggcuacuucaagaucuacuccaagcacaccccgaucaaccugguccgggaccugccccagggguucagcgcccucgagccccugguggaccugcccaucggcaucaacaucacccgcuuccagacccuccuggcccugcaccgguccuaccucacgccgggggacagcagcuccggcuggaccgcgggcgccgccgccuacuacgugggguaccugcagccccgcaccuuccugcucaaguacaacgagaacggcaccaucacggacgcggucgacugcgcccuggacccccugagcgagaccaagugcacccucaaguccuucaccguggagaaggggaucuaccagacgagcaacuuccgggugcagcccaccgaguccaucguccgcuucccgaacaucaccaaccugugccccuucggcgagguguucaacgccacccgguucgccagcgucuacgccuggaaccgcaagcggaucuccaacugcguggcggacuacagcgugcuguacaacuccgccagcuucuccacguucaagugcuacggcgucagccccaccaagcucaacgaccugugcuucaccaacguguacgccgacuccuucgugauccgcggggacgagguccggcagaucgcccccggccagaccgggaagaucgccgacuacaacuacaagcugccggacgacuucacgggcugcgugaucgcguggaacagcaacaaccucgacuccaaggucgggggcaacuacaacuaccuguaccgccuguuccgcaagagcaaccucaagcccuucgagcgggacaucuccaccgagaucuaccaggccggcagcacccccugcaacgggguggagggcuucaacugcuacuucccccugcaguccuacggguuccagccgaccaacggcgugggguaccagcccuaccggguggucgugcugagcuucgagcuccugcacgcccccgccacggugugcggccccaagaaguccaccaaccuggucaagaacaagugcgugaacuucaacuucaacggccucaccgggaccggcgugcugaccgagagcaacaagaaguuccugccguuccagcaguucgggcgcgacaucgccgacacgaccgacgcgguccgcgacccccagacccuggagauccucgacaucacccccugcagcuucggcgggguguccgugaucacgccgggcaccaacaccagcaaccaggucgccgugcuguaccaggacgugaacugcaccgagguccccguggccauccacgccgaccagcugacgcccaccuggcggguguacuccaccggcagcaacgucuuccagacccgcgccgggugccucaucggcgcggagcacgugaacaacuccuacgagugcgacauccccaucggggccggcaucugcgccagcuaccagacgcagaccaacuccccgcggcgcgcccggagcguggcgucccagagcaucaucgccuacaccaugucccugggcgccgagaacagcgucgccuacuccaacaacagcaucgccauccccaccaacuucacgaucuccgugaccaccgagauccugcccgugagcaugaccaagacgagcgucgacugcaccauguacaucugcggggacuccaccgagugcagcaaccuccugcugcaguacggcuccuucugcacccagcucaaccgcgcgcugacggggaucgccguggagcaggacaagaacacccaggagguguucgcccaggucaagcagaucuacaagacgcccccgaucaaggacuucggcggguucaacuucagccagauccugcccgaccccuccaagcccagcaagcgguccuucaucgaggaccuccuguucaacaaggugacccuggccgacgccggcuucaucaagcaguacggcgacugccucggggacaucgcggcccgcgaccugaucugcgcccagaaguucaacggccugaccgugcucccgccccugcugaccgacgagaugaucgcccaguacaccagcgcccuccuggcggggaccaucacguccggcuggaccuucggggccggcgccgcccugcagauccccuucgcgaugcagauggccuaccgguucaacggcaucggggucacccagaacgugcucuacgagaaccagaagcugaucgccaaccaguucaacagcgccaucggcaagauccaggacucccugagcuccaccgccagcgcgcucgggaagcugcaggacguggucaaccagaacgcccaggcccugaacacgcucgugaagcagcuguccagcaacuucggcgccaucuccagcgugcugaacgacauccucucccgccuggacccgcccgaggccgaggugcagaucgaccggcugaucaccgggcgccuccagagccugcagaccuacgugacccagcagcugauccgggcggccgagauccgcgccagcgccaaccucgccgcgaccaagauguccgagugcguccugggccagagcaagcggguggacuucugcggcaagggguaccaccugauguccuucccccagagcgccccgcacggcguggucuuccuccacgugacguacguccccgcccaggagaagaacuucaccaccgcccccgcgaucugccacgacgggaaggcccacuucccccgcgagggcguguucguguccaacgggacccacugguucgucacgcagcggaacuucuacgagccgcagaucaucaccaccgacaacaccuucgugagcggcaacugcgacguggucaucggcaucgugaacaacacgguguacgacccccugcagcccgagcuggacuccuucaaggaggagcucgacaaguacuucaagaaccacaccagccccgacgucgaccugggggacaucuccggcaucaacgccagcguggugaacauccagaaggagaucgaccgccugaacgaggucgccaagaaccucaacgagucccugaucgaccugcaggagcucgggaaguacgagcaguacaucaaguggccgugguacaucuggcugggcuucaucgccggccugaucgcgaucgugauggugaccaucaugcucugcugcaugaccagcugcugcuccugccugaaggggugcugcagcugcggcuccugcugcaaguucgacgaggacgacagcgagcccguccugaagggggugaagcuccacuacacgugaggacuaguuauaagacugacuagcccgaugggccucccaacgggcccuccuccccuccuugcaccgagauuaaucaaaggcucuuuucagagccaccagaauu

SEQ ID NO: 26938 - protein, 266 aa, Artificial Sequence
  SARS-CoV-2/Wuhan/WIV05/2019__EPI_ISL_402128 spike protein (1-16,327-528) Foldon construct
MFVFLVLLPLVSSQCVVRFPNITNLCPFGEVFNATRFASVYAWNRKRISNCVADYSVLYNSASFSTFKCYGVSPTKLNDLCFTNVYADSFVIRGDEVRQIAPGQTGKIADYNYKLPDDFTGCVIAWNSNNLDSKVGGNYNYLYRLFRKSNLKPFERDISTEIYQAGSTPCNGVEGFNCYFPLQSYGFQPTNGVGYQPYRVVVLSFELLHAPATVCGPKGSPGSGSGSGYIPEAPRDGQAYVRKDGEWVLLSTFLGRSLEVLFQGPG

SEQ ID NO: 26939 - protein, 311 aa, Artificial Sequence
  SARS-CoV-2/Wuhan/WIV05/2019__EPI_ISL_402128 spike protein (1-19,327-528,1207-1254) Foldon construct
MFVFLVLLPLVSSQCVNLTVRFPNITNLCPFGEVFNATRFASVYAWNRKRISNCVADYSVLYNSASFSTFKCYGVSPTKLNDLCFTNVYADSFVIRGDEVRQIAPGQTGKIADYNYKLPDDFTGCVIAWNSNNLDSKVGGNYNYLYRLFRKSNLKPFERDISTEIYQAGSTPCNGVEGFNCYFPLQSYGFQPTNGVGYQPYRVVVLSFELLHAPATVCGPKGSPGSGSGSGYIPEAPRDGQAYVRKDGEWVLLSTFLGSGSGSEQYIKWPWYIWLGFIAGLIAIVMVTIMLCCMTSCCSCLKGCCSCGSCC

SEQ ID NO: 26940 - RNA, 801 nt, Artificial Sequence
  SARS-CoV-2/Wuhan/WIV05/2019__EPI_ISL_402128 spike protein CDS gc mod (1-16,327-528) Foldon construct
auguuuguguuucuugugcugcugccucuugugucuucucaguguguggugagauuuccaaauauuacaaaucuguguccauuuggagaaguguuuaaugcaacaagauuugcaucuguguaugcauggaauagaaaaagaauuucuaauuguguggcugauuauucugugcuguauaauagugcuucuuuuuccacauuuaaauguuauggagugucuccaacaaaauuaaaugauuuauguuuuacaaauguguaugcugauucuuuugugaucagaggugaugaagugagacagauugcccccggacagacaggaaaaauugcugauuacaauuacaaacugccugaugauuuuacaggaugugugauugcuuggaauucuaauaauuuagauucuaaagugggaggaaauuacaauuaucuguacagacuguuuagaaaaucaaaucugaaaccuuuugaaagagauauuucaacagaaauuuaucaggcuggaucaacaccuuguaauggaguggaaggauuuaauuguuauuuuccauuacagagcuauggauuucagccaaccaauggugugggauaucagccauauagagugguggugcugucuuuugaacugcugcaugcaccugcaacaguguguggaccuaaaggcucccccggcuccggcuccggaucugguuauauuccugaagcuccaagagaugggcaagcuuacguucguaaagauggcgaauggguauuacuuucuaccuuuuuaggccggucccuggaggugcuguuccagggccccggcuga

SEQ ID NO: 26941 - RNA, 936 nt, Artificial Sequence
  SARS-CoV-2/Wuhan/WIV05/2019__EPI_ISL_402128 spike protein CDS gc mod (1-19,327-528,1207-1254) Foldon construct
auguuuguguuucuugugcugcugccucuugugucuucucagugugugaauuugacagugagauuuccaaauauuacaaaucuguguccauuuggagaaguguuuaaugcaacaagauuugcaucuguguaugcauggaauagaaaaagaauuucuaauuguguggcugauuauucugugcuguauaauagugcuucuuuuuccacauuuaaauguuauggagugucuccaacaaaauuaaaugauuuauguuuuacaaauguguaugcugauucuuuugugaucagaggugaugaagugagacagauugcccccggacagacaggaaaaauugcugauuacaauuacaaacugccugaugauuuuacaggaugugugauugcuuggaauucuaauaauuuagauucuaaagugggaggaaauuacaauuaucuguacagacuguuuagaaaaucaaaucugaaaccuuuugaaagagauauuucaacagaaauuuaucaggcuggaucaacaccuuguaauggaguggaaggauuuaauuguuauuuuccauuacagagcuauggauuucagccaaccaauggugugggauaucagccauauagagugguggugcugucuuuugaacugcugcaugcaccugcaacaguguguggaccuaaaggcucccccggcuccggcuccggaucugguuauauuccugaagcuccaagagaugggcaagcuuacguucguaaagauggcgaauggguauuacuuucuaccuuuuuaggaagcggcagcggaucugaacaguacauuaaauggccuugguacauuuggcuuggauuuauugcaggauuaauugcaauugugauggugacaauuauguuauguuguaugacaucauguuguucuuguuuaaaaggauguuguucuuguggaagcuguuguuga

SEQ ID NO: 26942 - RNA, 1262 nt, Artificial Sequence
  SARS-CoV-2/Wuhan/WIV05/2019__EPI_ISL_402128 spike protein mRNA gc mod (1-16,327-528) Foldon construct
agaauaaacuaguauucuucugguccccacagacucagagagaacccgccaccauguuuguguuucuugugcugcugccucuugugucuucucaguguguggugagauuuccaaauauuacaaaucuguguccauuuggagaaguguuuaaugcaacaagauuugcaucuguguaugcauggaauagaaaaagaauuucuaauuguguggcugauuauucugugcuguauaauagugcuucuuuuuccacauuuaaauguuauggagugucuccaacaaaauuaaaugauuuauguuuuacaaauguguaugcugauucuuuugugaucagaggugaugaagugagacagauugcccccggacagacaggaaaaauugcugauuacaauuacaaacugccugaugauuuuacaggaugugugauugcuuggaauucuaauaauuuagauucuaaagugggaggaaauuacaauuaucuguacagacuguuuagaaaaucaaaucugaaaccuuuugaaagagauauuucaacagaaauuuaucaggcuggaucaacaccuuguaauggaguggaaggauuuaauuguuauuuuccauuacagagcuauggauuucagccaaccaauggugugggauaucagccauauagagugguggugcugucuuuugaacugcugcaugcaccugcaacaguguguggaccuaaaggcucccccggcuccggcuccggaucugguuauauuccugaagcuccaagagaugggcaagcuuacguucguaaagauggcgaauggguauuacuuucuaccuuuuuaggccggucccuggaggugcuguuccagggccccggcugaugacucgagcugguacugcaugcacgcaaugcuagcugccccuuucccguccuggguaccccgagucucccccgaccucgggucccagguaugcucccaccuccaccugccccacucaccaccucugcuaguuccagacaccucccaagcacgcagcaaugcagcucaaaacgcuuagccuagccacacccccacgggaaacagcagugauuaaccuuuagcaauaaacgaaaguuuaacuaagcuauacuaaccccaggguuggucaauuucgugccagccacacccuggagcuagcaaaaaaaaaaaaaaaaaaaaaaaaaaaaaagcauaugacuaaaaaaaaaaaaaaaaaaaaaaaaaaaaaaaaaaaaaaaaaaaaaaaaaaaaaaaaaaaaaaaaaaaaaa

SEQ ID NO: 26943 - RNA, 1261 nt, Artificial Sequence
  SARS-CoV-2/Wuhan/WIV05/2019__EPI_ISL_402128 spike protein mRNA gc mod (1-16,327-528) Foldon construct
gggcgaacuaguauucuucugguccccacagacucagagagaacccgccaccauguuuguguuucuugugcugcugccucuugugucuucucaguguguggugagauuuccaaauauuacaaaucuguguccauuuggagaaguguuuaaugcaacaagauuugcaucuguguaugcauggaauagaaaaagaauuucuaauuguguggcugauuauucugugcuguauaauagugcuucuuuuuccacauuuaaauguuauggagugucuccaacaaaauuaaaugauuuauguuuuacaaauguguaugcugauucuuuugugaucagaggugaugaagugagacagauugcccccggacagacaggaaaaauugcugauuacaauuacaaacugccugaugauuuuacaggaugugugauugcuuggaauucuaauaauuuagauucuaaagugggaggaaauuacaauuaucuguacagacuguuuagaaaaucaaaucugaaaccuuuugaaagagauauuucaacagaaauuuaucaggcuggaucaacaccuuguaauggaguggaaggauuuaauuguuauuuuccauuacagagcuauggauuucagccaaccaauggugugggauaucagccauauagagugguggugcugucuuuugaacugcugcaugcaccugcaacaguguguggaccuaaaggcucccccggcuccggcuccggaucugguuauauuccugaagcuccaagagaugggcaagcuuacguucguaaagauggcgaauggguauuacuuucuaccuuuuuaggccggucccuggaggugcuguuccagggccccggcugaugacucgagcugguacugcaugcacgcaaugcuagcugccccuuucccguccuggguaccccgagucucccccgaccucgggucccagguaugcucccaccuccaccugccccacucaccaccucugcuaguuccagacaccucccaagcacgcagcaaugcagcucaaaacgcuuagccuagccacacccccacgggaaacagcagugauuaaccuuuagcaauaaacgaaaguuuaacuaagcuauacuaaccccaggguuggucaauuucgugccagccacacccuggagcuagcaaaaaaaaaaaaaaaaaaaaaaaaaaaaaagcauaugacuaaaaaaaaaaaaaaaaaaaaaaaaaaaaaaaaaaaaaaaaaaaaaaaaaaaaaaaaaaaaaaaaaaaaaa

SEQ ID NO: 26944 - RNA, 1397 nt, Artificial Sequence
  SARS-CoV-2/Wuhan/WIV05/2019__EPI_ISL_402128 spike protein mRNA gc mod (1-19,327-528,1207-1254) Foldon construct
agaauaaacuaguauucuucugguccccacagacucagagagaacccgccaccauguuuguguuucuugugcugcugccucuugugucuucucagugugugaauuugacagugagauuuccaaauauuacaaaucuguguccauuuggagaaguguuuaaugcaacaagauuugcaucuguguaugcauggaauagaaaaagaauuucuaauuguguggcugauuauucugugcuguauaauagugcuucuuuuuccacauuuaaauguuauggagugucuccaacaaaauuaaaugauuuauguuuuacaaauguguaugcugauucuuuugugaucagaggugaugaagugagacagauugcccccggacagacaggaaaaauugcugauuacaauuacaaacugccugaugauuuuacaggaugugugauugcuuggaauucuaauaauuuagauucuaaagugggaggaaauuacaauuaucuguacagacuguuuagaaaaucaaaucugaaaccuuuugaaagagauauuucaacagaaauuuaucaggcuggaucaacaccuuguaauggaguggaaggauuuaauuguuauuuuccauuacagagcuauggauuucagccaaccaauggugugggauaucagccauauagagugguggugcugucuuuugaacugcugcaugcaccugcaacaguguguggaccuaaaggcucccccggcuccggcuccggaucugguuauauuccugaagcuccaagagaugggcaagcuuacguucguaaagauggcgaauggguauuacuuucuaccuuuuuaggaagcggcagcggaucugaacaguacauuaaauggccuugguacauuuggcuuggauuuauugcaggauuaauugcaauugugauggugacaauuauguuauguuguaugacaucauguuguucuuguuuaaaaggauguuguucuuguggaagcuguuguugaugacucgagcugguacugcaugcacgcaaugcuagcugccccuuucccguccuggguaccccgagucucccccgaccucgggucccagguaugcucccaccuccaccugccccacucaccaccucugcuaguuccagacaccucccaagcacgcagcaaugcagcucaaaacgcuuagccuagccacacccccacgggaaacagcagugauuaaccuuuagcaauaaacgaaaguuuaacuaagcuauacuaaccccaggguuggucaauuucgugccagccacacccuggagcuagcaaaaaaaaaaaaaaaaaaaaaaaaaaaaaagcauaugacuaaaaaaaaaaaaaaaaaaaaaaaaaaaaaaaaaaaaaaaaaaaaaaaaaaaaaaaaaaaaaaaaaaaaaa

SEQ ID NO: 26945 - RNA, 1397 nt, Artificial Sequence
  SARS-CoV-2/Wuhan/WIV05/2019__EPI_ISL_402128 spike protein mRNA gc mod (1-19,327-528,1207-1254) Foldon construct
agauuaaacuaguauucuucugguccccacagacucagagagaacccgccaccauguuuguguuucuugugcugcugccucuugugucuucucagugugugaauuugacagugagauuuccaaauauuacaaaucuguguccauuuggagaaguguuuaaugcaacaagauuugcaucuguguaugcauggaauagaaaaagaauuucuaauuguguggcugauuauucugugcuguauaauagugcuucuuuuuccacauuuaaauguuauggagugucuccaacaaaauuaaaugauuuauguuuuacaaauguguaugcugauucuuuugugaucagaggugaugaagugagacagauugcccccggacagacaggaaaaauugcugauuacaauuacaaacugccugaugauuuuacaggaugugugauugcuuggaauucuaauaauuuagauucuaaagugggaggaaauuacaauuaucuguacagacuguuuagaaaaucaaaucugaaaccuuuugaaagagauauuucaacagaaauuuaucaggcuggaucaacaccuuguaauggaguggaaggauuuaauuguuauuuuccauuacagagcuauggauuucagccaaccaauggugugggauaucagccauauagagugguggugcugucuuuugaacugcugcaugcaccugcaacaguguguggaccuaaaggcucccccggcuccggcuccggaucugguuauauuccugaagcuccaagagaugggcaagcuuacguucguaaagauggcgaauggguauuacuuucuaccuuuuuaggaagcggcagcggaucugaacaguacauuaaauggccuugguacauuuggcuuggauuuauugcaggauuaauugcaauugugauggugacaauuauguuauguuguaugacaucauguuguucuuguuuaaaaggauguuguucuuguggaagcuguuguugaugacucgagcugguacugcaugcacgcaaugcuagcugccccuuucccguccuggguaccccgagucucccccgaccucgggucccagguaugcucccaccuccaccugccccacucaccaccucugcuaguuccagacaccucccaagcacgcagcaaugcagcucaaaacgcuuagccuagccacacccccacgggaaacagcagugauuaaccuuuagcaauaaacgaaaguuuaacuaagcuauacuaaccccaggguuggucaauuucgugccagccacacccuggagcuagcaaaaaaaaaaaaaaaaaaaaaaaaaaaaaagcauaugacuaaaaaaaaaaaaaaaaaaaaaaaaaaaaaaaaaaaaaaaaaaaaaaaaaaaaaaaaaaaaaaaaaaaaaa

SEQ ID NO: 26946 - RNA, 1701 nt, Artificial Sequence
  FLUAV/H3N2/A/Hong Kong/4801/2014__EPI643118 hemagglutinin CDS gc (HA)
augaagaccaucaucgcccugagcuacauccucugccugguguucgcccagaagauccccggcaacgacaacuccaccgcgacgcugugccucgggcaccacgccgucccgaacggcaccaucgugaagaccaucaccaacgaccgcaucgaggugacgaacgccaccgagcugguccagaacagcuccaucggggagaucugcgacagcccccaccagauccuggacggcgagaacugcacccucaucgacgcccugcugggggacccccagugcgacggcuuccagaacaagaagugggaccucuucguggagcgguccaaggccuacagcaacugcuaccccuacgacgugccggacuacgcgucccugcgcagccuggucgccuccagcggcacccucgaguucaacaacgaguccuucaacuggacgggggugacccagaacggcaccagcuccgccugcauccggcgcagcuccagcuccuucuucagccggcugaacuggcugacccaccucaacuacaaguaccccgcccugaacgugacgaugcccaacaacgagcaguucgacaagcuguacaucuggggcguccaccaccccgggaccgacaaggaccagaucuucccguacgcgcaguccagcgggcgcaucaucgugagcaccaagcggucccagcaggccgugauccccaacaucggcagccgcccccggauccgcgacaucccgucccggaucagcaucuacuggaccaucgucaagccgggcgacauccuccugaucaacuccacggggaaccugaucgccccgcgcggcuacuucaagcuccggagcgggaaguccagcaucaugcgcuccgacgcccccaucggcaagugcaagagcgagugcaucacccccaacggcuccaucccgaacgacaagcccuuccagaacgugaaccggaucaccuacggggccugcccccgcuacgugaagcacagcacccugaagcuggcgacgggcaugcggaacguccccgagaagcagacccgcgggaucuucggcgccaucgccggguucaucgagaacggcugggagggcaugguggacgggugguacggcuuccggcaccagaacuccgaggggcgcggccaggccgccgaccucaagagcacccaggcggccaucgaccagaucaacgggaagcugaaccggcugaucggcaagaccaacgagaaguuccaccagaucgagaaggaguucuccgagguggagggccgcauccaggaccucgagaaguacgucgaggacacgaagaucgaccuguggagcuacaacgccgagcugcucguggcccuggagaaccagcacaccaucgaccugaccgacuccgagaugaacaagcuguucgagaagaccaagaagcagcugcgcgagaacgccgaggacauggggaacggcugcuucaagaucuaccacaagugcgacaacgcgugcaucgggagcauccggaacggcacguacgaccacaacguguaccgcgacgaggcccugaacaaccgguuccagaucaagggggucgagcucaaguccggcuacaaggacuggauccuguggaucagcuucgccaucagcugcuuccugcucugcguggcccugcugggcuucaucaugugggccugccagaaggggaacauccgcugcaacaucugcaucuga

SEQ ID NO: 26947 - RNA, 1973 nt, Artificial Sequence
  FLUAV/H3N2/A/Hong Kong/4801/2014__EPI643118 hemagglutinin mRNA gc (HA)
aggagagucccgcagucggcguccagcggcucugcuuguucgugugugugucguugcaggccuuauucaagcuuaccaugaagaccaucaucgcccugagcuacauccucugccugguguucgcccagaagauccccggcaacgacaacuccaccgcgacgcugugccucgggcaccacgccgucccgaacggcaccaucgugaagaccaucaccaacgaccgcaucgaggugacgaacgccaccgagcugguccagaacagcuccaucggggagaucugcgacagcccccaccagauccuggacggcgagaacugcacccucaucgacgcccugcugggggacccccagugcgacggcuuccagaacaagaagugggaccucuucguggagcgguccaaggccuacagcaacugcuaccccuacgacgugccggacuacgcgucccugcgcagccuggucgccuccagcggcacccucgaguucaacaacgaguccuucaacuggacgggggugacccagaacggcaccagcuccgccugcauccggcgcagcuccagcuccuucuucagccggcugaacuggcugacccaccucaacuacaaguaccccgcccugaacgugacgaugcccaacaacgagcaguucgacaagcuguacaucuggggcguccaccaccccgggaccgacaaggaccagaucuucccguacgcgcaguccagcgggcgcaucaucgugagcaccaagcggucccagcaggccgugauccccaacaucggcagccgcccccggauccgcgacaucccgucccggaucagcaucuacuggaccaucgucaagccgggcgacauccuccugaucaacuccacggggaaccugaucgccccgcgcggcuacuucaagcuccggagcgggaaguccagcaucaugcgcuccgacgcccccaucggcaagugcaagagcgagugcaucacccccaacggcuccaucccgaacgacaagcccuuccagaacgugaaccggaucaccuacggggccugcccccgcuacgugaagcacagcacccugaagcuggcgacgggcaugcggaacguccccgagaagcagacccgcgggaucuucggcgccaucgccggguucaucgagaacggcugggagggcaugguggacgggugguacggcuuccggcaccagaacuccgaggggcgcggccaggccgccgaccucaagagcacccaggcggccaucgaccagaucaacgggaagcugaaccggcugaucggcaagaccaacgagaaguuccaccagaucgagaaggaguucuccgagguggagggccgcauccaggaccucgagaaguacgucgaggacacgaagaucgaccuguggagcuacaacgccgagcugcucguggcccuggagaaccagcacaccaucgaccugaccgacuccgagaugaacaagcuguucgagaagaccaagaagcagcugcgcgagaacgccgaggacauggggaacggcugcuucaagaucuaccacaagugcgacaacgcgugcaucgggagcauccggaacggcacguacgaccacaacguguaccgcgacgaggcccugaacaaccgguuccagaucaagggggucgagcucaaguccggcuacaaggacuggauccuguggaucagcuucgccaucagcugcuuccugcucugcguggcccugcugggcuucaucaugugggccugccagaaggggaacauccgcugcaacaucugcaucugaggacuagucccuguucccagagcccacuuuuuuuucuuuuuuugaaauaaaauagccugucuuucagaucucaaaggcucuuuucagagccaccaaaaaaaaaaaaaaaaaaaaaaaaaaaaaaaaaaaaaaaaaaaaaaaaaaaaaaaaaaaaaaaaaaaaaaaaaaaaaaaaaaaaaaaaaaaaaaaaaaaaa

SEQ ID NO: 26948 - RNA, 1918 nt, Artificial Sequence
  FLUAV/H3N2/A/Hong Kong/4801/2014__EPI643118 hemagglutinin mRNA gc (HA)
aggagaaagcuuaccaugaagaccaucaucgcccugagcuacauccucugccugguguucgcccagaagauccccggcaacgacaacuccaccgcgacgcugugccucgggcaccacgccgucccgaacggcaccaucgugaagaccaucaccaacgaccgcaucgaggugacgaacgccaccgagcugguccagaacagcuccaucggggagaucugcgacagcccccaccagauccuggacggcgagaacugcacccucaucgacgcccugcugggggacccccagugcgacggcuuccagaacaagaagugggaccucuucguggagcgguccaaggccuacagcaacugcuaccccuacgacgugccggacuacgcgucccugcgcagccuggucgccuccagcggcacccucgaguucaacaacgaguccuucaacuggacgggggugacccagaacggcaccagcuccgccugcauccggcgcagcuccagcuccuucuucagccggcugaacuggcugacccaccucaacuacaaguaccccgcccugaacgugacgaugcccaacaacgagcaguucgacaagcuguacaucuggggcguccaccaccccgggaccgacaaggaccagaucuucccguacgcgcaguccagcgggcgcaucaucgugagcaccaagcggucccagcaggccgugauccccaacaucggcagccgcccccggauccgcgacaucccgucccggaucagcaucuacuggaccaucgucaagccgggcgacauccuccugaucaacuccacggggaaccugaucgccccgcgcggcuacuucaagcuccggagcgggaaguccagcaucaugcgcuccgacgcccccaucggcaagugcaagagcgagugcaucacccccaacggcuccaucccgaacgacaagcccuuccagaacgugaaccggaucaccuacggggccugcccccgcuacgugaagcacagcacccugaagcuggcgacgggcaugcggaacguccccgagaagcagacccgcgggaucuucggcgccaucgccggguucaucgagaacggcugggagggcaugguggacgggugguacggcuuccggcaccagaacuccgaggggcgcggccaggccgccgaccucaagagcacccaggcggccaucgaccagaucaacgggaagcugaaccggcugaucggcaagaccaacgagaaguuccaccagaucgagaaggaguucuccgagguggagggccgcauccaggaccucgagaaguacgucgaggacacgaagaucgaccuguggagcuacaacgccgagcugcucguggcccuggagaaccagcacaccaucgaccugaccgacuccgagaugaacaagcuguucgagaagaccaagaagcagcugcgcgagaacgccgaggacauggggaacggcugcuucaagaucuaccacaagugcgacaacgcgugcaucgggagcauccggaacggcacguacgaccacaacguguaccgcgacgaggcccugaacaaccgguuccagaucaagggggucgagcucaaguccggcuacaaggacuggauccuguggaucagcuucgccaucagcugcuuccugcucugcguggcccugcugggcuucaucaugugggccugccagaaggggaacauccgcugcaacaucugcaucugaggacuaguuauaagacugacuagcccgaugggccucccaacgggcccuccuccccuccuugcaccgagauuaauaaaaaaaaaaaaaaaaaaaaaaaaaaaaaaaaaaaaaaaaaaaaaaaaaaaaaaaaaaaaaaaaugcaucccccccccccccccccccccccccccccccaaaggcucuuuucagagccaccagaauu

SEQ ID NO: 26949 - RNA, 1967 nt, Artificial Sequence
  FLUAV/H1N1/A/California/7/2009__ACP41953 hemagglutinin mRNA gc (HA) R8849
aggagagucccgcagucggcguccagcggcucugcuuguucgugugugugucguugcaggccuuauucaagcuuaccaugaaggccauccuggugguccuccuguacaccuucgccaccgcgaacgccgacacgcugugcaucggcuaccacgccaacaacagcaccgacaccguggacaccgugcucgagaagaacgucacggugacccacuccgugaaccugcuggaggacaagcacaacgggaagcucugcaagcugcggggcgucgccccgcugcaccucgggaagugcaacaucgccggcuggauccuggggaacccggagugcgagagccuguccaccgcgagcuccuggagcuacaucguggagacccccuccagcgacaacggcacgugcuaccccggcgacuucaucgacuacgaggagcuccgcgagcagcuguccagcguguccagcuucgagcgguucgagaucuuccccaagaccuccagcuggccgaaccacgacuccaacaagggggucaccgccgccugcccccacgccggcgccaagagcuucuacaagaaccugaucuggcucgugaagaaggggaacuccuaccccaagcugagcaaguccuacaucaacgacaagggcaaggaggugcugguccucugggggauccaccaccccagcaccagcgcggaccagcagucccuguaccagaacgccgacgccuacguguucgugggcagcucccgcuacagcaagaaguucaagccggagaucgccauccggcccaagguccgcgaccaggagggccgcaugaacuacuacuggacccugguggagcccggggacaagaucaccuucgaggcgaccggcaaccucguggucccccgguacgccuucgccauggagcgcaacgccggguccggcaucaucaucagcgacacgccggugcacgacugcaacacgaccugccagacccccaagggcgccaucaacaccucccugcccuuccagaacauccaccccaucaccaucgggaagugcccgaaguacgucaagagcaccaagcugcggcucgcgaccggccugcgcaacauccccuccauccagagccgggggcuguucggcgccaucgccggguucaucgagggcggcuggacggggaugguggacggcugguacggguaccaccaccagaacgagcagggcagcggguacgccgccgaccucaaguccacgcagaacgcgaucgacgagaucaccaacaaggugaacagcgucaucgagaagaugaacacccaguucaccgccgugggcaaggaguucaaccaccuggagaagcggaucgagaaccugaacaagaaggucgacgacggcuuccucgacaucuggacguacaacgccgagcugcuggugcuccuggagaacgagcgcacccuggacuaccacgacuccaacgugaagaaccucuacgagaagguccggagccagcugaagaacaacgccaaggagaucgggaacggcugcuucgaguucuaccacaagugcgacaacacgugcauggaguccgugaagaacgggaccuacgacuaccccaaguacagcgaggaggccaagcugaaccgcgaggagaucgacggcgugaagcucgaguccacccggaucuaccagauccuggcgaucuacagcaccgucgccagcucccuggugcucguggucagccugggggccaucuccuucuggaugugcagcaacggcucccugcagugccgcaucugcaucugaggacuagucccuguucccagagcccacuuuuuuuucuuuuuuugaaauaaaauagccugucuuuccaaaggcucuuuucagagccaccaaaaaaaaaaaaaaaaaaaaaaaaaaaaaaaaaaaaaaaaaaaaaaaaaaaaaaaaaaaaaaaaaaaaaaaaaaaaaaaaaaaaaaaaaaaaaaaaaaaaa

SEQ ID NO: 26950 - RNA, 1967 nt, Artificial Sequence
  FLUAV/H3N2/A/Hong Kong/4801/2014__EPI643118 hemagglutinin mRNA gc (HA) R8853
aggagagucccgcagucggcguccagcggcucugcuuguucgugugugugucguugcaggccuuauucaagcuuaccaugaagaccaucaucgcccugagcuacauccucugccugguguucgcccagaagauccccggcaacgacaacuccaccgcgacgcugugccucgggcaccacgccgucccgaacggcaccaucgugaagaccaucaccaacgaccgcaucgaggugacgaacgccaccgagcugguccagaacagcuccaucggggagaucugcgacagcccccaccagauccuggacggcgagaacugcacccucaucgacgcccugcugggggacccccagugcgacggcuuccagaacaagaagugggaccucuucguggagcgguccaaggccuacagcaacugcuaccccuacgacgugccggacuacgcgucccugcgcagccuggucgccuccagcggcacccucgaguucaacaacgaguccuucaacuggacgggggugacccagaacggcaccagcuccgccugcauccggcgcagcuccagcuccuucuucagccggcugaacuggcugacccaccucaacuacaaguaccccgcccugaacgugacgaugcccaacaacgagcaguucgacaagcuguacaucuggggcguccaccaccccgggaccgacaaggaccagaucuucccguacgcgcaguccagcgggcgcaucaucgugagcaccaagcggucccagcaggccgugauccccaacaucggcagccgcccccggauccgcgacaucccgucccggaucagcaucuacuggaccaucgucaagccgggcgacauccuccugaucaacuccacggggaaccugaucgccccgcgcggcuacuucaagcuccggagcgggaaguccagcaucaugcgcuccgacgcccccaucggcaagugcaagagcgagugcaucacccccaacggcuccaucccgaacgacaagcccuuccagaacgugaaccggaucaccuacggggccugcccccgcuacgugaagcacagcacccugaagcuggcgacgggcaugcggaacguccccgagaagcagacccgcgggaucuucggcgccaucgccggguucaucgagaacggcugggagggcaugguggacgggugguacggcuuccggcaccagaacuccgaggggcgcggccaggccgccgaccucaagagcacccaggcggccaucgaccagaucaacgggaagcugaaccggcugaucggcaagaccaacgagaaguuccaccagaucgagaaggaguucuccgagguggagggccgcauccaggaccucgagaaguacgucgaggacacgaagaucgaccuguggagcuacaacgccgagcugcucguggcccuggagaaccagcacaccaucgaccugaccgacuccgagaugaacaagcuguucgagaagaccaagaagcagcugcgcgagaacgccgaggacauggggaacggcugcuucaagaucuaccacaagugcgacaacgcgugcaucgggagcauccggaacggcacguacgaccacaacguguaccgcgacgaggcccugaacaaccgguuccagaucaagggggucgagcucaaguccggcuacaaggacuggauccuguggaucagcuucgccaucagcugcuuccugcucugcguggcccugcugggcuucaucaugugggccugccagaaggggaacauccgcugcaacaucugcaucugaggacuagucccuguucccagagcccacuuuuuuuucuuuuuuugaaauaaaauagccugucuuuccaaaggcucuuuucagagccaccaaaaaaaaaaaaaaaaaaaaaaaaaaaaaaaaaaaaaaaaaaaaaaaaaaaaaaaaaaaaaaaaaaaaaaaaaaaaaaaaaaaaaaaaaaaaaaaaaaaaa

SEQ ID NO: 26951 - RNA, 2024 nt, Artificial Sequence
  FLUBV/H0N0/B/Brisbane/60/2008__FJ766840 hemagglutinin mRNA gc (HA) R8852
aggagagucccgcagucggcguccagcggcucugcuuguucgugugugugucguugcaggccuuauucaagcuuaccaugaaggccaucaucgugcugcucauggucgugaccagcaacgccgaccggaucugcaccggcaucacguccagcaacuccccgcacguggucaagaccgcgacccagggggaggugaacgugaccggcgucaucccgcugacgaccacccccaccaagagccacuucgccaaccugaaagggacggagacccgcggcaagcucugccccaagugccugaacugcaccgaccuggacguggcccucgggcggcccaagugcaccggcaaaaucccguccgcccgcgugagcauccugcacgagguccggcccgugacguccggcugcuuccccaucaugcacgaccgcaccaagauccggcagcugcccaaccuccugcgcggguacgagcacauccggcugagcacccacaacgugaucaacgccgagaacgcgccgggcgggcccuacaagaucggcaccuccgggagcugccccaacaucacgaacggcaacggcuucuucgccaccauggccugggccguccccaagaacgacaagaacaaaaccgcgaccaacccgcucacgaucgaggugcccuacaucugcaccgagggggaggaccagaucaccguguggggcuuccacuccgacaacgagacccagauggccaagcuguacggggacagcaagccccagaaguucacguccagcgccaacggcgucaccacccacuacgugucccagaucggcggguuccccaaccagaccgaggacggcgggcugccgcagagcggccgcaucguggucgacuacauggugcagaaauccgggaagacgggcaccaucaccuaccagcggggcauccuccugccccagaagguguggugcgccagcgggcgcuccaaggucaucaaaggcagccugccccucaucggggaggccgacugccugcacgagaaguacggcgggcugaacaagagcaagcccuacuacaccggcgagcacgcgaaagccaucggcaacugcccgaucugggugaagacgccccucaagcuggccaacgggaccaaguaccggccgcccgccaaacugcucaaggagcgcggcuucuucggggccaucgcgggcuuccuggagggcgggugggagggcaugaucgccggguggcacggcuacaccucccacggggcccacggcguggccgucgccgcggaccucaagagcacccaggaggccaucaacaaaaucacgaagaaccugaacucccugagcgagcuggaggugaagaaccuccagcggcuguccggcgccauggacgagcugcacaacgagauccucgagcuggacgagaaggucgacgaccugcgcgccgacaccaucagcucccagaucgagcucgccgugcugcugagcaacgaggggaucaucaacuccgaggacgagcaccuccuggcgcuggagcggaaacucaagaagaugcugggccccagcgccguggagaucgggaacggcugcuucgagaccaagcacaagugcaaccagaccugccuggaccgcaucgccgccgggaccuucgacgcgggcgaguucucccuccccacguucgacagccugaacaucaccgccgccucccugaacgacgacggccuggacaaccacaccauccuccuguacuacagcaccgccgccuccagccuggcggucacgcucaugaucgccaucuucgugguguacauggucucccgggacaacgugagcugcuccaucugccugugaggacuagucccuguucccagagcccacuuuuuuuucuuuuuuugaaauaaaauagccugucuuuccaaaggcucuuuucagagccaccaaaaaaaaaaaaaaaaaaaaaaaaaaaaaaaaaaaaaaaaaaaaaaaaaaaaaaaaaaaaaaaaaaaaaaaaaaaaaaaaaaaaaaaaaaaaaaaaaaaaa

SEQ ID NO: 26952 - RNA, 2021 nt, Artificial Sequence
  FLUBV/H0N0/B/Phuket/3073/2013__EPI540671 hemagglutinin mRNA gc (HA) R8854
aggagagucccgcagucggcguccagcggcucugcuuguucgugugugugucguugcaggccuuauucaagcuuaccaugaaggccaucaucgugcugcucauggucgugaccagcaacgccgaccgcaucugcaccggcaucacguccagcaacuccccgcacguggucaagaccgcgacccagggggaggugaacgugaccggcgucaucccccugacgaccacccccaccaagagcuacuucgccaaccugaaggggacgcggacccgcggcaaacucugccccgacugccugaacugcaccgaccuggacguggcccucgggcggcccaugugcgugggcaccacgccguccgccaaggccagcauccugcacgagguccgccccgugaccuccggcugcuuccccaucaugcacgaccggaccaagauccgccagcugcccaaccuccugcggggguacgagaagauccgccugagcacccagaacgugaucgacgcggagaaagccccgggcgggcccuaccggcucggcacguccgggagcugccccaacgccaccuccaagaucggcuucuucgccaccauggcgugggccguccccaaggacaacuacaagaacgccaccaacccgcugacgguggaggugcccuacaucugcaccgagggcgaggaccagaucaccgucuggggguuccacagcgacaacaagacccagaugaaaucccuguacggcgacagcaacccccagaaguucacguccagcgccaacggggugaccacccacuacgugucccagaucggcgacuuccccgaccagaccgaggacggcgggcucccgcagagcggccgcaucgucguggacuacaugaugcagaagcccgggaagacgggcaccaucguguaccagcggggcguccugcugccccagaaaguguggugcgccuccgggcgcagcaaggugaucaagggcagccucccccugaucggggaggcggacugccugcacgaggaguacggcgggcucaacaaguccaaaccguacuacaccggcaagcacgccaaggccaucgggaacugccccaucugggucaagaccccgcugaaacuggccaacggcacgaaauaccggcccccggccaagcuccugaaggagcgcggcuucuucggggcgaucgccggcuuccuggagggcgggugggaggggaugaucgccggcuggcacggcuacaccagccacggggcccacggcguggccgucgcggccgaccucaaguccacccaggaggccaucaacaaaaucaccaagaaccugaacagccuguccgagcucgaggugaagaaccugcagcggcugagcggggccauggacgagcuccacaacgagauccuggagcuggacgagaagguggacgaccuccgcgccgacacgaucuccagccagaucgagcuggcgguccugcucuccaacgagggcaucaucaacagcgaggacgagcaccuccuggcccucgagcggaaacugaagaagaugcugggccccuccgccguggacaucgggaacggcugcuucgagaccaagcacaagugcaaccagaccugccucgaccgcaucgccgcggggaccuucaacgccggcgaguucagccugcccaccuucgacucccugaacaucacggccgccagccugaacgacgacgggcucgacaaccacaccauccugcuguacuacuccaccgccgcgagcucccucgccgugacccugaugcuggccaucuucaucgucuacauggugagccgggacaacguguccugcagcaucugccucugaggacuagucccuguucccagagcccacuuuuuuuucuuuuuuugaaauaaaauagccugucuuuccaaaggcucuuuucagagccaccaaaaaaaaaaaaaaaaaaaaaaaaaaaaaaaaaaaaaaaaaaaaaaaaaaaaaaaaaaaaaaaaaaaaaaaaaaaaaaaaaaaaaaaaaaaaaaaaaaaaa

SEQ ID NO: 26953 - RNA, 1676 nt, Artificial Sequence
  FLUAV/H1N1/A/California/7/2009__GQ906802 neuraminidase mRNA gc (NA) R8858
aggagagucccgcagucggcguccagcggcucugcuuguucgugugugugucguugcaggccuuauucaagcuuaccaugaaccccaaccagaagaucaucaccaucggcuccgugugcaugaccaucgggauggccaaccugauccuccagaucggcaacaucaucuccaucuggaucucccacuccauccagcuggggaaccagaaccagaucgagacgugcaaccaguccgucaucaccuacgagaacaacaccugggugaaccagaccuacgugaacaucuccaacacgaacuucgccgcgggccaguccgucguguccgugaagcuggccgggaacagcucccucugcccggucuccggcugggccaucuacuccaaggacaacuccgugcggaucggcuccaagggggacgucuucgugauccgcgagccguucaucuccugcuccccccuggagugccggaccuucuuccugacccagggcgcccuccugaacgacaagcacuccaacgggaccaucaaggaccgcucccccuaccggacgcugauguccugcccgaucggcgaggugcccucccccuacaacucccgcuucgaguccgucgccugguccgcguccgccugccacgacgggaucaacuggcucaccaucggcaucuccggccccgacaacggggccguggccgugcugaaguacaacggcaucaucaccgacaccaucaaguccuggcggaacaacauccugcgcacgcaggaguccgagugcgcgugcgucaacggguccugcuucaccgugaugaccgacggcccguccaacggccaggccuccuacaagaucuuccggaucgagaaggggaagaucgugaaguccgucgagaugaacgcccccaacuaccacuacgaggagugcuccugcuaccccgacuccuccgagaucaccugcgugugccgcgacaacuggcacggcuccaaccggcccuggguguccuucaaccagaaccucgaguaccagaucggguacaucugcuccggcaucuucggggacaacccgcgccccaacgacaagacgggcuccugcggccccgucuccagcaacggggccaacggcgugaagggguucuccuucaaguacggcaacgggguguggaucggccggaccaaguccaucuccucccgcaacggcuucgagaugaucugggaccccaacggguggaccggcaccgacaacaacuucuccaucaagcaggacaucgucgggaucaacgagugguccggcuacuccggguccuucgugcagcacccggagcugacgggccuggacugcauccggcccugcuucuggguggagcucauccgcggccggcccaaggagaacaccaucuggaccuccggguccuccaucuccuucugcggcgucaacuccgacaccguggggugguccuggcccgacggcgccgagcugccguucacgaucgacaagugaggacuagucccuguucccagagcccacuuuuuuuucuuuuuuugaaauaaaauagccugucuuuccaaaggcucuuuucagagccaccaaaaaaaaaaaaaaaaaaaaaaaaaaaaaaaaaaaaaaaaaaaaaaaaaaaaaaaaaaaaaaaaaaaaaaaaaaaaaaaaaaaaaaaaaaaaaaaaaaaaa

SEQ ID NO: 26954 - RNA, 1676 nt, Artificial Sequence
  FLUAV/H3N2/A/Hong Kong/4801/2014__EPI578429 neuraminidase mRNA gc (NA) R8856
aggagagucccgcagucggcguccagcggcucugcuuguucgugugugugucguugcaggccuuauucaagcuuaccaugaaccccaaccagaagaucaucaccaucggcuccgugucccugaccaucuccacgaucugcuucuucaugcagaucgccauccucaucaccaccgucacccugcacuucaagcaguacgaguucaacuccccgcccaacaaccaggugaugcugugcgagcccacgaucaucgagcgcaacaucaccgagaucguguaccucaccaacaccacgaucgagaaggagaucugccccaagccggccgaguaccggaacugguccaagccccagugcgggaucaccggcuucgcgcccuucuccaaggacaacuccauccgccuguccgccgggggcgacaucugggucacccgggagcccuacguguccugcgacccggacaagugcuaccaguucgcccuggggcagggcaccacgcucaacaacgugcacuccaacaacaccguccgcgaccggacccccuaccgcacccugcugaugaacgagcucggcgugcccuuccaccuggggacgaagcaggucugcaucgccugguccuccagcuccugccacgacggcaaggccuggcugcacgucugcaucaccggggacgacaagaacgcgaccgccuccuucaucuacaacggccggcucguggacuccguggucagcugguccaaggacauccugcgcacccaggaguccgagugcaucugcaucaacgggacgugcaccguggugaugaccgacggcuccgccuccggcaaggccgacaccaagauccuguucaucgaggaggggaagaucguccacacguccacccucuccggcuccgcgcagcacguggaggagugcuccugcuacccccgguacccgggggugcgcugcgucugccgggacaacuggaagggcuccaaccgcccgaucguggacaucaacaucaaggaccacuccaucgugagcuccuacgucugcuccggccuggugggggacaccccgcggaagaacgacuccagcuccagcucccacugccuggaccccaacaacgaggagggcgggcacggcgugaaggggugggccuucgacgacggcaacgacgucuggaugggccgcaccaucaacgagacgucccggcucggguacgagaccuucaaggugaucgagggcugguccaacccgaaguccaagcugcagaccaaccgccaggucaucguggaccggggcgaccgcuccggguacuccgggaucuucuccguggagggcaaguccugcaucaaccggugcuucuacgucgagcugauccgcggccggaaggaggagaccgaggugcucuggacgagcaacuccaucguggucuucugcgggaccagcggcaccuacgggaccggcuccuggcccgacggggccgaccugaaccugaugcccaucugaggacuagucccuguucccagagcccacuuuuuuuucuuuuuuugaaauaaaauagccugucuuuccaaaggcucuuuucagagccaccaaaaaaaaaaaaaaaaaaaaaaaaaaaaaaaaaaaaaaaaaaaaaaaaaaaaaaaaaaaaaaaaaaaaaaaaaaaaaaaaaaaaaaaaaaaaaaaaaaaaa

SEQ ID NO: 26955 - RNA, 1667 nt, Artificial Sequence
  FLUBV/H0N0/B/Brisbane/60/2008__EPI173278 neuraminidase mRNA gc (NA) R8860
aggagagucccgcagucggcguccagcggcucugcuuguucgugugugugucguugcaggccuuauucaagcuuaccaugcugcccagcaccauccagacccucacgcuguuccugaccuccggcggggugcuccugagccuguacgucuccgccagccucuccuaccugcuguacagcgacauccuccugaaguucuccccgaccgagaucaccgcccccacgaugccccuggacugcgcgaacgccagcaacgugcaggccgugaaccgcuccgccaccaagggcgucacccuccugcugcccgagccggaguggaccuacccccggcucagcugccccggguccacguuccagaaggcccugcugaucagcccccaccgcuucggcgagaccaaggggaacuccgcgccgcucaucauccgggagcccuucaucgccugcggccccaacgagugcaagcacuucgcccugacccacuacgccgcgcagcccggcggguacuacaacggcacccgcggggaccggaacaagcugcgccaccucaucagcgugaagcugggcaagaucccgacgguggagaacuccaucuuccacauggccgccuggagcggguccgccugccacgacggcaaggaguggaccuacaucggcgucgacgggcccgacaacaacgcccugcucaaggugaaguacggcgaggcguacaccgacaccuaccacagcuacgccaacaagauccugcggacgcaggaguccgccugcaacugcaucgggggcaacugcuaccugaugaucaccgacggcagcgccagcgggguguccgagugccgcuuccucaagauccgggagggccgcaucaucaaggagaucuuccccaccgggcgggucaagcacaccgaggagugcacgugcggcuucgccagcaacaagaccaucgagugcgcgugccgcgacaacuccuacaccgccaagcggcccuucgugaagcugaacguggagaccgacacggccgagauccgccugaugugcaccgacaccuaccucgacaccccgcggcccaacgacgggagcaucacgggccccugcgaguccaacggcgacaaggggagcggcgggaucaagggcggguucguccaccagcgcauggaguccaagaucggccggugguacagccgcaccauguccaagaccgagcggaugggcauggggcuguacgugaaguacgacggcgaccccugggccgacagcgacgcccuggcguucuccggggugauggucagcaugaaggagccgggcugguacuccuucggguucgagaucaaggacaagaagugcgacgugcccugcaucggcaucgagauggugcacgacggcgggaaggagaccuggcacagcgccgccacggccaucuacugccucaugggcuccgggcagcugcugugggacaccgucaccggcguggacauggcccucugaggacuagucccuguucccagagcccacuuuuuuuucuuuuuuugaaauaaaauagccugucuuuccaaaggcucuuuucagagccaccaaaaaaaaaaaaaaaaaaaaaaaaaaaaaaaaaaaaaaaaaaaaaaaaaaaaaaaaaaaaaaaaaaaaaaaaaaaaaaaaaaaaaaaaaaaaaaaaaaaaa

SEQ ID NO: 26956 - protein, 539 aa, Artificial Sequence
  HPIV3/USA/629-D01959/2007__AGW51052.1 fusion glycoprotein (F0)
MLISILSIITTMIMASHCQIDITKLQHVGVLVNSPKGMKISQNFETRYLILSLIPKIEDSNSCGDQQIKQYKRLLDRLIIPLYDGLKLQKDVIVTNQESNENTDPRTERFFGGVIGTIALGVATSAQITAAVALVEAKQAKSDIEKLKEAIRDTNKAVQSVQSSVGNLIVAIKSVQDYVNKEIVPSIARLGCEAAGLQLGIALTQHYSELTNIFGDNIGSLQEKGIKLQGIASLYRTNITEIFTTSTVDKYDIYDLLFTESIKVRVIDVDLNDYSITLQVRLPLLTRLLNTQIYKVDSISYNIQNREWYIPLPSHIMTKGAFLGGADVKECIEAFSSYICPSDPGFVLNHEMESCLSGNISQCPRTTVTSDIVPRYAFVNGGVVANCITTTCTCNGIGNRINQPPDQGVKIITHKECNTIGINGMLFNTNKEGTLAFYTPDDITLNNSVALDPIDISIELNKAKSDLEESKEWIRRSNQKLDSIGSWHQSSTTIIIILIMMIILFIINITIITIAIKYYRIQKRNRVDQNDKPYVLTNK

SEQ ID NO: 26957 - protein, 539 aa, Artificial Sequence
  HPIV3/USA/629-D01959/2007__AGW51052.1 fusion glycoprotein (variant)
MLISILSIITTMIMASHCQIDITKLQHVGVLVNSPKGMKISQNFETRYLILSLIPKIEDSNSCGDQQIKQYKRLLDRLIIPLYDGLKLQKDVIVTNQESNENTDPRTERFFGGVIGTIALGVATSAQITAAVALVEAKQAKSDIEKLKEAIRDTNKAVQSVCSSVGNCIVAIKSVQDYVNKEIVPSIARLGCEAAGLQLGIALTQHYSELTNCFGDNIGSLQEKGIKLQCIASLYRTNITEIFTTSTVDKYDIYDLLFTESIKVRVIDVDLNDYSITLQVRLPLLTRLLNTQIYKVDSISYNIQNREWYIPLPSHIMTKGAFLGGADVKECIEAFSSYICPSDPGFVLNHEMESCLSGNISQCPRTTVTSDIVPRYAFVNGGVVANCITTTCTCNGIGNRINQPPDQGVKIITHKECNTIGINGMLFNTNKEGTLAFYTPDDITLNNSVALDPIDISIELNKVKSDLEESKEWYRRSNQKLDSIGSWHQSSTTIIIILIMMIILFIINITIITIAIKYYRIQKRNRVDQNDKPYVLTNK

SEQ ID NO: 26958 - RNA, 1620 nt, Artificial Sequence
  HPIV3/USA/629-D01959/2007__AGW51052.1 fusion glycoprotein CDS gc (F0)
augcugaucagcauccucuccaucaucaccaccaugaucauggccagccacugccagaucgacaucaccaagcugcagcacgugggcguccucgugaacagccccaaggggaugaagaucucccagaacuucgagacccgcuaccugauccugagccucaucccgaagaucgaggacuccaacagcugcggcgaccagcagaucaagcaguacaagcggcugcuggaccgccucaucaucccccuguacgacgggcugaagcuccagaaggacgugaucgucacgaaccaggaguccaacgagaacaccgacccccggaccgagcgcuucuucggcggggugaucggcaccaucgcccugggcguggccacgagcgcgcagaucaccgccgccgucgcccugguggaggccaagcaggcgaaguccgacaucgagaagcucaaggaggccauccgggacaccaacaaggccgugcagagcguccaguccagcguggggaaccugaucguggccaucaaguccguccaggacuacgugaacaaggagaucgugcccagcaucgcgcgccugggcugcgaggccgccgggcuccagcugggcaucgcccugacccagcacuacuccgagcucacgaacaucuucggggacaacaucggcagccugcaggagaagggcaucaagcugcaggggaucgccucccucuaccggaccaacaucaccgagaucuucaccacgagcaccgucgacaaguacgacaucuacgaccugcuguucaccgaguccaucaaggugcgcgugaucgacgucgaccucaacgacuacagcaucacccuccaggugcggcugccgcugcugacgcgccugcucaacacccagaucuacaagguggacuccaucagcuacaacauccagaaccgggagugguacaucccccugcccagccacaucaugaccaagggcgcguuccuggggggcgccgacgucaaggagugcaucgaggccuucuccagcuacaucugccccuccgacccgggcuucgugcucaaccacgagauggagagcugccuguccgggaacaucagccagugcccccgcaccacggugaccuccgacaucgucccccgguacgccuucgugaacggcggggucguggccaacugcaucaccaccacgugcacgugcaacggcaucgggaaccgcaucaaccagcccccggaccagggcgugaagaucaucacccacaaggagugcaacaccaucggcaucaacgggaugcuguucaacaccaacaaggagggcacccucgcguucuacacccccgacgacaucacccugaacaacagcgucgcccuggaccccaucgacaucuccaucgagcucaacaaggccaagagcgaccuggaggaguccaaggaguggauccggcgcagcaaccagaagcuggacuccaucgggagcuggcaccaguccagcacgaccaucaucaucauccucaucaugaugaucauccuguucaucaucaacaucaccaucaucaccaucgccaucaaguacuaccggauccagaagcgcaaccggguggaccagaacgacaagcccuacgugcugacgaacaaguga

SEQ ID NO: 26959 - RNA, 1620 nt, Artificial Sequence
  HPIV3/USA/629-D01959/2007__AGW51052.1 fusion glycoprotein CDS gc (variant)
augcugaucagcauccucuccaucaucaccaccaugaucauggccagccacugccagaucgacaucaccaagcugcagcacgugggcguccucgugaacagccccaaggggaugaagaucucccagaacuucgagacccgcuaccugauccugagccucaucccgaagaucgaggacuccaacagcugcggcgaccagcagaucaagcaguacaagcggcugcuggaccgccucaucaucccccuguacgacgggcugaagcuccagaaggacgugaucgucacgaaccaggaguccaacgagaacaccgacccccggaccgagcgcuucuucggcggggugaucggcaccaucgcccugggcguggccacgagcgcgcagaucaccgccgccgucgcccugguggaggccaagcaggcgaaguccgacaucgagaagcucaaggaggccauccgggacaccaacaaggccgugcagagcgucugcuccagcguggggaacugcaucguggccaucaaguccguccaggacuacgugaacaaggagaucgugcccagcaucgcgcgccugggcugcgaggccgccgggcuccagcugggcaucgcccugacccagcacuacuccgagcucacgaacugcuucggggacaacaucggcagccugcaggagaagggcaucaagcugcagugcaucgccucccucuaccggaccaacaucaccgagaucuucaccacgagcaccgucgacaaguacgacaucuacgaccugcuguucaccgaguccaucaaggugcgcgugaucgacgucgaccucaacgacuacagcaucacccuccaggugcggcugccgcugcugacgcgccugcucaacacccagaucuacaagguggacuccaucagcuacaacauccagaaccgggagugguacaucccccugcccagccacaucaugaccaagggcgcguuccuggggggcgccgacgucaaggagugcaucgaggccuucuccagcuacaucugccccuccgacccgggcuucgugcucaaccacgagauggagagcugccuguccgggaacaucagccagugcccccgcaccacggugaccuccgacaucgucccccgguacgccuucgugaacggcggggucguggccaacugcaucaccaccacgugcacgugcaacggcaucgggaaccgcaucaaccagcccccggaccagggcgugaagaucaucacccacaaggagugcaacaccaucggcaucaacgggaugcuguucaacaccaacaaggagggcacccucgcguucuacacccccgacgacaucacccugaacaacagcgucgcccuggaccccaucgacaucuccaucgagcucaacaaggucaagagcgaccuggaggaguccaaggagugguaccggcgcagcaaccagaagcuggacuccaucgggagcuggcaccaguccagcacgaccaucaucaucauccucaucaugaugaucauccuguucaucaucaacaucaccaucaucaccaucgccaucaaguacuaccggauccagaagcgcaaccggguggaccagaacgacaagcccuacgugcugacgaacaaguga

SEQ ID NO: 26960 - RNA, 1617 nt, Artificial Sequence
  HPIV3/Homo sapiens/PER/FLA4571/2008__AHX22069.1 fusion glycoprotein CDS gc (F0)
augcccaucagcauccugcugaucaucaccacaaugaucauggccagccacugccagaucgacaucaccaagcugcagcacgugggcgugcucgugaacagccccaagggcaugaagaucagccagaacuucgagacacgcuaccugauccugagccugauccccaagaucgaggacagcaacagcugcggcgaccagcagaucaagcaguacaagcggcugcuggacagacugaucaucccccuguacgacggccugcggcugcagaaagacgugaucgugaccaaccaggaaagcaacgagaacaccgacccccggaccgagagauucuucggcggcgugaucggcacaaucgcccugggaguggccacaagcgcccagauuacagccgcuguggcccugguggaagccaagcaggccagaagcgacaucgagaagcugaaagaggccauccgggacaccaacaaggccgugcagagcgugcaguccagcgugggcaaucugaucguggccaucaaguccgugcaggacuacgugaacaaagaaaucgugcccucuaucgcccggcugggcugugaagcugccggacugcagcugggcauugcccugacacagcacuacagcgagcugaccaacaucuucggcgacaacaucggcagccugcaggaaaagggcauuaagcugcagggaaucgccagccuguaccgcaccaacaucaccgagaucuucaccaccagcaccguggauaaguacgacaucuacgaccugcuguucaccgagagcaucaaagugcgcgugaucgacguggaccugaacgacuacagcaucacccugcaagugcggcugccccugcugaccagacugcugaacacccagaucuacaagguggacagcaucuccuacaacauccagaaccgcgagugguacaucccucugcccagccacauuaugaccaagggcgccuuucugggcggagccgacgugaaagagugcaucgaggccuucagcagcuacaucugccccagcgacccuggcuucgugcugaaccacgagauggaaagcugccugagcggcaacaucagccagugccccagaaccaccgugaccuccgacaucgugcccagauacgccuucgugaauggcggcgugguggccaacugcaucaccaccaccuguaccugcaacggcaucggcaaccggaucaaccagccucccgaucagggcgugaagauuaucacccacaaagaguguaacaccaucggcaucaacggcaugcuguucaauaccaacaaagagggcacccuggccuucuacacccccgacgauaucacccugaacaacuccguggcucuggaccccaucgacaucuccaucgagcugaacaaggccaagagcgaccuggaagaguccaaagaguggauccggcggagcaaccagaagcuggacucuaucggcagcuggcaccagagcagcaccaccaucaucgugauccugauuaugaugauuauccuguucaucaucaacauuaccaucaucacuaucgccauuaaguacuaccggauccagaaacggaaccggguggaccagaaugacaagcccuacgugcugacaaacaag

SEQ ID NO: 26961 - RNA, 1892 nt, Artificial Sequence
  HPIV3/USA/629-D01959/2007__AGW51052.1 fusion glycoprotein mRNA gc (F0) R10330
aggagagucccgcagucggcguccagcggcucugcuuguucgugugugugucguugcaggccuuauucaagcuuaccaugcugaucagcauccucuccaucaucaccaccaugaucauggccagccacugccagaucgacaucaccaagcugcagcacgugggcguccucgugaacagccccaaggggaugaagaucucccagaacuucgagacccgcuaccugauccugagccucaucccgaagaucgaggacuccaacagcugcggcgaccagcagaucaagcaguacaagcggcugcuggaccgccucaucaucccccuguacgacgggcugaagcuccagaaggacgugaucgucacgaaccaggaguccaacgagaacaccgacccccggaccgagcgcuucuucggcggggugaucggcaccaucgcccugggcguggccacgagcgcgcagaucaccgccgccgucgcccugguggaggccaagcaggcgaaguccgacaucgagaagcucaaggaggccauccgggacaccaacaaggccgugcagagcguccaguccagcguggggaaccugaucguggccaucaaguccguccaggacuacgugaacaaggagaucgugcccagcaucgcgcgccugggcugcgaggccgccgggcuccagcugggcaucgcccugacccagcacuacuccgagcucacgaacaucuucggggacaacaucggcagccugcaggagaagggcaucaagcugcaggggaucgccucccucuaccggaccaacaucaccgagaucuucaccacgagcaccgucgacaaguacgacaucuacgaccugcuguucaccgaguccaucaaggugcgcgugaucgacgucgaccucaacgacuacagcaucacccuccaggugcggcugccgcugcugacgcgccugcucaacacccagaucuacaagguggacuccaucagcuacaacauccagaaccgggagugguacaucccccugcccagccacaucaugaccaagggcgcguuccuggggggcgccgacgucaaggagugcaucgaggccuucuccagcuacaucugccccuccgacccgggcuucgugcucaaccacgagauggagagcugccuguccgggaacaucagccagugcccccgcaccacggugaccuccgacaucgucccccgguacgccuucgugaacggcggggucguggccaacugcaucaccaccacgugcacgugcaacggcaucgggaaccgcaucaaccagcccccggaccagggcgugaagaucaucacccacaaggagugcaacaccaucggcaucaacgggaugcuguucaacaccaacaaggagggcacccucgcguucuacacccccgacgacaucacccugaacaacagcgucgcccuggaccccaucgacaucuccaucgagcucaacaaggccaagagcgaccuggaggaguccaaggaguggauccggcgcagcaaccagaagcuggacuccaucgggagcuggcaccaguccagcacgaccaucaucaucauccucaucaugaugaucauccuguucaucaucaacaucaccaucaucaccaucgccaucaaguacuaccggauccagaagcgcaaccggguggaccagaacgacaagcccuacgugcugacgaacaagugaggacuagucccuguucccagagcccacuuuuuuuucuuuuuuugaaauaaaauagccugucuuucagaucucaaaggcucuuuucagagccaccaaaaaaaaaaaaaaaaaaaaaaaaaaaaaaaaaaaaaaaaaaaaaaaaaaaaaaaaaaaaaaaaaaaaaaaaaaaaaaaaaaaaaaaaaaaaaaaaaaaaa

SEQ ID NO: 26962 - RNA, 1892 nt, Artificial Sequence
  HPIV3/USA/629-D01959/2007__AGW51052.1 fusion glycoprotein mRNA gc (variant) R10331
aggagagucccgcagucggcguccagcggcucugcuuguucgugugugugucguugcaggccuuauucaagcuuaccaugcugaucagcauccucuccaucaucaccaccaugaucauggccagccacugccagaucgacaucaccaagcugcagcacgugggcguccucgugaacagccccaaggggaugaagaucucccagaacuucgagacccgcuaccugauccugagccucaucccgaagaucgaggacuccaacagcugcggcgaccagcagaucaagcaguacaagcggcugcuggaccgccucaucaucccccuguacgacgggcugaagcuccagaaggacgugaucgucacgaaccaggaguccaacgagaacaccgacccccggaccgagcgcuucuucggcggggugaucggcaccaucgcccugggcguggccacgagcgcgcagaucaccgccgccgucgcccugguggaggccaagcaggcgaaguccgacaucgagaagcucaaggaggccauccgggacaccaacaaggccgugcagagcgucugcuccagcguggggaacugcaucguggccaucaaguccguccaggacuacgugaacaaggagaucgugcccagcaucgcgcgccugggcugcgaggccgccgggcuccagcugggcaucgcccugacccagcacuacuccgagcucacgaacugcuucggggacaacaucggcagccugcaggagaagggcaucaagcugcagugcaucgccucccucuaccggaccaacaucaccgagaucuucaccacgagcaccgucgacaaguacgacaucuacgaccugcuguucaccgaguccaucaaggugcgcgugaucgacgucgaccucaacgacuacagcaucacccuccaggugcggcugccgcugcugacgcgccugcucaacacccagaucuacaagguggacuccaucagcuacaacauccagaaccgggagugguacaucccccugcccagccacaucaugaccaagggcgcguuccuggggggcgccgacgucaaggagugcaucgaggccuucuccagcuacaucugccccuccgacccgggcuucgugcucaaccacgagauggagagcugccuguccgggaacaucagccagugcccccgcaccacggugaccuccgacaucgucccccgguacgccuucgugaacggcggggucguggccaacugcaucaccaccacgugcacgugcaacggcaucgggaaccgcaucaaccagcccccggaccagggcgugaagaucaucacccacaaggagugcaacaccaucggcaucaacgggaugcuguucaacaccaacaaggagggcacccucgcguucuacacccccgacgacaucacccugaacaacagcgucgcccuggaccccaucgacaucuccaucgagcucaacaaggucaagagcgaccuggaggaguccaaggagugguaccggcgcagcaaccagaagcuggacuccaucgggagcuggcaccaguccagcacgaccaucaucaucauccucaucaugaugaucauccuguucaucaucaacaucaccaucaucaccaucgccaucaaguacuaccggauccagaagcgcaaccggguggaccagaacgacaagcccuacgugcugacgaacaagugaggacuagucccuguucccagagcccacuuuuuuuucuuuuuuugaaauaaaauagccugucuuucagaucucaaaggcucuuuucagagccaccaaaaaaaaaaaaaaaaaaaaaaaaaaaaaaaaaaaaaaaaaaaaaaaaaaaaaaaaaaaaaaaaaaaaaaaaaaaaaaaaaaaaaaaaaaaaaaaaaaaaa

SEQ ID NO: 26963 - RNA, 1837 nt, Artificial Sequence
  HPIV3/USA/629-D01959/2007__AGW51052.1 fusion glycoprotein mRNA gc (F0)
aggagaaagcuuaccaugcugaucagcauccucuccaucaucaccaccaugaucauggccagccacugccagaucgacaucaccaagcugcagcacgugggcguccucgugaacagccccaaggggaugaagaucucccagaacuucgagacccgcuaccugauccugagccucaucccgaagaucgaggacuccaacagcugcggcgaccagcagaucaagcaguacaagcggcugcuggaccgccucaucaucccccuguacgacgggcugaagcuccagaaggacgugaucgucacgaaccaggaguccaacgagaacaccgacccccggaccgagcgcuucuucggcggggugaucggcaccaucgcccugggcguggccacgagcgcgcagaucaccgccgccgucgcccugguggaggccaagcaggcgaaguccgacaucgagaagcucaaggaggccauccgggacaccaacaaggccgugcagagcguccaguccagcguggggaaccugaucguggccaucaaguccguccaggacuacgugaacaaggagaucgugcccagcaucgcgcgccugggcugcgaggccgccgggcuccagcugggcaucgcccugacccagcacuacuccgagcucacgaacaucuucggggacaacaucggcagccugcaggagaagggcaucaagcugcaggggaucgccucccucuaccggaccaacaucaccgagaucuucaccacgagcaccgucgacaaguacgacaucuacgaccugcuguucaccgaguccaucaaggugcgcgugaucgacgucgaccucaacgacuacagcaucacccuccaggugcggcugccgcugcugacgcgccugcucaacacccagaucuacaagguggacuccaucagcuacaacauccagaaccgggagugguacaucccccugcccagccacaucaugaccaagggcgcguuccuggggggcgccgacgucaaggagugcaucgaggccuucuccagcuacaucugccccuccgacccgggcuucgugcucaaccacgagauggagagcugccuguccgggaacaucagccagugcccccgcaccacggugaccuccgacaucgucccccgguacgccuucgugaacggcggggucguggccaacugcaucaccaccacgugcacgugcaacggcaucgggaaccgcaucaaccagcccccggaccagggcgugaagaucaucacccacaaggagugcaacaccaucggcaucaacgggaugcuguucaacaccaacaaggagggcacccucgcguucuacacccccgacgacaucacccugaacaacagcgucgcccuggaccccaucgacaucuccaucgagcucaacaaggccaagagcgaccuggaggaguccaaggaguggauccggcgcagcaaccagaagcuggacuccaucgggagcuggcaccaguccagcacgaccaucaucaucauccucaucaugaugaucauccuguucaucaucaacaucaccaucaucaccaucgccaucaaguacuaccggauccagaagcgcaaccggguggaccagaacgacaagcccuacgugcugacgaacaagugaggacuaguuauaagacugacuagcccgaugggccucccaacgggcccuccuccccuccuugcaccgagauuaauaaaaaaaaaaaaaaaaaaaaaaaaaaaaaaaaaaaaaaaaaaaaaaaaaaaaaaaaaaaaaaaaugcaucccccccccccccccccccccccccccccccaaaggcucuuuucagagccaccagaauu

SEQ ID NO: 26964 - RNA, 1837 nt, Artificial Sequence
  HPIV3/USA/629-D01959/2007__AGW51052.1 fusion glycoprotein mRNA gc (variant)
aggagaaagcuuaccaugcugaucagcauccucuccaucaucaccaccaugaucauggccagccacugccagaucgacaucaccaagcugcagcacgugggcguccucgugaacagccccaaggggaugaagaucucccagaacuucgagacccgcuaccugauccugagccucaucccgaagaucgaggacuccaacagcugcggcgaccagcagaucaagcaguacaagcggcugcuggaccgccucaucaucccccuguacgacgggcugaagcuccagaaggacgugaucgucacgaaccaggaguccaacgagaacaccgacccccggaccgagcgcuucuucggcggggugaucggcaccaucgcccugggcguggccacgagcgcgcagaucaccgccgccgucgcccugguggaggccaagcaggcgaaguccgacaucgagaagcucaaggaggccauccgggacaccaacaaggccgugcagagcgucugcuccagcguggggaacugcaucguggccaucaaguccguccaggacuacgugaacaaggagaucgugcccagcaucgcgcgccugggcugcgaggccgccgggcuccagcugggcaucgcccugacccagcacuacuccgagcucacgaacugcuucggggacaacaucggcagccugcaggagaagggcaucaagcugcagugcaucgccucccucuaccggaccaacaucaccgagaucuucaccacgagcaccgucgacaaguacgacaucuacgaccugcuguucaccgaguccaucaaggugcgcgugaucgacgucgaccucaacgacuacagcaucacccuccaggugcggcugccgcugcugacgcgccugcucaacacccagaucuacaagguggacuccaucagcuacaacauccagaaccgggagugguacaucccccugcccagccacaucaugaccaagggcgcguuccuggggggcgccgacgucaaggagugcaucgaggccuucuccagcuacaucugccccuccgacccgggcuucgugcucaaccacgagauggagagcugccuguccgggaacaucagccagugcccccgcaccacggugaccuccgacaucgucccccgguacgccuucgugaacggcggggucguggccaacugcaucaccaccacgugcacgugcaacggcaucgggaaccgcaucaaccagcccccggaccagggcgugaagaucaucacccacaaggagugcaacaccaucggcaucaacgggaugcuguucaacaccaacaaggagggcacccucgcguucuacacccccgacgacaucacccugaacaacagcgucgcccuggaccccaucgacaucuccaucgagcucaacaaggucaagagcgaccuggaggaguccaaggagugguaccggcgcagcaaccagaagcuggacuccaucgggagcuggcaccaguccagcacgaccaucaucaucauccucaucaugaugaucauccuguucaucaucaacaucaccaucaucaccaucgccaucaaguacuaccggauccagaagcgcaaccggguggaccagaacgacaagcccuacgugcugacgaacaagugaggacuaguuauaagacugacuagcccgaugggccucccaacgggcccuccuccccuccuugcaccgagauuaauaaaaaaaaaaaaaaaaaaaaaaaaaaaaaaaaaaaaaaaaaaaaaaaaaaaaaaaaaaaaaaaaugcaucccccccccccccccccccccccccccccccaaaggcucuuuucagagccaccagaauu

SEQ ID NO: 26965 - RNA, 1783 nt, Artificial Sequence
  HPIV3/Homo sapiens/PER/FLA4571/2008__AHX22069.1 fusion glycoprotein mRNA gc (F0)
gggaaauaagagagaaaagaagaguaagaagaaauauaagagccaccaugcccaucagcauccugcugaucaucaccacaaugaucauggccagccacugccagaucgacaucaccaagcugcagcacgugggcgugcucgugaacagccccaagggcaugaagaucagccagaacuucgagacacgcuaccugauccugagccugauccccaagaucgaggacagcaacagcugcggcgaccagcagaucaagcaguacaagcggcugcuggacagacugaucaucccccuguacgacggccugcggcugcagaaagacgugaucgugaccaaccaggaaagcaacgagaacaccgacccccggaccgagagauucuucggcggcgugaucggcacaaucgcccugggaguggccacaagcgcccagauuacagccgcuguggcccugguggaagccaagcaggccagaagcgacaucgagaagcugaaagaggccauccgggacaccaacaaggccgugcagagcgugcaguccagcgugggcaaucugaucguggccaucaaguccgugcaggacuacgugaacaaagaaaucgugcccucuaucgcccggcugggcugugaagcugccggacugcagcugggcauugcccugacacagcacuacagcgagcugaccaacaucuucggcgacaacaucggcagccugcaggaaaagggcauuaagcugcagggaaucgccagccuguaccgcaccaacaucaccgagaucuucaccaccagcaccguggauaaguacgacaucuacgaccugcuguucaccgagagcaucaaagugcgcgugaucgacguggaccugaacgacuacagcaucacccugcaagugcggcugccccugcugaccagacugcugaacacccagaucuacaagguggacagcaucuccuacaacauccagaaccgcgagugguacaucccucugcccagccacauuaugaccaagggcgccuuucugggcggagccgacgugaaagagugcaucgaggccuucagcagcuacaucugccccagcgacccuggcuucgugcugaaccacgagauggaaagcugccugagcggcaacaucagccagugccccagaaccaccgugaccuccgacaucgugcccagauacgccuucgugaauggcggcgugguggccaacugcaucaccaccaccuguaccugcaacggcaucggcaaccggaucaaccagccucccgaucagggcgugaagauuaucacccacaaagaguguaacaccaucggcaucaacggcaugcuguucaauaccaacaaagagggcacccuggccuucuacacccccgacgauaucacccugaacaacuccguggcucuggaccccaucgacaucuccaucgagcugaacaaggccaagagcgaccuggaagaguccaaagaguggauccggcggagcaaccagaagcuggacucuaucggcagcuggcaccagagcagcaccaccaucaucgugauccugauuaugaugauuauccuguucaucaucaacauuaccaucaucacuaucgccauuaaguacuaccggauccagaaacggaaccggguggaccagaaugacaagcccuacgugcugacaaacaagugauaauaggcuggagccucgguggccaugcuucuugccccuugggccuccccccagccccuccuccccuuccugcacccguacccccguggucuuugaauaaagucugagugggcggc

SEQ ID NO: 26966 - protein, 539 aa, Artificial Sequence; identical to SEQ ID NO: 14648
  HMPV/NL/1/99__AAQ90145.1 fusion glycoprotein (F0)

SEQ ID NO: 26967 - protein, 539 aa, Artificial Sequence
  HMPV/NL/1/99__AAQ90145.1 fusion glycoprotein (variant)
MSWKVMIIISLLITPQHGLKESYLEESCSTITEGYLSVLRTGWYTNVFTLEVGDVENLTCTDGPSLIKTELDLTKSALRELKTVSADQLAREEQIENPRRRRFVLGAIALGVATAAAVTAGIAIAKTIRLESEVNAIKGALKQTNEAVSTLGNGVRVLATAVRELKEFVSKNLTSAINRNKCDIADLKMAVSFSQFNRRFLNVVRQFSDNAGITPAISLDLMTDAELARAVSYMPTSAGQIKLMLENRAMVRRKGFGILIGVYGSSVIYMVQLPIFGVIDTPCWIIKAAPSCSEKNGNYACLLREDQGWYCKNAGSTVYYPNEKDCETRGDHVFCDTAAGINVAEQSRECNINISTTNYPCKVSTGRHPISMVALSPLGALVACYKGVSCSIGSNWVGIIKQLPKGCSYITNQDADTVTIDNTVYQLSKVEGEQHVIKGRPVSSSFDPIKFPEDQFNVALDQVFESIENSQALVDQSNKILNSAEKGNTGFIIVVILVAVLGLTMISVSIIIIIKKTRKPTGAPPELNGVTNGGFIPHS

SEQ ID NO: 26968 - protein, 539 aa, Artificial Sequence
  HMPV/NL/1/99__AAQ90145.1 fusion glycoprotein (variant)
MSWKVMIIISLLITPQHGLKESYLEESCSTITEGYLSVLRTGWYTNVFTLEVGDVENLTCTDGPSLIKTELDLTKSALRELKTVSADQLAREEQIENPRRRRFVLGAIALGVATAAAVTAGIAIAKTIRLESEVNAIKGALKQTNEAVSTLGNGVRVLATAVRELKEFVSKNLTSAINRNKCDIPDLKMAVSFSQFNRRFLNVVRQFSDNAGITPAISLDLMTDAELARAVSYMPTSAGQIKLMLENRAMVRRKGFGILIGVYGSSVIYMVQLPIFGVIDTPCWIIKAAPSCSEKNGNYACLLREDQGWYCKNAGSTVYYPNEKDCETRGDHVFCDTAAGINVAEQSRECNINISTTNYPCKVSTGRHPISMVALSPLGALVACYKGVSCSIGSNWVGIIKQLPKGCSYITNQDADTVTIDNTVYQLSKVEGEQHVIKGRPVSSSFDPIKFPEDQFNVALDQVFESIENSQALVDQSNKILNSAEKGNTGFIIVVILVAVLGLTMISVSIIIIIKKTRKPTGAPPELNGVTNGGFIPHS

SEQ ID NO: 26969 - protein, 539 aa, Artificial Sequence
  HMPV/00-1__AAK62968.2 fusion glycoprotein (F0)
MSWKVVIIFSLLITPQHGLKESYLEESCSTITEGYLSVLRTGWYTNVFTLEVGDVENLTCADGPSLIKTELDLTKSALRELRTVSADQLAREEQIENPRQSRFVLGAIALGVATAAAVTAGVAIAKTIRLESEVTAIKNALKKTNEAVSTLGNGVRVLATAVRELKDFVSKNLTRAINKNKCDIADLKMAVSFSQFNRRFLNVVRQFSDNAGITPAISLDLMTDAELARAVSNMPTSAGQIKLMLENRAMVRRKGFGFLIGVYGSSVIYMVQLPIFGVIDTPCWIVKAAPSCSGKKGNYACLLREDQGWYCQNAGSTVYYPNEKDCETRGDHVFCDTAAGINVAEQSKECNINISTTNYPCKVSTGRHPISMVALSPLGALVACYKGVSCSIGSNRVGIIKQLNKGCSYITNQDADTVTIDNTVYQLSKVEGEQHVIKGRPVSSSFDPVKFPEDQFNVALDQVFESIENSQALVDQSNRILSSAEKGNTGFIIVIILIAVLGSTMILVSVFIIIKKTKKPTGAPPELSGVTNNGFIPHN

SEQ ID NO: 26970 - protein, 539 aa, Artificial Sequence
  HMPV/00-1__AAK62968.2 fusion glycoprotein (variant)
MSWKVVIIFSLLITPQHGLKESYLEESCSTITEGYLSVLRTGWYTNVFTLEVGDVENLTCADGPSLIKTELDLTKSALRELRTVSADQLAREEQIENPRRRRFVLGAIALGVATAAAVTAGVAIAKTIRLESEVTAIKNALKKTNEAVSTLGNGVRVLATAVRELKDFVSKNLTRAINKNKCDIADLKMAVSFSQFNRRFLNVVRQFSDNAGITPAISLDLMTDAELARAVSNMPTSAGQIKLMLENRAMVRRKGFGFLIGVYGSSVIYMVQLPIFGVIDTPCWIVKAAPSCSEKKGNYACLLREDQGWYCQNAGSTVYYPNEKDCETRGDHVFCDTAAGINVAEQSKECNINISTTNYPCKVSTGRHPISMVALSPLGALVACYKGVSCSIGSNRVGIIKQLNKGCSYITNQDADTVTIDNTVYQLSKVEGEQHVIKGRPVSSSFDPVKFPEDQFNVALDQVFESIENSQALVDQSNRILSSAEKGNTGFIIVIILIAVLGSTMILVSVFIIIKKTKKPTGAPPELSGVTNNGFIPHN

SEQ ID NO: 26971 - protein, 539 aa, Artificial Sequence
  HMPV/00-1__AAK62968.2 fusion glycoprotein (variant)
MSWKVVIIFSLLITPQHGLKESYLEESCSTITEGYLSVLRTGWYTNVFTLEVGDVENLTCADGPSLIKTELDLTKSALRELRTVSADQLAREEQIENPRRRRFVLGAIALGVATAAAVTAGVAIAKTIRLESEVTAIKNALKKTNEAVSTLGNGVRVLATAVRELKDFVSKNLTRAINKNKCDIPDLKMAVSFSQFNRRFLNVVRQFSDNAGITPAISLDLMTDAELARAVSNMPTSAGQIKLMLENRAMVRRKGFGFLIGVYGSSVIYMVQLPIFGVIDTPCWIVKAAPSCSEKKGNYACLLREDQGWYCQNAGSTVYYPNEKDCETRGDHVFCDTAAGINVAEQSKECNINISTTNYPCKVSTGRHPISMVALSPLGALVACYKGVSCSIGSNRVGIIKQLNKGCSYITNQDADTVTIDNTVYQLSKVEGEQHVIKGRPVSSSFDPVKFPEDQFNVALDQVFESIENSQALVDQSNRILSSAEKGNTGFIIVIILIAVLGSTMILVSVFIIIKKTKKPTGAPPELSGVTNNGFIPHN

SEQ ID NO: 26972 - RNA, 1620 nt, Artificial Sequence
  HMPV/NL/1/99__AAQ90145.1 fusion glycoprotein CDS gc (F0)
augagcuggaaggugaugaucaucaucucccugcucaucaccccccagcacggccugaaggagagcuaccucgaggaguccugcagcaccaucaccgagggcuaccuguccgugcugcgcacggggugguacaccaacgucuucacccucgaggugggcgacguggagaaccugaccugcacggacgggcccagccugaucaagaccgagcucgaccugaccaaguccgcccugcgggagcucaagaccgucagcgccgaccagcuggcgcgcgaggagcagaucgagaacccgcggcagucccgcuucgugcugggcgccaucgcccucgggguggccacggccgcggccgucaccgccggcaucgccaucgcgaagaccauccggcuggagagcgaggugaacgccaucaagggcgcccugaagcagaccaacgaggccguguccacgcucgggaacggcguccgcgugcuggccaccgcggugcgggagcugaaggaguucgucagcaagaaccucaccuccgccaucaaccgcaacaagugcgacaucgccgaccugaagauggccgugagcuucucccaguucaaccggcgcuuccugaacgugguccggcaguucagcgacaacgccgggaucacccccgcgaucucccucgaccugaugacggacgccgagcuggcccgcgccgugagcuacaugcccaccuccgccggccagaucaagcucaugcuggagaaccgggcgauggugcgccggaagggguucggcauccugaucggcgucuacgggagcuccgugaucuacauggugcagcuccccaucuucggcgucaucgacaccccgugcuggaucaucaaggccgcccccagcugcagcgagaagaacgggaacuacgccugccugcugcgcgaggaccagggcugguacugcaagaacgccggcuccaccguguacuaccccaacgagaaggacugcgagacgcggggggaccacguguucugcgacaccgcggccggcaucaacgucgccgagcagagccgcgagugcaacaucaacaucuccaccaccaacuaccccugcaaggugagcacggggcggcacccgaucuccauggucgcccucagcccccugggcgcgcugguggccugcuacaaggggguguccugcagcaucggcuccaacugggucggcaucaucaagcagcuccccaaggggugcagcuacaucaccaaccaggacgccgacaccgugaccaucgacaacacgguguaccagcuguccaaggucgagggcgagcagcacgugaucaaggggcgccccgugagcuccagcuucgacccgaucaaguuccccgaggaccaguucaacgucgcccuggaccagguguucgaguccaucgagaacagccaggcccucguggaccaguccaacaagauccugaacagcgcggagaagggcaacaccggguucaucaucgucgugauccugguggccguccucggccugaccaugaucuccgugagcaucaucaucaucaucaagaagacccggaagcccacgggcgcccccccggagcugaacggggugaccaacggcggguucaucccccacagcuga

SEQ ID NO: 26973 - RNA, 1620 nt, Artificial Sequence
  HMPV/NL/1/99__AAQ90145.1 fusion glycoprotein CDS gc (variant)
augagcuggaaggugaugaucaucaucucccugcucaucaccccccagcacggccugaaggagagcuaccucgaggaguccugcagcaccaucaccgagggcuaccuguccgugcugcgcacggggugguacaccaacgucuucacccucgaggugggcgacguggagaaccugaccugcacggacgggcccagccugaucaagaccgagcucgaccugaccaaguccgcccugcgggagcucaagaccgucagcgccgaccagcuggcgcgcgaggagcagaucgagaacccgcggcggcgccgcuucgugcugggcgccaucgcccucgggguggccacggccgcggccgucaccgccggcaucgccaucgcgaagaccauccggcuggagagcgaggugaacgccaucaagggcgcccugaagcagaccaacgaggccguguccacgcucgggaacggcguccgcgugcuggccaccgcggugcgggagcugaaggaguucgucagcaagaaccucaccuccgccaucaaccgcaacaagugcgacaucgccgaccugaagauggccgugagcuucucccaguucaaccggcgcuuccugaacgugguccggcaguucagcgacaacgccgggaucacccccgcgaucucccucgaccugaugacggacgccgagcuggcccgcgccgugagcuacaugcccaccuccgccggccagaucaagcucaugcuggagaaccgggcgauggugcgccggaagggguucggcauccugaucggcgucuacgggagcuccgugaucuacauggugcagcuccccaucuucggcgucaucgacaccccgugcuggaucaucaaggccgcccccagcugcagcgagaagaacgggaacuacgccugccugcugcgcgaggaccagggcugguacugcaagaacgccggcuccaccguguacuaccccaacgagaaggacugcgagacgcggggggaccacguguucugcgacaccgcggccggcaucaacgucgccgagcagagccgcgagugcaacaucaacaucuccaccaccaacuaccccugcaaggugagcacggggcggcacccgaucuccauggucgcccucagcccccugggcgcgcugguggccugcuacaaggggguguccugcagcaucggcuccaacugggucggcaucaucaagcagcuccccaaggggugcagcuacaucaccaaccaggacgccgacaccgugaccaucgacaacacgguguaccagcuguccaaggucgagggcgagcagcacgugaucaaggggcgccccgugagcuccagcuucgacccgaucaaguuccccgaggaccaguucaacgucgcccuggaccagguguucgaguccaucgagaacagccaggcccucguggaccaguccaacaagauccugaacagcgcggagaagggcaacaccggguucaucaucgucgugauccugguggccguccucggccugaccaugaucuccgugagcaucaucaucaucaucaagaagacccggaagcccacgggcgcccccccggagcugaacggggugaccaacggcggguucaucccccacagcuga

SEQ ID NO: 26974 - RNA, 1620 nt, Artificial Sequence
  HMPV/NL/1/99__AAQ90145.1 fusion glycoprotein CDS gc (variant)
augagcuggaaggugaugaucaucaucucccugcucaucaccccccagcacggccugaaggagagcuaccucgaggaguccugcagcaccaucaccgagggcuaccuguccgugcugcgcacggggugguacaccaacgucuucacccucgaggugggcgacguggagaaccugaccugcacggacgggcccagccugaucaagaccgagcucgaccugaccaaguccgcccugcgggagcucaagaccgucagcgccgaccagcuggcgcgcgaggagcagaucgagaacccgcggcggcgccgcuucgugcugggcgccaucgcccucgggguggccacggccgcggccgucaccgccggcaucgccaucgcgaagaccauccggcuggagagcgaggugaacgccaucaagggcgcccugaagcagaccaacgaggccguguccacgcucgggaacggcguccgcgugcuggccaccgcggugcgggagcugaaggaguucgucagcaagaaccucaccuccgccaucaaccgcaacaagugcgacauccccgaccugaagauggccgugagcuucucccaguucaaccggcgcuuccugaacgugguccggcaguucagcgacaacgccgggaucacccccgcgaucucccucgaccugaugacggacgccgagcuggcccgcgccgugagcuacaugcccaccuccgccggccagaucaagcucaugcuggagaaccgggcgauggugcgccggaagggguucggcauccugaucggcgucuacgggagcuccgugaucuacauggugcagcuccccaucuucggcgucaucgacaccccgugcuggaucaucaaggccgcccccagcugcagcgagaagaacgggaacuacgccugccugcugcgcgaggaccagggcugguacugcaagaacgccggcuccaccguguacuaccccaacgagaaggacugcgagacgcggggggaccacguguucugcgacaccgcggccggcaucaacgucgccgagcagagccgcgagugcaacaucaacaucuccaccaccaacuaccccugcaaggugagcacggggcggcacccgaucuccauggucgcccucagcccccugggcgcgcugguggccugcuacaaggggguguccugcagcaucggcuccaacugggucggcaucaucaagcagcuccccaaggggugcagcuacaucaccaaccaggacgccgacaccgugaccaucgacaacacgguguaccagcuguccaaggucgagggcgagcagcacgugaucaaggggcgccccgugagcuccagcuucgacccgaucaaguuccccgaggaccaguucaacgucgcccuggaccagguguucgaguccaucgagaacagccaggcccucguggaccaguccaacaagauccugaacagcgcggagaagggcaacaccggguucaucaucgucgugauccugguggccguccucggccugaccaugaucuccgugagcaucaucaucaucaucaagaagacccggaagcccacgggcgcccccccggagcugaacggggugaccaacggcggguucaucccccacagcuga

SEQ ID NO: 26975 - RNA, 1620 nt, Artificial Sequence
  HMPV/00-1__AAK62968.2 fusion glycoprotein CDS gc (F0)
augagcuggaagguggucaucaucuucucccugcucaucaccccccagcacggccugaaggagagcuaccucgaggaguccugcagcaccaucaccgagggcuaccuguccgugcugcgcacggggugguacaccaacgucuucacccucgaggugggcgacguggagaaccugaccugcgccgacgggcccagccugaucaagacggagcucgaccugaccaaguccgcccugcgggagcuccgcaccgucagcgcggaccagcuggcccgggaggagcagaucgagaacccgcgccagucccgguucgugcugggcgccaucgcccucgggguggccaccgcggccgccgucacggccggcguggcgaucgccaagaccauccgccuggagagcgaggugaccgccaucaagaacgcccugaagaagaccaacgaggccgucuccacgcucggcaacggggugcgggugcuggcgaccgccguccgcgagcugaaggacuucgugagcaagaaccucacccgggccaucaacaagaacaagugcgacaucgccgaccugaagauggccguguccuucagccaguucaaccgccgguuccugaacgucgugcgccaguucuccgacaacgcgggcaucacccccgccaucagccucgaccugaugacggacgccgagcuggcccgggccguguccaacaugcccaccagcgcggggcagaucaagcucaugcuggagaaccgcgccaugguccggcgcaagggcuucggguuccugaucggcguguacggcuccagcgugaucuacaugguccagcuccccaucuucggggugaucgacaccccgugcuggaucgugaaggccgcccccuccugcagcggcaagaaggggaacuacgccugccugcugcgggaggaccagggcugguacugccagaacgcgggcagcaccgucuacuaccccaacgagaaggacugcgagacgcgcggggaccacguguucugcgacaccgccgccggcaucaacgucgccgagcaguccaaggagugcaacaucaacaucagcaccaccaacuaccccugcaagguguccacggggcggcacccgaucagcaugguggcgcucuccccccugggcgcccuggucgccugcuacaagggggugagcugcuccaucggcagcaaccgcgugggcaucaucaagcagcucaacaaggggugcuccuacaucaccaaccaggacgccgacaccgucaccaucgacaacacgguguaccagcugagcaagguggagggcgagcagcacgucaucaaggggcggcccguguccagcuccuucgaccccgugaaguucccggaggaccaguucaacgucgcccuggaccagguguucgagagcaucgagaacucccaggcgcucguggaccagagcaaccgcauccuguccagcgccgagaagggcaacaccggguucaucaucgucaucauccugaucgccgugcucggcuccaccaugauccuggugagcgucuucaucaucaucaagaagaccaagaagcccacgggcgccccccccgagcugagcggggugaccaacaacggcuucaucccgcacaacuga

SEQ ID NO: 26976 - RNA, 1620 nt, Artificial Sequence
  HMPV/00-1__AAK62968.2 fusion glycoprotein CDS gc (variant)
augagcuggaagguggucaucaucuucucccugcucaucaccccccagcacggccugaaggagagcuaccucgaggaguccugcagcaccaucaccgagggcuaccuguccgugcugcgcacggggugguacaccaacgucuucacccucgaggugggcgacguggagaaccugaccugcgccgacgggcccagccugaucaagacggagcucgaccugaccaaguccgcccugcgggagcuccgcaccgucagcgcggaccagcuggcccgggaggagcagaucgagaacccgcgccggcgccgguucgugcugggcgccaucgcccucgggguggccaccgcggccgccgucacggccggcguggcgaucgccaagaccauccgccuggagagcgaggugaccgccaucaagaacgcccugaagaagaccaacgaggccgucuccacgcucggcaacggggugcgggugcuggcgaccgccguccgcgagcugaaggacuucgugagcaagaaccucacccgggccaucaacaagaacaagugcgacaucgccgaccugaagauggccguguccuucagccaguucaaccgccgguuccugaacgucgugcgccaguucuccgacaacgcgggcaucacccccgccaucagccucgaccugaugacggacgccgagcuggcccgggccguguccaacaugcccaccagcgcggggcagaucaagcucaugcuggagaaccgcgccaugguccggcgcaagggcuucggguuccugaucggcguguacggcuccagcgugaucuacaugguccagcuccccaucuucggggugaucgacaccccgugcuggaucgugaaggccgcccccuccugcagcgagaagaaggggaacuacgccugccugcugcgggaggaccagggcugguacugccagaacgcgggcagcaccgucuacuaccccaacgagaaggacugcgagacgcgcggggaccacguguucugcgacaccgccgccggcaucaacgucgccgagcaguccaaggagugcaacaucaacaucagcaccaccaacuaccccugcaagguguccacggggcggcacccgaucagcaugguggcgcucuccccccugggcgcccuggucgccugcuacaagggggugagcugcuccaucggcagcaaccgcgugggcaucaucaagcagcucaacaaggggugcuccuacaucaccaaccaggacgccgacaccgucaccaucgacaacacgguguaccagcugagcaagguggagggcgagcagcacgucaucaaggggcggcccguguccagcuccuucgaccccgugaaguucccggaggaccaguucaacgucgcccuggaccagguguucgagagcaucgagaacucccaggcgcucguggaccagagcaaccgcauccuguccagcgccgagaagggcaacaccggguucaucaucgucaucauccugaucgccgugcucggcuccaccaugauccuggugagcgucuucaucaucaucaagaagaccaagaagcccacgggcgccccccccgagcugagcggggugaccaacaacggcuucaucccgcacaacuga

SEQ ID NO: 26977 - RNA, 1620 nt, Artificial Sequence
  HMPV/00-1__AAK62968.2 fusion glycoprotein CDS gc (variant)
augagcuggaagguggucaucaucuucucccugcucaucaccccccagcacggccugaaggagagcuaccucgaggaguccugcagcaccaucaccgagggcuaccuguccgugcugcgcacggggugguacaccaacgucuucacccucgaggugggcgacguggagaaccugaccugcgccgacgggcccagccugaucaagacggagcucgaccugaccaaguccgcccugcgggagcuccgcaccgucagcgcggaccagcuggcccgggaggagcagaucgagaacccgcgccggcgccgguucgugcugggcgccaucgcccucgggguggccaccgcggccgccgucacggccggcguggcgaucgccaagaccauccgccuggagagcgaggugaccgccaucaagaacgcccugaagaagaccaacgaggccgucuccacgcucggcaacggggugcgggugcuggcgaccgccguccgcgagcugaaggacuucgugagcaagaaccucacccgggccaucaacaagaacaagugcgacauccccgaccugaagauggccguguccuucagccaguucaaccgccgguuccugaacgucgugcgccaguucuccgacaacgcgggcaucacccccgccaucagccucgaccugaugacggacgccgagcuggcccgggccguguccaacaugcccaccagcgcggggcagaucaagcucaugcuggagaaccgcgccaugguccggcgcaagggcuucggguuccugaucggcguguacggcuccagcgugaucuacaugguccagcuccccaucuucggggugaucgacaccccgugcuggaucgugaaggccgcccccuccugcagcgagaagaaggggaacuacgccugccugcugcgggaggaccagggcugguacugccagaacgcgggcagcaccgucuacuaccccaacgagaaggacugcgagacgcgcggggaccacguguucugcgacaccgccgccggcaucaacgucgccgagcaguccaaggagugcaacaucaacaucagcaccaccaacuaccccugcaagguguccacggggcggcacccgaucagcaugguggcgcucuccccccugggcgcccuggucgccugcuacaagggggugagcugcuccaucggcagcaaccgcgugggcaucaucaagcagcucaacaaggggugcuccuacaucaccaaccaggacgccgacaccgucaccaucgacaacacgguguaccagcugagcaagguggagggcgagcagcacgucaucaaggggcggcccguguccagcuccuucgaccccgugaaguucccggaggaccaguucaacgucgcccuggaccagguguucgagagcaucgagaacucccaggcgcucguggaccagagcaaccgcauccuguccagcgccgagaagggcaacaccggguucaucaucgucaucauccugaucgccgugcucggcuccaccaugauccuggugagcgucuucaucaucaucaagaagaccaagaagcccacgggcgccccccccgagcugagcggggugaccaacaacggcuucaucccgcacaacuga

SEQ ID NO: 26978 - RNA, 1620 nt, Artificial Sequence
  HMPV/TN/92-4__ABM67072.1 fusion glycoprotein CDS gc (F0)
augagcuggaagguggugauuaucuucagccugcugauuacaccucaacacggccugaaggagagcuaccuggaagagagcugcuccaccaucaccgagggcuaccugagcgugcugcggaccggcugguacaccaacguguucacccuggaggugggcgacguggagaaccugaccugcagcgacggcccuagccugaucaagaccgagcuggaccugaccaagagcgcucugagagagcugaagaccguguccgccgaccagcuggccagagaggaacagaucgagaacccucggcagagcagauucgugcugggcgccaucgcucugggagucgccgcugccgcugcagugacagcuggaguggccauugcuaagaccaucagacuggaaagcgaggugacagccaucaacaaugcccugaagaagaccaacgaggccgugagcacccugggcaauggagugagagugcuggccacagccgugcgggagcugaaggacuucgugagcaagaaccugaccagagccaucaacaagaacaagugcgacaucgaugaccugaagauggccgugagcuucucccaguucaacagacgguuccugaacguggugagacaguucuccgacaacgcuggaaucacaccugccauuagccuggaccugaugaccgacgccgagcuggcuagagccgugcccaacaugcccaccagcgcuggccagaucaagcugaugcuggagaacagagccauggugcggagaaagggcuucggcauccugauugggguguauggaagcuccgugaucuacauggugcagcugcccaucuucggcgugaucgacacacccugcuggaucgugaaggccgcuccuagcugcuccgagaagaaaggaaacuaugccugucugcugagagaggaccagggcugguacugccagaacgccggaagcacaguguacuaucccaacgagaaggacugcgagaccagaggcgaccacguguucugcgacaccgcugccggaaucaacguggccgagcagagcaaggagugcaacaucaacaucagcacaaccaacuaccccugcaaggugagcaccggacggcaccccaucagcaugguggcucugagcccucugggcgcucugguggccugcuauaagggcguguccuguagcaucggcagcaaucgggugggcaucaucaagcagcugaacaagggaugcuccuacaucaccaaccaggacgccgacaccgugaccaucgacaacaccguguaccagcugagcaagguggagggcgagcagcacgugaucaagggcagacccgugagcuccagcuucgaccccaucaaguucccugaggaccaguucaacguggcccuggaccagguguuugagaacaucgagaacagccaggcccugguggaccagagcaacagaauccuguccagcgcugagaagggcaacaccggcuucaucauugugaucauucugaucgccgugcugggcagcuccaugauccuggugagcaucuucaucauuaucaagaagaccaagaaacccaccggagccccuccugagcugagcggcgugaccaacaauggcuucauuccccacaacuga

SEQ ID NO: 26979 - RNA, 1892 nt, Artificial Sequence
  HMPV/NL/1/99__AAQ90145.1 fusion glycoprotein mRNA gc (F0) R10327
aggagagucccgcagucggcguccagcggcucugcuuguucgugugugugucguugcaggccuuauucaagcuuaccaugagcuggaaggugaugaucaucaucucccugcucaucaccccccagcacggccugaaggagagcuaccucgaggaguccugcagcaccaucaccgagggcuaccuguccgugcugcgcacggggugguacaccaacgucuucacccucgaggugggcgacguggagaaccugaccugcacggacgggcccagccugaucaagaccgagcucgaccugaccaaguccgcccugcgggagcucaagaccgucagcgccgaccagcuggcgcgcgaggagcagaucgagaacccgcggcagucccgcuucgugcugggcgccaucgcccucgggguggccacggccgcggccgucaccgccggcaucgccaucgcgaagaccauccggcuggagagcgaggugaacgccaucaagggcgcccugaagcagaccaacgaggccguguccacgcucgggaacggcguccgcgugcuggccaccgcggugcgggagcugaaggaguucgucagcaagaaccucaccuccgccaucaaccgcaacaagugcgacaucgccgaccugaagauggccgugagcuucucccaguucaaccggcgcuuccugaacgugguccggcaguucagcgacaacgccgggaucacccccgcgaucucccucgaccugaugacggacgccgagcuggcccgcgccgugagcuacaugcccaccuccgccggccagaucaagcucaugcuggagaaccgggcgauggugcgccggaagggguucggcauccugaucggcgucuacgggagcuccgugaucuacauggugcagcuccccaucuucggcgucaucgacaccccgugcuggaucaucaaggccgcccccagcugcagcgagaagaacgggaacuacgccugccugcugcgcgaggaccagggcugguacugcaagaacgccggcuccaccguguacuaccccaacgagaaggacugcgagacgcggggggaccacguguucugcgacaccgcggccggcaucaacgucgccgagcagagccgcgagugcaacaucaacaucuccaccaccaacuaccccugcaaggugagcacggggcggcacccgaucuccauggucgcccucagcccccugggcgcgcugguggccugcuacaaggggguguccugcagcaucggcuccaacugggucggcaucaucaagcagcuccccaaggggugcagcuacaucaccaaccaggacgccgacaccgugaccaucgacaacacgguguaccagcuguccaaggucgagggcgagcagcacgugaucaaggggcgccccgugagcuccagcuucgacccgaucaaguuccccgaggaccaguucaacgucgcccuggaccagguguucgaguccaucgagaacagccaggcccucguggaccaguccaacaagauccugaacagcgcggagaagggcaacaccggguucaucaucgucgugauccugguggccguccucggccugaccaugaucuccgugagcaucaucaucaucaucaagaagacccggaagcccacgggcgcccccccggagcugaacggggugaccaacggcggguucaucccccacagcugaggacuagucccuguucccagagcccacuuuuuuuucuuuuuuugaaauaaaauagccugucuuucagaucucaaaggcucuuuucagagccaccaaaaaaaaaaaaaaaaaaaaaaaaaaaaaaaaaaaaaaaaaaaaaaaaaaaaaaaaaaaaaaaaaaaaaaaaaaaaaaaaaaaaaaaaaaaaaaaaaaaaa

SEQ ID NO: 26980 - RNA, 1892 nt, Artificial Sequence
  HMPV/NL/1/99__AAQ90145.1 fusion glycoprotein mRNA gc (variant) R10328
aggagagucccgcagucggcguccagcggcucugcuuguucgugugugugucguugcaggccuuauucaagcuuaccaugagcuggaaggugaugaucaucaucucccugcucaucaccccccagcacggccugaaggagagcuaccucgaggaguccugcagcaccaucaccgagggcuaccuguccgugcugcgcacggggugguacaccaacgucuucacccucgaggugggcgacguggagaaccugaccugcacggacgggcccagccugaucaagaccgagcucgaccugaccaaguccgcccugcgggagcucaagaccgucagcgccgaccagcuggcgcgcgaggagcagaucgagaacccgcggcggcgccgcuucgugcugggcgccaucgcccucgggguggccacggccgcggccgucaccgccggcaucgccaucgcgaagaccauccggcuggagagcgaggugaacgccaucaagggcgcccugaagcagaccaacgaggccguguccacgcucgggaacggcguccgcgugcuggccaccgcggugcgggagcugaaggaguucgucagcaagaaccucaccuccgccaucaaccgcaacaagugcgacaucgccgaccugaagauggccgugagcuucucccaguucaaccggcgcuuccugaacgugguccggcaguucagcgacaacgccgggaucacccccgcgaucucccucgaccugaugacggacgccgagcuggcccgcgccgugagcuacaugcccaccuccgccggccagaucaagcucaugcuggagaaccgggcgauggugcgccggaagggguucggcauccugaucggcgucuacgggagcuccgugaucuacauggugcagcuccccaucuucggcgucaucgacaccccgugcuggaucaucaaggccgcccccagcugcagcgagaagaacgggaacuacgccugccugcugcgcgaggaccagggcugguacugcaagaacgccggcuccaccguguacuaccccaacgagaaggacugcgagacgcggggggaccacguguucugcgacaccgcggccggcaucaacgucgccgagcagagccgcgagugcaacaucaacaucuccaccaccaacuaccccugcaaggugagcacggggcggcacccgaucuccauggucgcccucagcccccugggcgcgcugguggccugcuacaaggggguguccugcagcaucggcuccaacugggucggcaucaucaagcagcuccccaaggggugcagcuacaucaccaaccaggacgccgacaccgugaccaucgacaacacgguguaccagcuguccaaggucgagggcgagcagcacgugaucaaggggcgccccgugagcuccagcuucgacccgaucaaguuccccgaggaccaguucaacgucgcccuggaccagguguucgaguccaucgagaacagccaggcccucguggaccaguccaacaagauccugaacagcgcggagaagggcaacaccggguucaucaucgucgugauccugguggccguccucggccugaccaugaucuccgugagcaucaucaucaucaucaagaagacccggaagcccacgggcgcccccccggagcugaacggggugaccaacggcggguucaucccccacagcugaggacuagucccuguucccagagcccacuuuuuuuucuuuuuuugaaauaaaauagccugucuuucagaucucaaaggcucuuuucagagccaccaaaaaaaaaaaaaaaaaaaaaaaaaaaaaaaaaaaaaaaaaaaaaaaaaaaaaaaaaaaaaaaaaaaaaaaaaaaaaaaaaaaaaaaaaaaaaaaaaaaaa

SEQ ID NO: 26981 - RNA, 1892 nt, Artificial Sequence
  HMPV/NL/1/99__AAQ90145.1 fusion glycoprotein mRNA gc (variant) R10329
aggagagucccgcagucggcguccagcggcucugcuuguucgugugugugucguugcaggccuuauucaagcuuaccaugagcuggaaggugaugaucaucaucucccugcucaucaccccccagcacggccugaaggagagcuaccucgaggaguccugcagcaccaucaccgagggcuaccuguccgugcugcgcacggggugguacaccaacgucuucacccucgaggugggcgacguggagaaccugaccugcacggacgggcccagccugaucaagaccgagcucgaccugaccaaguccgcccugcgggagcucaagaccgucagcgccgaccagcuggcgcgcgaggagcagaucgagaacccgcggcggcgccgcuucgugcugggcgccaucgcccucgggguggccacggccgcggccgucaccgccggcaucgccaucgcgaagaccauccggcuggagagcgaggugaacgccaucaagggcgcccugaagcagaccaacgaggccguguccacgcucgggaacggcguccgcgugcuggccaccgcggugcgggagcugaaggaguucgucagcaagaaccucaccuccgccaucaaccgcaacaagugcgacauccccgaccugaagauggccgugagcuucucccaguucaaccggcgcuuccugaacgugguccggcaguucagcgacaacgccgggaucacccccgcgaucucccucgaccugaugacggacgccgagcuggcccgcgccgugagcuacaugcccaccuccgccggccagaucaagcucaugcuggagaaccgggcgauggugcgccggaagggguucggcauccugaucggcgucuacgggagcuccgugaucuacauggugcagcuccccaucuucggcgucaucgacaccccgugcuggaucaucaaggccgcccccagcugcagcgagaagaacgggaacuacgccugccugcugcgcgaggaccagggcugguacugcaagaacgccggcuccaccguguacuaccccaacgagaaggacugcgagacgcggggggaccacguguucugcgacaccgcggccggcaucaacgucgccgagcagagccgcgagugcaacaucaacaucuccaccaccaacuaccccugcaaggugagcacggggcggcacccgaucuccauggucgcccucagcccccugggcgcgcugguggccugcuacaaggggguguccugcagcaucggcuccaacugggucggcaucaucaagcagcuccccaaggggugcagcuacaucaccaaccaggacgccgacaccgugaccaucgacaacacgguguaccagcuguccaaggucgagggcgagcagcacgugaucaaggggcgccccgugagcuccagcuucgacccgaucaaguuccccgaggaccaguucaacgucgcccuggaccagguguucgaguccaucgagaacagccaggcccucguggaccaguccaacaagauccugaacagcgcggagaagggcaacaccggguucaucaucgucgugauccugguggccguccucggccugaccaugaucuccgugagcaucaucaucaucaucaagaagacccggaagcccacgggcgcccccccggagcugaacggggugaccaacggcggguucaucccccacagcugaggacuagucccuguucccagagcccacuuuuuuuucuuuuuuugaaauaaaauagccugucuuucagaucucaaaggcucuuuucagagccaccaaaaaaaaaaaaaaaaaaaaaaaaaaaaaaaaaaaaaaaaaaaaaaaaaaaaaaaaaaaaaaaaaaaaaaaaaaaaaaaaaaaaaaaaaaaaaaaaaaaaa

SEQ ID NO: 26982 - RNA, 1892 nt, Artificial Sequence
  HMPV/00-1__AAK62968.2 fusion glycoprotein mRNA gc (F0) R10324
aggagagucccgcagucggcguccagcggcucugcuuguucgugugugugucguugcaggccuuauucaagcuuaccaugagcuggaagguggucaucaucuucucccugcucaucaccccccagcacggccugaaggagagcuaccucgaggaguccugcagcaccaucaccgagggcuaccuguccgugcugcgcacggggugguacaccaacgucuucacccucgaggugggcgacguggagaaccugaccugcgccgacgggcccagccugaucaagacggagcucgaccugaccaaguccgcccugcgggagcuccgcaccgucagcgcggaccagcuggcccgggaggagcagaucgagaacccgcgccagucccgguucgugcugggcgccaucgcccucgggguggccaccgcggccgccgucacggccggcguggcgaucgccaagaccauccgccuggagagcgaggugaccgccaucaagaacgcccugaagaagaccaacgaggccgucuccacgcucggcaacggggugcgggugcuggcgaccgccguccgcgagcugaaggacuucgugagcaagaaccucacccgggccaucaacaagaacaagugcgacaucgccgaccugaagauggccguguccuucagccaguucaaccgccgguuccugaacgucgugcgccaguucuccgacaacgcgggcaucacccccgccaucagccucgaccugaugacggacgccgagcuggcccgggccguguccaacaugcccaccagcgcggggcagaucaagcucaugcuggagaaccgcgccaugguccggcgcaagggcuucggguuccugaucggcguguacggcuccagcgugaucuacaugguccagcuccccaucuucggggugaucgacaccccgugcuggaucgugaaggccgcccccuccugcagcggcaagaaggggaacuacgccugccugcugcgggaggaccagggcugguacugccagaacgcgggcagcaccgucuacuaccccaacgagaaggacugcgagacgcgcggggaccacguguucugcgacaccgccgccggcaucaacgucgccgagcaguccaaggagugcaacaucaacaucagcaccaccaacuaccccugcaagguguccacggggcggcacccgaucagcaugguggcgcucuccccccugggcgcccuggucgccugcuacaagggggugagcugcuccaucggcagcaaccgcgugggcaucaucaagcagcucaacaaggggugcuccuacaucaccaaccaggacgccgacaccgucaccaucgacaacacgguguaccagcugagcaagguggagggcgagcagcacgucaucaaggggcggcccguguccagcuccuucgaccccgugaaguucccggaggaccaguucaacgucgcccuggaccagguguucgagagcaucgagaacucccaggcgcucguggaccagagcaaccgcauccuguccagcgccgagaagggcaacaccggguucaucaucgucaucauccugaucgccgugcucggcuccaccaugauccuggugagcgucuucaucaucaucaagaagaccaagaagcccacgggcgccccccccgagcugagcggggugaccaacaacggcuucaucccgcacaacugaggacuagucccuguucccagagcccacuuuuuuuucuuuuuuugaaauaaaauagccugucuuucagaucucaaaggcucuuuucagagccaccaaaaaaaaaaaaaaaaaaaaaaaaaaaaaaaaaaaaaaaaaaaaaaaaaaaaaaaaaaaaaaaaaaaaaaaaaaaaaaaaaaaaaaaaaaaaaaaaaaaaa

SEQ ID NO: 26983 - RNA, 1892 nt, Artificial Sequence
  HMPV/00-1__AAK62968.2 fusion glycoprotein mRNA gc (variant) R10325
aggagagucccgcagucggcguccagcggcucugcuuguucgugugugugucguugcaggccuuauucaagcuuaccaugagcuggaagguggucaucaucuucucccugcucaucaccccccagcacggccugaaggagagcuaccucgaggaguccugcagcaccaucaccgagggcuaccuguccgugcugcgcacggggugguacaccaacgucuucacccucgaggugggcgacguggagaaccugaccugcgccgacgggcccagccugaucaagacggagcucgaccugaccaaguccgcccugcgggagcuccgcaccgucagcgcggaccagcuggcccgggaggagcagaucgagaacccgcgccggcgccgguucgugcugggcgccaucgcccucgggguggccaccgcggccgccgucacggccggcguggcgaucgccaagaccauccgccuggagagcgaggugaccgccaucaagaacgcccugaagaagaccaacgaggccgucuccacgcucggcaacggggugcgggugcuggcgaccgccguccgcgagcugaaggacuucgugagcaagaaccucacccgggccaucaacaagaacaagugcgacaucgccgaccugaagauggccguguccuucagccaguucaaccgccgguuccugaacgucgugcgccaguucuccgacaacgcgggcaucacccccgccaucagccucgaccugaugacggacgccgagcuggcccgggccguguccaacaugcccaccagcgcggggcagaucaagcucaugcuggagaaccgcgccaugguccggcgcaagggcuucggguuccugaucggcguguacggcuccagcgugaucuacaugguccagcuccccaucuucggggugaucgacaccccgugcuggaucgugaaggccgcccccuccugcagcgagaagaaggggaacuacgccugccugcugcgggaggaccagggcugguacugccagaacgcgggcagcaccgucuacuaccccaacgagaaggacugcgagacgcgcggggaccacguguucugcgacaccgccgccggcaucaacgucgccgagcaguccaaggagugcaacaucaacaucagcaccaccaacuaccccugcaagguguccacggggcggcacccgaucagcaugguggcgcucuccccccugggcgcccuggucgccugcuacaagggggugagcugcuccaucggcagcaaccgcgugggcaucaucaagcagcucaacaaggggugcuccuacaucaccaaccaggacgccgacaccgucaccaucgacaacacgguguaccagcugagcaagguggagggcgagcagcacgucaucaaggggcggcccguguccagcuccuucgaccccgugaaguucccggaggaccaguucaacgucgcccuggaccagguguucgagagcaucgagaacucccaggcgcucguggaccagagcaaccgcauccuguccagcgccgagaagggcaacaccggguucaucaucgucaucauccugaucgccgugcucggcuccaccaugauccuggugagcgucuucaucaucaucaagaagaccaagaagcccacgggcgccccccccgagcugagcggggugaccaacaacggcuucaucccgcacaacugaggacuagucccuguucccagagcccacuuuuuuuucuuuuuuugaaauaaaauagccugucuuucagaucucaaaggcucuuuucagagccaccaaaaaaaaaaaaaaaaaaaaaaaaaaaaaaaaaaaaaaaaaaaaaaaaaaaaaaaaaaaaaaaaaaaaaaaaaaaaaaaaaaaaaaaaaaaaaaaaaaaaa

SEQ ID NO: 26984 - RNA, 1892 nt, Artificial Sequence
  HMPV/00-1__AAK62968.2 fusion glycoprotein mRNA gc (variant) R10326
aggagagucccgcagucggcguccagcggcucugcuuguucgugugugugucguugcaggccuuauucaagcuuaccaugagcuggaagguggucaucaucuucucccugcucaucaccccccagcacggccugaaggagagcuaccucgaggaguccugcagcaccaucaccgagggcuaccuguccgugcugcgcacggggugguacaccaacgucuucacccucgaggugggcgacguggagaaccugaccugcgccgacgggcccagccugaucaagacggagcucgaccugaccaaguccgcccugcgggagcuccgcaccgucagcgcggaccagcuggcccgggaggagcagaucgagaacccgcgccggcgccgguucgugcugggcgccaucgcccucgggguggccaccgcggccgccgucacggccggcguggcgaucgccaagaccauccgccuggagagcgaggugaccgccaucaagaacgcccugaagaagaccaacgaggccgucuccacgcucggcaacggggugcgggugcuggcgaccgccguccgcgagcugaaggacuucgugagcaagaaccucacccgggccaucaacaagaacaagugcgacauccccgaccugaagauggccguguccuucagccaguucaaccgccgguuccugaacgucgugcgccaguucuccgacaacgcgggcaucacccccgccaucagccucgaccugaugacggacgccgagcuggcccgggccguguccaacaugcccaccagcgcggggcagaucaagcucaugcuggagaaccgcgccaugguccggcgcaagggcuucggguuccugaucggcguguacggcuccagcgugaucuacaugguccagcuccccaucuucggggugaucgacaccccgugcuggaucgugaaggccgcccccuccugcagcgagaagaaggggaacuacgccugccugcugcgggaggaccagggcugguacugccagaacgcgggcagcaccgucuacuaccccaacgagaaggacugcgagacgcgcggggaccacguguucugcgacaccgccgccggcaucaacgucgccgagcaguccaaggagugcaacaucaacaucagcaccaccaacuaccccugcaagguguccacggggcggcacccgaucagcaugguggcgcucuccccccugggcgcccuggucgccugcuacaagggggugagcugcuccaucggcagcaaccgcgugggcaucaucaagcagcucaacaaggggugcuccuacaucaccaaccaggacgccgacaccgucaccaucgacaacacgguguaccagcugagcaagguggagggcgagcagcacgucaucaaggggcggcccguguccagcuccuucgaccccgugaaguucccggaggaccaguucaacgucgcccuggaccagguguucgagagcaucgagaacucccaggcgcucguggaccagagcaaccgcauccuguccagcgccgagaagggcaacaccggguucaucaucgucaucauccugaucgccgugcucggcuccaccaugauccuggugagcgucuucaucaucaucaagaagaccaagaagcccacgggcgccccccccgagcugagcggggugaccaacaacggcuucaucccgcacaacugaggacuagucccuguucccagagcccacuuuuuuuucuuuuuuugaaauaaaauagccugucuuucagaucucaaaggcucuuuucagagccaccaaaaaaaaaaaaaaaaaaaaaaaaaaaaaaaaaaaaaaaaaaaaaaaaaaaaaaaaaaaaaaaaaaaaaaaaaaaaaaaaaaaaaaaaaaaaaaaaaaaaa

SEQ ID NO: 26985 - RNA, 1837 nt, Artificial Sequence
  HMPV/NL/1/99__AAQ90145.1 fusion glycoprotein mRNA gc (F0)
aggagaaagcuuaccaugagcuggaaggugaugaucaucaucucccugcucaucaccccccagcacggccugaaggagagcuaccucgaggaguccugcagcaccaucaccgagggcuaccuguccgugcugcgcacggggugguacaccaacgucuucacccucgaggugggcgacguggagaaccugaccugcacggacgggcccagccugaucaagaccgagcucgaccugaccaaguccgcccugcgggagcucaagaccgucagcgccgaccagcuggcgcgcgaggagcagaucgagaacccgcggcagucccgcuucgugcugggcgccaucgcccucgggguggccacggccgcggccgucaccgccggcaucgccaucgcgaagaccauccggcuggagagcgaggugaacgccaucaagggcgcccugaagcagaccaacgaggccguguccacgcucgggaacggcguccgcgugcuggccaccgcggugcgggagcugaaggaguucgucagcaagaaccucaccuccgccaucaaccgcaacaagugcgacaucgccgaccugaagauggccgugagcuucucccaguucaaccggcgcuuccugaacgugguccggcaguucagcgacaacgccgggaucacccccgcgaucucccucgaccugaugacggacgccgagcuggcccgcgccgugagcuacaugcccaccuccgccggccagaucaagcucaugcuggagaaccgggcgauggugcgccggaagggguucggcauccugaucggcgucuacgggagcuccgugaucuacauggugcagcuccccaucuucggcgucaucgacaccccgugcuggaucaucaaggccgcccccagcugcagcgagaagaacgggaacuacgccugccugcugcgcgaggaccagggcugguacugcaagaacgccggcuccaccguguacuaccccaacgagaaggacugcgagacgcggggggaccacguguucugcgacaccgcggccggcaucaacgucgccgagcagagccgcgagugcaacaucaacaucuccaccaccaacuaccccugcaaggugagcacggggcggcacccgaucuccauggucgcccucagcccccugggcgcgcugguggccugcuacaaggggguguccugcagcaucggcuccaacugggucggcaucaucaagcagcuccccaaggggugcagcuacaucaccaaccaggacgccgacaccgugaccaucgacaacacgguguaccagcuguccaaggucgagggcgagcagcacgugaucaaggggcgccccgugagcuccagcuucgacccgaucaaguuccccgaggaccaguucaacgucgcccuggaccagguguucgaguccaucgagaacagccaggcccucguggaccaguccaacaagauccugaacagcgcggagaagggcaacaccggguucaucaucgucgugauccugguggccguccucggccugaccaugaucuccgugagcaucaucaucaucaucaagaagacccggaagcccacgggcgcccccccggagcugaacggggugaccaacggcggguucaucccccacagcugaggacuaguuauaagacugacuagcccgaugggccucccaacgggcccuccuccccuccuugcaccgagauuaauaaaaaaaaaaaaaaaaaaaaaaaaaaaaaaaaaaaaaaaaaaaaaaaaaaaaaaaaaaaaaaaaugcaucccccccccccccccccccccccccccccccaaaggcucuuuucagagccaccagaauu

SEQ ID NO: 26986 - RNA, 1837 nt, Artificial Sequence
  HMPV/NL/1/99__AAQ90145.1 fusion glycoprotein mRNA gc (variant)
aggagaaagcuuaccaugagcuggaaggugaugaucaucaucucccugcucaucaccccccagcacggccugaaggagagcuaccucgaggaguccugcagcaccaucaccgagggcuaccuguccgugcugcgcacggggugguacaccaacgucuucacccucgaggugggcgacguggagaaccugaccugcacggacgggcccagccugaucaagaccgagcucgaccugaccaaguccgcccugcgggagcucaagaccgucagcgccgaccagcuggcgcgcgaggagcagaucgagaacccgcggcggcgccgcuucgugcugggcgccaucgcccucgggguggccacggccgcggccgucaccgccggcaucgccaucgcgaagaccauccggcuggagagcgaggugaacgccaucaagggcgcccugaagcagaccaacgaggccguguccacgcucgggaacggcguccgcgugcuggccaccgcggugcgggagcugaaggaguucgucagcaagaaccucaccuccgccaucaaccgcaacaagugcgacaucgccgaccugaagauggccgugagcuucucccaguucaaccggcgcuuccugaacgugguccggcaguucagcgacaacgccgggaucacccccgcgaucucccucgaccugaugacggacgccgagcuggcccgcgccgugagcuacaugcccaccuccgccggccagaucaagcucaugcuggagaaccgggcgauggugcgccggaagggguucggcauccugaucggcgucuacgggagcuccgugaucuacauggugcagcuccccaucuucggcgucaucgacaccccgugcuggaucaucaaggccgcccccagcugcagcgagaagaacgggaacuacgccugccugcugcgcgaggaccagggcugguacugcaagaacgccggcuccaccguguacuaccccaacgagaaggacugcgagacgcggggggaccacguguucugcgacaccgcggccggcaucaacgucgccgagcagagccgcgagugcaacaucaacaucuccaccaccaacuaccccugcaaggugagcacggggcggcacccgaucuccauggucgcccucagcccccugggcgcgcugguggccugcuacaaggggguguccugcagcaucggcuccaacugggucggcaucaucaagcagcuccccaaggggugcagcuacaucaccaaccaggacgccgacaccgugaccaucgacaacacgguguaccagcuguccaaggucgagggcgagcagcacgugaucaaggggcgccccgugagcuccagcuucgacccgaucaaguuccccgaggaccaguucaacgucgcccuggaccagguguucgaguccaucgagaacagccaggcccucguggaccaguccaacaagauccugaacagcgcggagaagggcaacaccggguucaucaucgucgugauccugguggccguccucggccugaccaugaucuccgugagcaucaucaucaucaucaagaagacccggaagcccacgggcgcccccccggagcugaacggggugaccaacggcggguucaucccccacagcugaggacuaguuauaagacugacuagcccgaugggccucccaacgggcccuccuccccuccuugcaccgagauuaauaaaaaaaaaaaaaaaaaaaaaaaaaaaaaaaaaaaaaaaaaaaaaaaaaaaaaaaaaaaaaaaaugcaucccccccccccccccccccccccccccccccaaaggcucuuuucagagccaccagaauu

SEQ ID NO: 26987 - RNA, 1837 nt, Artificial Sequence
  HMPV/NL/1/99__AAQ90145.1 fusion glycoprotein mRNA gc (variant)
aggagaaagcuuaccaugagcuggaaggugaugaucaucaucucccugcucaucaccccccagcacggccugaaggagagcuaccucgaggaguccugcagcaccaucaccgagggcuaccuguccgugcugcgcacggggugguacaccaacgucuucacccucgaggugggcgacguggagaaccugaccugcacggacgggcccagccugaucaagaccgagcucgaccugaccaaguccgcccugcgggagcucaagaccgucagcgccgaccagcuggcgcgcgaggagcagaucgagaacccgcggcggcgccgcuucgugcugggcgccaucgcccucgggguggccacggccgcggccgucaccgccggcaucgccaucgcgaagaccauccggcuggagagcgaggugaacgccaucaagggcgcccugaagcagaccaacgaggccguguccacgcucgggaacggcguccgcgugcuggccaccgcggugcgggagcugaaggaguucgucagcaagaaccucaccuccgccaucaaccgcaacaagugcgacauccccgaccugaagauggccgugagcuucucccaguucaaccggcgcuuccugaacgugguccggcaguucagcgacaacgccgggaucacccccgcgaucucccucgaccugaugacggacgccgagcuggcccgcgccgugagcuacaugcccaccuccgccggccagaucaagcucaugcuggagaaccgggcgauggugcgccggaagggguucggcauccugaucggcgucuacgggagcuccgugaucuacauggugcagcuccccaucuucggcgucaucgacaccccgugcuggaucaucaaggccgcccccagcugcagcgagaagaacgggaacuacgccugccugcugcgcgaggaccagggcugguacugcaagaacgccggcuccaccguguacuaccccaacgagaaggacugcgagacgcggggggaccacguguucugcgacaccgcggccggcaucaacgucgccgagcagagccgcgagugcaacaucaacaucuccaccaccaacuaccccugcaaggugagcacggggcggcacccgaucuccauggucgcccucagcccccugggcgcgcugguggccugcuacaaggggguguccugcagcaucggcuccaacugggucggcaucaucaagcagcuccccaaggggugcagcuacaucaccaaccaggacgccgacaccgugaccaucgacaacacgguguaccagcuguccaaggucgagggcgagcagcacgugaucaaggggcgccccgugagcuccagcuucgacccgaucaaguuccccgaggaccaguucaacgucgcccuggaccagguguucgaguccaucgagaacagccaggcccucguggaccaguccaacaagauccugaacagcgcggagaagggcaacaccggguucaucaucgucgugauccugguggccguccucggccugaccaugaucuccgugagcaucaucaucaucaucaagaagacccggaagcccacgggcgcccccccggagcugaacggggugaccaacggcggguucaucccccacagcugaggacuaguuauaagacugacuagcccgaugggccucccaacgggcccuccuccccuccuugcaccgagauuaauaaaaaaaaaaaaaaaaaaaaaaaaaaaaaaaaaaaaaaaaaaaaaaaaaaaaaaaaaaaaaaaaugcaucccccccccccccccccccccccccccccccaaaggcucuuuucagagccaccagaauu

SEQ ID NO: 26988 - RNA, 1837 nt, Artificial Sequence
  HMPV/00-1__AAK62968.2 fusion glycoprotein mRNA gc (F0)
aggagaaagcuuaccaugagcuggaagguggucaucaucuucucccugcucaucaccccccagcacggccugaaggagagcuaccucgaggaguccugcagcaccaucaccgagggcuaccuguccgugcugcgcacggggugguacaccaacgucuucacccucgaggugggcgacguggagaaccugaccugcgccgacgggcccagccugaucaagacggagcucgaccugaccaaguccgcccugcgggagcuccgcaccgucagcgcggaccagcuggcccgggaggagcagaucgagaacccgcgccagucccgguucgugcugggcgccaucgcccucgggguggccaccgcggccgccgucacggccggcguggcgaucgccaagaccauccgccuggagagcgaggugaccgccaucaagaacgcccugaagaagaccaacgaggccgucuccacgcucggcaacggggugcgggugcuggcgaccgccguccgcgagcugaaggacuucgugagcaagaaccucacccgggccaucaacaagaacaagugcgacaucgccgaccugaagauggccguguccuucagccaguucaaccgccgguuccugaacgucgugcgccaguucuccgacaacgcgggcaucacccccgccaucagccucgaccugaugacggacgccgagcuggcccgggccguguccaacaugcccaccagcgcggggcagaucaagcucaugcuggagaaccgcgccaugguccggcgcaagggcuucggguuccugaucggcguguacggcuccagcgugaucuacaugguccagcuccccaucuucggggugaucgacaccccgugcuggaucgugaaggccgcccccuccugcagcggcaagaaggggaacuacgccugccugcugcgggaggaccagggcugguacugccagaacgcgggcagcaccgucuacuaccccaacgagaaggacugcgagacgcgcggggaccacguguucugcgacaccgccgccggcaucaacgucgccgagcaguccaaggagugcaacaucaacaucagcaccaccaacuaccccugcaagguguccacggggcggcacccgaucagcaugguggcgcucuccccccugggcgcccuggucgccugcuacaagggggugagcugcuccaucggcagcaaccgcgugggcaucaucaagcagcucaacaaggggugcuccuacaucaccaaccaggacgccgacaccgucaccaucgacaacacgguguaccagcugagcaagguggagggcgagcagcacgucaucaaggggcggcccguguccagcuccuucgaccccgugaaguucccggaggaccaguucaacgucgcccuggaccagguguucgagagcaucgagaacucccaggcgcucguggaccagagcaaccgcauccuguccagcgccgagaagggcaacaccggguucaucaucgucaucauccugaucgccgugcucggcuccaccaugauccuggugagcgucuucaucaucaucaagaagaccaagaagcccacgggcgccccccccgagcugagcggggugaccaacaacggcuucaucccgcacaacugaggacuaguuauaagacugacuagcccgaugggccucccaacgggcccuccuccccuccuugcaccgagauuaauaaaaaaaaaaaaaaaaaaaaaaaaaaaaaaaaaaaaaaaaaaaaaaaaaaaaaaaaaaaaaaaaugcaucccccccccccccccccccccccccccccccaaaggcucuuuucagagccaccagaauu

SEQ ID NO: 26989 - RNA, 1837 nt, Artificial Sequence
  HMPV/00-1__AAK62968.2 fusion glycoprotein mRNA gc (variant)
aggagaaagcuuaccaugagcuggaagguggucaucaucuucucccugcucaucaccccccagcacggccugaaggagagcuaccucgaggaguccugcagcaccaucaccgagggcuaccuguccgugcugcgcacggggugguacaccaacgucuucacccucgaggugggcgacguggagaaccugaccugcgccgacgggcccagccugaucaagacggagcucgaccugaccaaguccgcccugcgggagcuccgcaccgucagcgcggaccagcuggcccgggaggagcagaucgagaacccgcgccggcgccgguucgugcugggcgccaucgcccucgggguggccaccgcggccgccgucacggccggcguggcgaucgccaagaccauccgccuggagagcgaggugaccgccaucaagaacgcccugaagaagaccaacgaggccgucuccacgcucggcaacggggugcgggugcuggcgaccgccguccgcgagcugaaggacuucgugagcaagaaccucacccgggccaucaacaagaacaagugcgacaucgccgaccugaagauggccguguccuucagccaguucaaccgccgguuccugaacgucgugcgccaguucuccgacaacgcgggcaucacccccgccaucagccucgaccugaugacggacgccgagcuggcccgggccguguccaacaugcccaccagcgcggggcagaucaagcucaugcuggagaaccgcgccaugguccggcgcaagggcuucggguuccugaucggcguguacggcuccagcgugaucuacaugguccagcuccccaucuucggggugaucgacaccccgugcuggaucgugaaggccgcccccuccugcagcgagaagaaggggaacuacgccugccugcugcgggaggaccagggcugguacugccagaacgcgggcagcaccgucuacuaccccaacgagaaggacugcgagacgcgcggggaccacguguucugcgacaccgccgccggcaucaacgucgccgagcaguccaaggagugcaacaucaacaucagcaccaccaacuaccccugcaagguguccacggggcggcacccgaucagcaugguggcgcucuccccccugggcgcccuggucgccugcuacaagggggugagcugcuccaucggcagcaaccgcgugggcaucaucaagcagcucaacaaggggugcuccuacaucaccaaccaggacgccgacaccgucaccaucgacaacacgguguaccagcugagcaagguggagggcgagcagcacgucaucaaggggcggcccguguccagcuccuucgaccccgugaaguucccggaggaccaguucaacgucgcccuggaccagguguucgagagcaucgagaacucccaggcgcucguggaccagagcaaccgcauccuguccagcgccgagaagggcaacaccggguucaucaucgucaucauccugaucgccgugcucggcuccaccaugauccuggugagcgucuucaucaucaucaagaagaccaagaagcccacgggcgccccccccgagcugagcggggugaccaacaacggcuucaucccgcacaacugaggacuaguuauaagacugacuagcccgaugggccucccaacgggcccuccuccccuccuugcaccgagauuaauaaaaaaaaaaaaaaaaaaaaaaaaaaaaaaaaaaaaaaaaaaaaaaaaaaaaaaaaaaaaaaaaugcaucccccccccccccccccccccccccccccccaaaggcucuuuucagagccaccagaauu

SEQ ID NO: 26990 - RNA, 1837 nt, Artificial Sequence
  HMPV/00-1__AAK62968.2 fusion glycoprotein mRNA gc (variant)
aggagaaagcuuaccaugagcuggaagguggucaucaucuucucccugcucaucaccccccagcacggccugaaggagagcuaccucgaggaguccugcagcaccaucaccgagggcuaccuguccgugcugcgcacggggugguacaccaacgucuucacccucgaggugggcgacguggagaaccugaccugcgccgacgggcccagccugaucaagacggagcucgaccugaccaaguccgcccugcgggagcuccgcaccgucagcgcggaccagcuggcccgggaggagcagaucgagaacccgcgccggcgccgguucgugcugggcgccaucgcccucgggguggccaccgcggccgccgucacggccggcguggcgaucgccaagaccauccgccuggagagcgaggugaccgccaucaagaacgcccugaagaagaccaacgaggccgucuccacgcucggcaacggggugcgggugcuggcgaccgccguccgcgagcugaaggacuucgugagcaagaaccucacccgggccaucaacaagaacaagugcgacauccccgaccugaagauggccguguccuucagccaguucaaccgccgguuccugaacgucgugcgccaguucuccgacaacgcgggcaucacccccgccaucagccucgaccugaugacggacgccgagcuggcccgggccguguccaacaugcccaccagcgcggggcagaucaagcucaugcuggagaaccgcgccaugguccggcgcaagggcuucggguuccugaucggcguguacggcuccagcgugaucuacaugguccagcuccccaucuucggggugaucgacaccccgugcuggaucgugaaggccgcccccuccugcagcgagaagaaggggaacuacgccugccugcugcgggaggaccagggcugguacugccagaacgcgggcagcaccgucuacuaccccaacgagaaggacugcgagacgcgcggggaccacguguucugcgacaccgccgccggcaucaacgucgccgagcaguccaaggagugcaacaucaacaucagcaccaccaacuaccccugcaagguguccacggggcggcacccgaucagcaugguggcgcucuccccccugggcgcccuggucgccugcuacaagggggugagcugcuccaucggcagcaaccgcgugggcaucaucaagcagcucaacaaggggugcuccuacaucaccaaccaggacgccgacaccgucaccaucgacaacacgguguaccagcugagcaagguggagggcgagcagcacgucaucaaggggcggcccguguccagcuccuucgaccccgugaaguucccggaggaccaguucaacgucgcccuggaccagguguucgagagcaucgagaacucccaggcgcucguggaccagagcaaccgcauccuguccagcgccgagaagggcaacaccggguucaucaucgucaucauccugaucgccgugcucggcuccaccaugauccuggugagcgucuucaucaucaucaagaagaccaagaagcccacgggcgccccccccgagcugagcggggugaccaacaacggcuucaucccgcacaacugaggacuaguuauaagacugacuagcccgaugggccucccaacgggcccuccuccccuccuugcaccgagauuaauaaaaaaaaaaaaaaaaaaaaaaaaaaaaaaaaaaaaaaaaaaaaaaaaaaaaaaaaaaaaaaaaugcaucccccccccccccccccccccccccccccccaaaggcucuuuucagagccaccagaauu

SEQ ID NO: 26991 - RNA, 1786 nt, Artificial Sequence
  HMPV/TN/92-4__ABM67072.1 fusion glycoprotein mRNA gc (F0)
gggaaauaagagagaaaagaagaguaagaagaaauauaagagccaccaugagcuggaagguggugauuaucuucagccugcugauuacaccucaacacggccugaaggagagcuaccuggaagagagcugcuccaccaucaccgagggcuaccugagcgugcugcggaccggcugguacaccaacguguucacccuggaggugggcgacguggagaaccugaccugcagcgacggcccuagccugaucaagaccgagcuggaccugaccaagagcgcucugagagagcugaagaccguguccgccgaccagcuggccagagaggaacagaucgagaacccucggcagagcagauucgugcugggcgccaucgcucugggagucgccgcugccgcugcagugacagcuggaguggccauugcuaagaccaucagacuggaaagcgaggugacagccaucaacaaugcccugaagaagaccaacgaggccgugagcacccugggcaauggagugagagugcuggccacagccgugcgggagcugaaggacuucgugagcaagaaccugaccagagccaucaacaagaacaagugcgacaucgaugaccugaagauggccgugagcuucucccaguucaacagacgguuccugaacguggugagacaguucuccgacaacgcuggaaucacaccugccauuagccuggaccugaugaccgacgccgagcuggcuagagccgugcccaacaugcccaccagcgcuggccagaucaagcugaugcuggagaacagagccauggugcggagaaagggcuucggcauccugauugggguguauggaagcuccgugaucuacauggugcagcugcccaucuucggcgugaucgacacacccugcuggaucgugaaggccgcuccuagcugcuccgagaagaaaggaaacuaugccugucugcugagagaggaccagggcugguacugccagaacgccggaagcacaguguacuaucccaacgagaaggacugcgagaccagaggcgaccacguguucugcgacaccgcugccggaaucaacguggccgagcagagcaaggagugcaacaucaacaucagcacaaccaacuaccccugcaaggugagcaccggacggcaccccaucagcaugguggcucugagcccucugggcgcucugguggccugcuauaagggcguguccuguagcaucggcagcaaucgggugggcaucaucaagcagcugaacaagggaugcuccuacaucaccaaccaggacgccgacaccgugaccaucgacaacaccguguaccagcugagcaagguggagggcgagcagcacgugaucaagggcagacccgugagcuccagcuucgaccccaucaaguucccugaggaccaguucaacguggcccuggaccagguguuugagaacaucgagaacagccaggcccugguggaccagagcaacagaauccuguccagcgcugagaagggcaacaccggcuucaucauugugaucauucugaucgccgugcugggcagcuccaugauccuggugagcaucuucaucauuaucaagaagaccaagaaacccaccggagccccuccugagcugagcggcgugaccaacaauggcuucauuccccacaacugaugauaauaggcuggagccucgguggccaugcuucuugccccuugggccuccccccagccccuccuccccuuccugcacccguacccccguggucuuugaauaaagucugagugggcggc

SEQ ID NO: 26992-27907 - skipped (916 entries)

SEQ ID NO: 27908 - protein, 602 aa, Artificial Sequence
  SARS-CoV-2/Wuhan-Hu-1__NC_045512.2/MN908947.2/EPI_ISL_402128__non -structural protein 13 (NSP13)
MAVGACVLCNSQTSLRCGACIRRPFLCCKCCYDHVISTSHKLVLSVNPYVCNAPGCDVTDVTQLYLGGMSYYCKSHKPPISFPLCANGQVFGLYKNTCVGSDNVTDFNAIATCDWTNAGDYILANTCTERLKLFAAETLKATEETFKLSYGIATVREVLSDRELHLSWEVGKPRPPLNRNYVFTGYRVTKNSKVQIGEYTFEKGDYGDAVVYRGTTTYKLNVGDYFVLTSHTVMPLSAPTLVPQEHYVRITGLYPTLNISDEFSSNVANYQKVGMQKYSTLQGPPGTGKSHFAIGLALYYPSARIVYTACSHAAVDALCEKALKYLPIDKCSRIIPARARVECFDKFKVNSTLEQYVFCTVNALPETTADIVVFDEISMATNYDLSVVNARLRAKHYVYIGDPAQLPAPRTLLTKGTLEPEYFNSVCRLMKTIGPDMFLGTCRRCPAEIVDTVSALVYDNKLKAHKDKSAQCFKMFYKGVITHDVSSAINRPQIGVVREFLTRNPAWRKAVFISPYNSQNAVASKILGLPTQTVDSSQGSEYDYVIFTQTTETAHSCNVNRFNVAITRAKVGILCIMSDRDLYDKLQFTSLEIPRRNVATLQ

SEQ ID NO: 27909 - protein, 528 aa, Artificial Sequence
  SARS-CoV-2/Wuhan-Hu-1__NC_045512.2/MN908947.2/EPI_ISL_402128__non -structural protein 14 (NSP14)
MAENVTGLFKDCSKVITGLHPTQAPTHLSVDTKFKTEGLCVDIPGIPKDMTYRRLISMMGFKMNYQVNGYPNMFITREEAIRHVRAWIGFDVEGCHATREAVGTNLPLQLGFSTGVNLVAVPTGYVDTPNNTDFSRVSAKPPPGDQFKHLIPLMYKGLPWNVVRIKIVQMLSDTLKNLSDRVVFVLWAHGFELTSMKYFVKIGPERTCCLCDRRATCFSTASDTYACWHHSIGFDYVYNPFMIDVQQWGFTGNLQSNHDLYCQVHGNAHVASCDAIMTRCLAVHECFVKRVDWTIEYPIIGDELKINAACRKVQHMVVKAALLADKFPVLHDIGNPKAIKCVPQADVEWKFYDAQPCSDKAYKIEELFYSYATHSDKFTDGVCLFWNCNVDRYPANSIVCRFDTRVLSNLNLPGCDGGSLYVNKHAFHTPAFDKSAFVNLKQLPFFYYSDSPCESHGKQVVSDIDYVPLKSATCITRCNLGGAVCRHHANEYRLYLDAYNMMISAGFSLWVYKQFDTYNLWNTFTRLQ

SEQ ID NO: 27910 - protein, 222 aa, Artificial Sequence
  SARS-CoV-2/Wuhan-Hu-1__NC_045512.2/MN908947.2/EPI_ISL_402128__mem brane protein (M) (1-222)(I82T)
MADSNGTITVEELKKLLEQWNLVIGFLFLTWICLLQFAYANRNRFLYIIKLIFLWLLWPVTLACFVLAAVYRINWITGGIATAMACLVGLMWLSYFIASFRLFARTRSMWSFNPETNILLNVPLHGTILTRPLLESELVIGAVILRGHLRIAGHHLGRCDIKDLPKEITVATSRTLSYYKLGASQRVAGDSGFAAYSRYRIGNYKLNTDHSSSSDNIALLVQ

SEQ ID NO: 27911 - protein, 222 aa, Artificial Sequence
  SARS-CoV-2/Wuhan-Hu-1__NC_045512.2/MN908947.2/EPI_ISL_402128__mem brane protein (M) (1-222)(A2S_F28L_V70L)
MSDSNGTITVEELKKLLEQWNLVIGFLLLTWICLLQFAYANRNRFLYIIKLIFLWLLWPVTLACFVLAALYRINWITGGIAIAMACLVGLMWLSYFIASFRLFARTRSMWSFNPETNILLNVPLHGTILTRPLLESELVIGAVILRGHLRIAGHHLGRCDIKDLPKEITVATSRTLSYYKLGASQRVAGDSGFAAYSRYRIGNYKLNTDHSSSSDNIALLVQ

SEQ ID NO: 27912 - protein, 222 aa, Artificial Sequence
  SARS-CoV-2/Wuhan-Hu-1__NC_045512.2/MN908947.2/EPI_ISL_402128__mem brane protein (M) (1-222)(A2T_I201V)
MTDSNGTITVEELKKLLEQWNLVIGFLFLTWICLLQFAYANRNRFLYIIKLIFLWLLWPVTLACFVLAAVYRINWITGGIAIAMACLVGLMWLSYFIASFRLFARTRSMWSFNPETNILLNVPLHGTILTRPLLESELVIGAVILRGHLRIAGHHLGRCDIKDLPKEITVATSRTLSYYKLGASQRVAGDSGFAAYSRYRVGNYKLNTDHSSSSDNIALLVQ

SEQ ID NO: 27913 - protein, 222 aa, Artificial Sequence
  SARS-CoV-2/Wuhan-Hu-1__NC_045512.2/MN908947.2/EPI_ISL_402128__mem brane protein (M) (1-222)(N121K_H125Y_H148Y_H155Y_K162N)
MADSNGTITVEELKKLLEQWNLVIGFLFLTWICLLQFAYANRNRFLYIIKLIFLWLLWPVTLACFVLAAVYRINWITGGIAIAMACLVGLMWLSYFIASFRLFARTRSMWSFNPETNILLKVPLYGTILTRPLLESELVIGAVILRGYLRIAGHYLGRCDINDLPKEITVATSRTLSYYKLGASQRVAGDSGFAAYSRYRIGNYKLNTDHSSSSDNIALLVQ

SEQ ID NO: 27914 - protein, 222 aa, Artificial Sequence
  SARS-CoV-2/Wuhan-Hu-1__NC_045512.2/MN908947.2/EPI_ISL_402128__mem brane protein (M) (1-222)(A63T_H125Y)
MADSNGTITVEELKKLLEQWNLVIGFLFLTWICLLQFAYANRNRFLYIIKLIFLWLLWPVTLTCFVLAAVYRINWITGGIAIAMACLVGLMWLSYFIASFRLFARTRSMWSFNPETNILLNVPLYGTILTRPLLESELVIGAVILRGHLRIAGHHLGRCDIKDLPKEITVATSRTLSYYKLGASQRVAGDSGFAAYSRYRIGNYKLNTDHSSSSDNIALLVQ

SEQ ID NO: 27915 - protein, 222 aa, Artificial Sequence
  SARS-CoV-2/Wuhan-Hu-1__NC_045512.2/MN908947.2/EPI_ISL_402128__mem brane protein (M) (1-222)(A2S_M109I_H125Y)
MSDSNGTITVEELKKLLEQWNLVIGFLFLTWICLLQFAYANRNRFLYIIKLIFLWLLWPVTLACFVLAAVYRINWITGGIAIAMACLVGLMWLSYFIASFRLFARTRSIWSFNPETNILLNVPLYGTILTRPLLESELVIGAVILRGHLRIAGHHLGRCDIKDLPKEITVATSRTLSYYKLGASQRVAGDSGFAAYSRYRIGNYKLNTDHSSSSDNIALLVQ

SEQ ID NO: 27916 - protein, 222 aa, Artificial Sequence
  SARS-CoV-2/Wuhan-Hu-1__NC_045512.2/MN908947.2/EPI_ISL_402128__mem brane protein (M) (1-222)(A2V_M109I_H125Y)
MVDSNGTITVEELKKLLEQWNLVIGFLFLTWICLLQFAYANRNRFLYIIKLIFLWLLWPVTLACFVLAAVYRINWITGGIAIAMACLVGLMWLSYFIASFRLFARTRSIWSFNPETNILLNVPLYGTILTRPLLESELVIGAVILRGHLRIAGHHLGRCDIKDLPKEITVATSRTLSYYKLGASQRVAGDSGFAAYSRYRIGNYKLNTDHSSSSDNIALLVQ

SEQ ID NO: 27917 - protein, 222 aa, Artificial Sequence
  SARS-CoV-2/Wuhan-Hu-1__NC_045512.2/MN908947.2/EPI_ISL_402128__mem brane protein (M) (1-222)(L17F_M109I)
MADSNGTITVEELKKLFEQWNLVIGFLFLTWICLLQFAYANRNRFLYIIKLIFLWLLWPVTLACFVLAAVYRINWITGGIAIAMACLVGLMWLSYFIASFRLFARTRSIWSFNPETNILLNVPLHGTILTRPLLESELVIGAVILRGHLRIAGHHLGRCDIKDLPKEITVATSRTLSYYKLGASQRVAGDSGFAAYSRYRIGNYKLNTDHSSSSDNIALLVQ

SEQ ID NO: 27918 - protein, 418 aa, Artificial Sequence
  SARS-CoV-2/Wuhan-Hu-1__NC_045512.2/MN908947.2/EPI_ISL_402128__nuc leocapsid protein (N) (1-419)(D3L_R203K_G204R_S235F)
MSNGPQNQRNAPRITFGGPSDSTGSNQNGERSGARSKQRRPQGLPNNTASWFTALTQHGKEDLKFPRGQGVPINTNSSPDDQIGYYRRATRRIRGGDGKMKDLSPRWYFYYLGTGPEAGLPYGANKDGIIWVATEGALNTPKDHIGTRNPANNAAIVLQLPQGTTLPKGFYAEGSRGGSQASSRSSSRSRNSSRNSTPGSSKRTSPARMAGNGGDAALALLLLDRLNQLESKMFGKGQQQQGQTVTKKSAAEASKKPRQKRTATKAYNVTQAFGRRGPEQTQGNFGDQELIRQGTDYKHWPQIAQFAPSASAFFGMSRIGMEVTPSGTWLTYTGAIKLDDKDPNFKDQVILLNKHIDAYKTFPPTEPKKDKKKKADETQALPQRQKKQQTVTLLPAADLDDFSKQLQQSMSSADSTQA

SEQ ID NO: 27919 - protein, 419 aa, Artificial Sequence; identical to SEQ ID NO: 15322
  SARS-CoV-2/Wuhan-Hu-1__NC_045512.2/MN908947.2/EPI_ISL_402128__nuc leocapsid protein (N) (1-419)(T205I)

SEQ ID NO: 27920 - protein, 419 aa, Artificial Sequence
  SARS-CoV-2/Wuhan-Hu-1__NC_045512.2/MN908947.2/EPI_ISL_402128__nuc leocapsid protein (N) (1-419)(P80R)
MSDNGPQNQRNAPRITFGGPSDSTGSNQNGERSGARSKQRRPQGLPNNTASWFTALTQHGKEDLKFPRGQGVPINTNSSRDDQIGYYRRATRRIRGGDGKMKDLSPRWYFYYLGTGPEAGLPYGANKDGIIWVATEGALNTPKDHIGTRNPANNAAIVLQLPQGTTLPKGFYAEGSRGGSQASSRSSSRSRNSSRNSTPGSSRGTSPARMAGNGGDAALALLLLDRLNQLESKMSGKGQQQQGQTVTKKSAAEASKKPRQKRTATKAYNVTQAFGRRGPEQTQGNFGDQELIRQGTDYKHWPQIAQFAPSASAFFGMSRIGMEVTPSGTWLTYTGAIKLDDKDPNFKDQVILLNKHIDAYKTFPPTEPKKDKKKKADETQALPQRQKKQQTVTLLPAADLDDFSKQLQQSMSSADSTQA

SEQ ID NO: 27921 - protein, 419 aa, Artificial Sequence
  SARS-CoV-2/Wuhan-Hu-1__NC_045512.2/MN908947.2/EPI_ISL_402128__nuc leocapsid protein (N) (1-419)(P80R_R203K_G204R)
MSDNGPQNQRNAPRITFGGPSDSTGSNQNGERSGARSKQRRPQGLPNNTASWFTALTQHGKEDLKFPRGQGVPINTNSSRDDQIGYYRRATRRIRGGDGKMKDLSPRWYFYYLGTGPEAGLPYGANKDGIIWVATEGALNTPKDHIGTRNPANNAAIVLQLPQGTTLPKGFYAEGSRGGSQASSRSSSRSRNSSRNSTPGSSKRTSPARMAGNGGDAALALLLLDRLNQLESKMSGKGQQQQGQTVTKKSAAEASKKPRQKRTATKAYNVTQAFGRRGPEQTQGNFGDQELIRQGTDYKHWPQIAQFAPSASAFFGMSRIGMEVTPSGTWLTYTGAIKLDDKDPNFKDQVILLNKHIDAYKTFPPTEPKKDKKKKADETQALPQRQKKQQTVTLLPAADLDDFSKQLQQSMSSADSTQA

SEQ ID NO: 27922 - protein, 419 aa, Artificial Sequence
  SARS-CoV-2/Wuhan-Hu-1__NC_045512.2/MN908947.2/EPI_ISL_402128__nuc leocapsid protein (N) (1-419)(D63G_R203M_G215C_D377Y)
MSDNGPQNQRNAPRITFGGPSDSTGSNQNGERSGARSKQRRPQGLPNNTASWFTALTQHGKEGLKFPRGQGVPINTNSSPDDQIGYYRRATRRIRGGDGKMKDLSPRWYFYYLGTGPEAGLPYGANKDGIIWVATEGALNTPKDHIGTRNPANNAAIVLQLPQGTTLPKGFYAEGSRGGSQASSRSSSRSRNSSRNSTPGSSMGTSPARMAGNGCDAALALLLLDRLNQLESKMSGKGQQQQGQTVTKKSAAEASKKPRQKRTATKAYNVTQAFGRRGPEQTQGNFGDQELIRQGTDYKHWPQIAQFAPSASAFFGMSRIGMEVTPSGTWLTYTGAIKLDDKDPNFKDQVILLNKHIDAYKTFPPTEPKKDKKKKAYETQALPQRQKKQQTVTLLPAADLDDFSKQLQQSMSSADSTQA

SEQ ID NO: 27923 - protein, 419 aa, Artificial Sequence
  SARS-CoV-2/Wuhan-Hu-1__NC_045512.2/MN908947.2/EPI_ISL_402128__nuc leocapsid protein (N) (1-419)(D63G_R203M_D377Y)
MSDNGPQNQRNAPRITFGGPSDSTGSNQNGERSGARSKQRRPQGLPNNTASWFTALTQHGKEGLKFPRGQGVPINTNSSPDDQIGYYRRATRRIRGGDGKMKDLSPRWYFYYLGTGPEAGLPYGANKDGIIWVATEGALNTPKDHIGTRNPANNAAIVLQLPQGTTLPKGFYAEGSRGGSQASSRSSSRSRNSSRNSTPGSSMGTSPARMAGNGGDAALALLLLDRLNQLESKMSGKGQQQQGQTVTKKSAAEASKKPRQKRTATKAYNVTQAFGRRGPEQTQGNFGDQELIRQGTDYKHWPQIAQFAPSASAFFGMSRIGMEVTPSGTWLTYTGAIKLDDKDPNFKDQVILLNKHIDAYKTFPPTEPKKDKKKKAYETQALPQRQKKQQTVTLLPAADLDDFSKQLQQSMSSADSTQA

SEQ ID NO: 27924 - protein, 419 aa, Artificial Sequence
  SARS-CoV-2/Wuhan-Hu-1__NC_045512.2/MN908947.2/EPI_ISL_402128__nuc leocapsid protein (N) (1-419)(T205I_T362I)
MSDNGPQNQRNAPRITFGGPSDSTGSNQNGERSGARSKQRRPQGLPNNTASWFTALTQHGKEDLKFPRGQGVPINTNSSPDDQIGYYRRATRRIRGGDGKMKDLSPRWYFYYLGTGPEAGLPYGANKDGIIWVATEGALNTPKDHIGTRNPANNAAIVLQLPQGTTLPKGFYAEGSRGGSQASSRSSSRSRNSSRNSTPGSSRGISPARMAGNGGDAALALLLLDRLNQLESKMSGKGQQQQGQTVTKKSAAEASKKPRQKRTATKAYNVTQAFGRRGPEQTQGNFGDQELIRQGTDYKHWPQIAQFAPSASAFFGMSRIGMEVTPSGTWLTYTGAIKLDDKDPNFKDQVILLNKHIDAYKIFPPTEPKKDKKKKADETQALPQRQKKQQTVTLLPAADLDDFSKQLQQSMSSADSTQA

SEQ ID NO: 27925 - protein, 418 aa, Artificial Sequence
  SARS-CoV-2/Wuhan-Hu-1__NC_045512.2/MN908947.2/EPI_ISL_402128__nuc leocapsid protein (N) (1-419)(S2Y_D3del_A12G_T205I)
MYNGPQNQRNGPRITFGGPSDSTGSNQNGERSGARSKQRRPQGLPNNTASWFTALTQHGKEDLKFPRGQGVPINTNSSPDDQIGYYRRATRRIRGGDGKMKDLSPRWYFYYLGTGPEAGLPYGANKDGIIWVATEGALNTPKDHIGTRNPANNAAIVLQLPQGTTLPKGFYAEGSRGGSQASSRSSSRSRNSSRNSTPGSSRGISPARMAGNGGDAALALLLLDRLNQLESKMSGKGQQQQGQTVTKKSAAEASKKPRQKRTATKAYNVTQAFGRRGPEQTQGNFGDQELIRQGTDYKHWPQIAQFAPSASAFFGMSRIGMEVTPSGTWLTYTGAIKLDDKDPNFKDQVILLNKHIDAYKTFPPTEPKKDKKKKADETQALPQRQKKQQTVTLLPAADLDDFSKQLQQSMSSADSTQA

SEQ ID NO: 27926 - protein, 419 aa, Artificial Sequence
  SARS-CoV-2/Wuhan-Hu-1__NC_045512.2/MN908947.2/EPI_ISL_402128__nuc leocapsid protein (N) (1-419)(P13L_R203K_G204R_G214C)
MSDNGPQNQRNALRITFGGPSDSTGSNQNGERSGARSKQRRPQGLPNNTASWFTALTQHGKEDLKFPRGQGVPINTNSSPDDQIGYYRRATRRIRGGDGKMKDLSPRWYFYYLGTGPEAGLPYGANKDGIIWVATEGALNTPKDHIGTRNPANNAAIVLQLPQGTTLPKGFYAEGSRGGSQASSRSSSRSRNSSRNSTPGSSKRTSPARMAGNCGDAALALLLLDRLNQLESKMSGKGQQQQGQTVTKKSAAEASKKPRQKRTATKAYNVTQAFGRRGPEQTQGNFGDQELIRQGTDYKHWPQIAQFAPSASAFFGMSRIGMEVTPSGTWLTYTGAIKLDDKDPNFKDQVILLNKHIDAYKTFPPTEPKKDKKKKADETQALPQRQKKQQTVTLLPAADLDDFSKQLQQSMSSADSTQA

SEQ ID NO: 27927 - protein, 419 aa, Artificial Sequence
  SARS-CoV-2/Wuhan-Hu-1__NC_045512.2/MN908947.2/EPI_ISL_402128__nuc leocapsid protein (N) (1-419)(P67S_R203M_D377Y)
MSDNGPQNQRNAPRITFGGPSDSTGSNQNGERSGARSKQRRPQGLPNNTASWFTALTQHGKEDLKFSRGQGVPINTNSSPDDQIGYYRRATRRIRGGDGKMKDLSPRWYFYYLGTGPEAGLPYGANKDGIIWVATEGALNTPKDHIGTRNPANNAAIVLQLPQGTTLPKGFYAEGSRGGSQASSRSSSRSRNSSRNSTPGSSMGTSPARMAGNGGDAALALLLLDRLNQLESKMSGKGQQQQGQTVTKKSAAEASKKPRQKRTATKAYNVTQAFGRRGPEQTQGNFGDQELIRQGTDYKHWPQIAQFAPSASAFFGMSRIGMEVTPSGTWLTYTGAIKLDDKDPNFKDQVILLNKHIDAYKTFPPTEPKKDKKKKAYETQALPQRQKKQQTVTLLPAADLDDFSKQLQQSMSSADSTQA

SEQ ID NO: 27928 - protein, 419 aa, Artificial Sequence
  SARS-CoV-2/Wuhan-Hu-1__NC_045512.2/MN908947.2/EPI_ISL_402128__nuc leocapsid protein (N) (1-419)(I157V_R203K_G204R)
MSDNGPQNQRNAPRITFGGPSDSTGSNQNGERSGARSKQRRPQGLPNNTASWFTALTQHGKEDLKFPRGQGVPINTNSSPDDQIGYYRRATRRIRGGDGKMKDLSPRWYFYYLGTGPEAGLPYGANKDGIIWVATEGALNTPKDHIGTRNPANNAAVVLQLPQGTTLPKGFYAEGSRGGSQASSRSSSRSRNSSRNSTPGSSKRTSPARMAGNGGDAALALLLLDRLNQLESKMSGKGQQQQGQTVTKKSAAEASKKPRQKRTATKAYNVTQAFGRRGPEQTQGNFGDQELIRQGTDYKHWPQIAQFAPSASAFFGMSRIGMEVTPSGTWLTYTGAIKLDDKDPNFKDQVILLNKHIDAYKTFPPTEPKKDKKKKADETQALPQRQKKQQTVTLLPAADLDDFSKQLQQSMSSADSTQA

SEQ ID NO: 27929 - protein, 419 aa, Artificial Sequence
  SARS-CoV-2/Wuhan-Hu-1__NC_045512.2/MN908947.2/EPI_ISL_402128__nuc leocapsid protein (N) (1-419)(A119S_R203K_G204R_M234I)
MSDNGPQNQRNAPRITFGGPSDSTGSNQNGERSGARSKQRRPQGLPNNTASWFTALTQHGKEDLKFPRGQGVPINTNSSPDDQIGYYRRATRRIRGGDGKMKDLSPRWYFYYLGTGPESGLPYGANKDGIIWVATEGALNTPKDHIGTRNPANNAAIVLQLPQGTTLPKGFYAEGSRGGSQASSRSSSRSRNSSRNSTPGSSKRTSPARMAGNGGDAALALLLLDRLNQLESKISGKGQQQQGQTVTKKSAAEASKKPRQKRTATKAYNVTQAFGRRGPEQTQGNFGDQELIRQGTDYKHWPQIAQFAPSASAFFGMSRIGMEVTPSGTWLTYTGAIKLDDKDPNFKDQVILLNKHIDAYKTFPPTEPKKDKKKKADETQALPQRQKKQQTVTLLPAADLDDFSKQLQQSMSSADSTQA

SEQ ID NO: 27930 - protein, 419 aa, Artificial Sequence; identical to SEQ ID NO: 15311
  SARS-CoV-2/Wuhan-Hu-1__NC_045512.2/MN908947.2/EPI_ISL_402128__nuc leocapsid protein (N) (1-419)(R203K_G204R)

SEQ ID NO: 27931 - protein, 419 aa, Artificial Sequence; identical to SEQ ID NO: 15313
  SARS-CoV-2/Wuhan-Hu-1__NC_045512.2/MN908947.2/EPI_ISL_402128__nuc leocapsid protein (N) (1-419)(R203K_G204R_G212V)

SEQ ID NO: 27932 - protein, 418 aa, Artificial Sequence
  SARS-CoV-2/Wuhan-Hu-1__NC_045512.2/MN908947.2/EPI_ISL_402128__nuc leocapsid protein (N) (1-419)(R203K_G204R_A208G_R209del)
MSDNGPQNQRNAPRITFGGPSDSTGSNQNGERSGARSKQRRPQGLPNNTASWFTALTQHGKEDLKFPRGQGVPINTNSSPDDQIGYYRRATRRIRGGDGKMKDLSPRWYFYYLGTGPEAGLPYGANKDGIIWVATEGALNTPKDHIGTRNPANNAAIVLQLPQGTTLPKGFYAEGSRGGSQASSRSSSRSRNSSRNSTPGSSKRTSPGMAGNGGDAALALLLLDRLNQLESKMSGKGQQQQGQTVTKKSAAEASKKPRQKRTATKAYNVTQAFGRRGPEQTQGNFGDQELIRQGTDYKHWPQIAQFAPSASAFFGMSRIGMEVTPSGTWLTYTGAIKLDDKDPNFKDQVILLNKHIDAYKTFPPTEPKKDKKKKADETQALPQRQKKQQTVTLLPAADLDDFSKQLQQSMSSADSTQA

SEQ ID NO: 27933 - protein, 419 aa, Artificial Sequence
  SARS-CoV-2/Wuhan-Hu-1__NC_045512.2/MN908947.2/EPI_ISL_402128__nuc leocapsid protein (N) (1-419)(R203M_D377Y)
MSDNGPQNQRNAPRITFGGPSDSTGSNQNGERSGARSKQRRPQGLPNNTASWFTALTQHGKEDLKFPRGQGVPINTNSSPDDQIGYYRRATRRIRGGDGKMKDLSPRWYFYYLGTGPEAGLPYGANKDGIIWVATEGALNTPKDHIGTRNPANNAAIVLQLPQGTTLPKGFYAEGSRGGSQASSRSSSRSRNSSRNSTPGSSMGTSPARMAGNGGDAALALLLLDRLNQLESKMSGKGQQQQGQTVTKKSAAEASKKPRQKRTATKAYNVTQAFGRRGPEQTQGNFGDQELIRQGTDYKHWPQIAQFAPSASAFFGMSRIGMEVTPSGTWLTYTGAIKLDDKDPNFKDQVILLNKHIDAYKTFPPTEPKKDKKKKAYETQALPQRQKKQQTVTLLPAADLDDFSKQLQQSMSSADSTQA

SEQ ID NO: 27934 - protein, 419 aa, Artificial Sequence
  SARS-CoV-2/Wuhan-Hu-1__NC_045512.2/MN908947.2/EPI_ISL_402128__nuc leocapsid protein (N) (1-419)(T205I_M234I)
MSDNGPQNQRNAPRITFGGPSDSTGSNQNGERSGARSKQRRPQGLPNNTASWFTALTQHGKEDLKFPRGQGVPINTNSSPDDQIGYYRRATRRIRGGDGKMKDLSPRWYFYYLGTGPEAGLPYGANKDGIIWVATEGALNTPKDHIGTRNPANNAAIVLQLPQGTTLPKGFYAEGSRGGSQASSRSSSRSRNSSRNSTPGSSRGISPARMAGNGGDAALALLLLDRLNQLESKISGKGQQQQGQTVTKKSAAEASKKPRQKRTATKAYNVTQAFGRRGPEQTQGNFGDQELIRQGTDYKHWPQIAQFAPSASAFFGMSRIGMEVTPSGTWLTYTGAIKLDDKDPNFKDQVILLNKHIDAYKTFPPTEPKKDKKKKADETQALPQRQKKQQTVTLLPAADLDDFSKQLQQSMSSADSTQA

SEQ ID NO: 27935 - protein, 419 aa, Artificial Sequence; identical to SEQ ID NO: 15395
  SARS-CoV-2/Wuhan-Hu-1__NC_045512.2/MN908947.2/EPI_ISL_402128__nuc leocapsid protein (N) (1-419)(M234I)

SEQ ID NO: 27936 - protein, 419 aa, Artificial Sequence
  SARS-CoV-2/Wuhan-Hu-1__NC_045512.2/MN908947.2/EPI_ISL_402128__nuc leocapsid protein (N) (1-419)(A12G_T205I)
MSDNGPQNQRNGPRITFGGPSDSTGSNQNGERSGARSKQRRPQGLPNNTASWFTALTQHGKEDLKFPRGQGVPINTNSSPDDQIGYYRRATRRIRGGDGKMKDLSPRWYFYYLGTGPEAGLPYGANKDGIIWVATEGALNTPKDHIGTRNPANNAAIVLQLPQGTTLPKGFYAEGSRGGSQASSRSSSRSRNSSRNSTPGSSRGISPARMAGNGGDAALALLLLDRLNQLESKMSGKGQQQQGQTVTKKSAAEASKKPRQKRTATKAYNVTQAFGRRGPEQTQGNFGDQELIRQGTDYKHWPQIAQFAPSASAFFGMSRIGMEVTPSGTWLTYTGAIKLDDKDPNFKDQVILLNKHIDAYKTFPPTEPKKDKKKKADETQALPQRQKKQQTVTLLPAADLDDFSKQLQQSMSSADSTQA

SEQ ID NO: 27937 - protein, 419 aa, Artificial Sequence
  SARS-CoV-2/Wuhan-Hu-1__NC_045512.2/MN908947.2/EPI_ISL_402128__nuc leocapsid protein (N) (1-419)(P13L_P199L_S202R_T205I_M234I)
MSDNGPQNQRNALRITFGGPSDSTGSNQNGERSGARSKQRRPQGLPNNTASWFTALTQHGKEDLKFPRGQGVPINTNSSPDDQIGYYRRATRRIRGGDGKMKDLSPRWYFYYLGTGPEAGLPYGANKDGIIWVATEGALNTPKDHIGTRNPANNAAIVLQLPQGTTLPKGFYAEGSRGGSQASSRSSSRSRNSSRNSTLGSRRGISPARMAGNGGDAALALLLLDRLNQLESKISGKGQQQQGQTVTKKSAAEASKKPRQKRTATKAYNVTQAFGRRGPEQTQGNFGDQELIRQGTDYKHWPQIAQFAPSASAFFGMSRIGMEVTPSGTWLTYTGAIKLDDKDPNFKDQVILLNKHIDAYKTFPPTEPKKDKKKKADETQALPQRQKKQQTVTLLPAADLDDFSKQLQQSMSSADSTQA

SEQ ID NO: 27938 - protein, 419 aa, Artificial Sequence
  SARS-CoV-2/Wuhan-Hu-1__NC_045512.2/MN908947.2/EPI_ISL_402128__nuc leocapsid protein (N) (1-419)(P13L_R203K_G204R_G214C_T366I)
MSDNGPQNQRNALRITFGGPSDSTGSNQNGERSGARSKQRRPQGLPNNTASWFTALTQHGKEDLKFPRGQGVPINTNSSPDDQIGYYRRATRRIRGGDGKMKDLSPRWYFYYLGTGPEAGLPYGANKDGIIWVATEGALNTPKDHIGTRNPANNAAIVLQLPQGTTLPKGFYAEGSRGGSQASSRSSSRSRNSSRNSTPGSSKRTSPARMAGNCGDAALALLLLDRLNQLESKMSGKGQQQQGQTVTKKSAAEASKKPRQKRTATKAYNVTQAFGRRGPEQTQGNFGDQELIRQGTDYKHWPQIAQFAPSASAFFGMSRIGMEVTPSGTWLTYTGAIKLDDKDPNFKDQVILLNKHIDAYKTFPPIEPKKDKKKKADETQALPQRQKKQQTVTLLPAADLDDFSKQLQQSMSSADSTQA

SEQ ID NO: 27939 - protein, 418 aa, Artificial Sequence
  SARS-CoV-2/Wuhan-Hu-1__NC_045512.2/MN908947.2/EPI_ISL_402128__nuc leocapsid protein (N) (1-419)(R203K_G204R_A208G_R209del_M234I)
MSDNGPQNQRNAPRITFGGPSDSTGSNQNGERSGARSKQRRPQGLPNNTASWFTALTQHGKEDLKFPRGQGVPINTNSSPDDQIGYYRRATRRIRGGDGKMKDLSPRWYFYYLGTGPEAGLPYGANKDGIIWVATEGALNTPKDHIGTRNPANNAAIVLQLPQGTTLPKGFYAEGSRGGSQASSRSSSRSRNSSRNSTPGSSKRTSPGMAGNGGDAALALLLLDRLNQLESKISGKGQQQQGQTVTKKSAAEASKKPRQKRTATKAYNVTQAFGRRGPEQTQGNFGDQELIRQGTDYKHWPQIAQFAPSASAFFGMSRIGMEVTPSGTWLTYTGAIKLDDKDPNFKDQVILLNKHIDAYKTFPPTEPKKDKKKKADETQALPQRQKKQQTVTLLPAADLDDFSKQLQQSMSSADSTQA

SEQ ID NO: 27940 - protein, 75 aa, Artificial Sequence; identical to SEQ ID NO: 15693
  SARS-CoV-2/Wuhan-Hu-1__NC_045512.2/MN908947.2/EPI_ISL_402128__env elope protein (E) (1-75)(P71L)

SEQ ID NO: 27941 - protein, 75 aa, Artificial Sequence
  SARS-CoV-2/Wuhan-Hu-1__NC_045512.2/MN908947.2/EPI_ISL_402128__env elope protein (E) (1-75)(T9I_C43F_V49L_V58F_V62F_L73F)
MYSFVSEEIGTLIVNSVLLFLAFVVFLLVTLAILTALRLCAYFCNIVNLSLVKPSFYFYSRFKNLNSSRVPDFLV

SEQ ID NO: 27942 - protein, 75 aa, Artificial Sequence
  SARS-CoV-2/Wuhan-Hu-1__NC_045512.2/MN908947.2/EPI_ISL_402128__env elope protein (E) (1-75)(T9I_V58F_V62F_S68F_L73F)
MYSFVSEEIGTLIVNSVLLFLAFVVFLLVTLAILTALRLCAYCCNIVNVSLVKPSFYFYSRFKNLNSFRVPDFLV

SEQ ID NO: 27943 - protein, 75 aa, Artificial Sequence
  SARS-CoV-2/Wuhan-Hu-1__NC_045512.2/MN908947.2/EPI_ISL_402128__env elope protein (E) (1-75)(T9I_V58F_S68A_R69G_P71S)
MYSFVSEEIGTLIVNSVLLFLAFVVFLLVTLAILTALRLCAYCCNIVNVSLVKPSFYFYSRVKNLNSAGVSDLLV

SEQ ID NO: 27944 - protein, 75 aa, Artificial Sequence; identical to SEQ ID NO: 15690
  SARS-CoV-2/Wuhan-Hu-1__NC_045512.2/MN908947.2/EPI_ISL_402128__env elope protein (E) (1-75)(L21F)

SEQ ID NO: 27945 - protein, 75 aa, Artificial Sequence
  SARS-CoV-2/Wuhan-Hu-1__NC_045512.2/MN908947.2/EPI_ISL_402128__env elope protein (E) (1-75)(T9I_L21F_S55F_V58F_S68F_L73F)
MYSFVSEEIGTLIVNSVLLFFAFVVFLLVTLAILTALRLCAYCCNIVNVSLVKPFFYFYSRVKNLNSFRVPDFLV

SEQ ID NO: 27946 - protein, 75 aa, Artificial Sequence
  SARS-CoV-2/Wuhan-Hu-1__NC_045512.2/MN908947.2/EPI_ISL_402128__env elope protein (E) (1-75)(T9I_S55F_V58F_S68F_P71L_D72Y_L73F)
MYSFVSEEIGTLIVNSVLLFLAFVVFLLVTLAILTALRLCAYCCNIVNVSLVKPFFYFYSRVKNLNSFRVLYFLV

SEQ ID NO: 27947 - protein, 75 aa, Artificial Sequence
  SARS-CoV-2/Wuhan-Hu-1__NC_045512.2/MN908947.2/EPI_ISL_402128__env elope protein (E) (1-75)(T9I_S55F_V58F_S68F_D72Y_L73F)
MYSFVSEEIGTLIVNSVLLFLAFVVFLLVTLAILTALRLCAYCCNIVNVSLVKPFFYFYSRVKNLNSFRVPYFLV

SEQ ID NO: 27948 - protein, 1946 aa, Artificial Sequence
  SARS-CoV-2/Wuhan-Hu-1__NC_045512.2/MN908947.2__non-structural protein 3 (NSP3) (1-1946)(T184I_A891D_I1413T)
MAPTKVTFGDDTVIEVQGYKSVNITFELDERIDKVLNEKCSAYTVELGTEVNEFACVVADAVIKTLQPVSELLTPLGIDLDEWSMATYYLFDESGEFKLASHMYCSFYPPDEDEEEGDCEEEEFEPSTQYEYGTEDDYQGKPLEFGATSAALQPEEEQEEDWLDDDSQQTVGQQDGSEDNQTTIIQTIVEVQPQLEMELTPVVQTIEVNSFSGYLKLTDNVYIKNADIVEEAKKVKPTVVVNAANVYLKHGGGVAGALNKATNNAMQVESDDYIATNGPLKVGGSCVLSGHNLAKHCLHVVGPNVNKGEDIQLLKSAYENFNQHEVLLAPLLSAGIFGADPIHSLRVCVDTVRTNVYLAVFDKNLYDKLVSSFLEMKSEKQVEQKIAEIPKEEVKPFITESKPSVEQRKQDDKKIKACVEEVTTTLEETKFLTENLLLYIDINGNLHPDSATLVSDIDITFLKKDAPYIVGDVVQEGVLTAVVIPTKKAGGTTEMLAKALRKVPTDNYITTYPGQGLNGYTVEEAKTVLKKCKSAFYILPSIISNEKQEILGTVSWNLREMLAHAEETRKLMPVCVETKAIVSTIQRKYKGIKIQEGVVDYGARFYFYTSKTTVASLINTLNDLNETLVTMPLGYVTHGLNLEEAARYMRSLKVPATVSVSSPDAVTAYNGYLTSSSKTPEEHFIETISLAGSYKDWSYSGQSTQLGIEFLKRGDKSVYYTSNPTTFHLDGEVITFDNLKTLLSLREVRTIKVFTTVDNINLHTQVVDMSMTYGQQFGPTYLDGADVTKIKPHNSHEGKTFYVLPNDDTLRVEAFEYYHTTDPSFLGRYMSALNHTKKWKYPQVNGLTSIKWADNNCYLATALLTLQQIELKFNPPALQDAYYRARAGEADNFCALILAYCNKTVGELGDVRETMSYLFQHANLDSCKRVLNVVCKTCGQQQTTLKGVEAVMYMGTLSYEQFKKGVQIPCTCGKQATKYLVQQESPFVMMSAPPAQYELKHGTFTCASEYTGNYQCGHYKHITSKETLYCIDGALLTKSSEYKGPITDVFYKENSYTTTIKPVTYKLDGVVCTEIDPKLDNYYKKDNSYFTEQPIDLVPNQPYPNASFDNFKFVCDNIKFADDLNQLTGYKKPASRELKVTFFPDLNGDVVAIDYKHYTPSFKKGAKLLHKPIVWHVNNATNKATYKPNTWCIRCLWSTKPVETSNSFDVLKSEDAQGMDNLACEDLKPVSEEVVENPTIQKDVLECNVKTTEVVGDIILKPANNSLKITEEVGHTDLMAAYVDNSSLTIKKPNELSRVLGLKTLATHGLAAVNSVPWDTIANYAKPFLNKVVSTTTNIVTRCLNRVCTNYMPYFFTLLLQLCTFTRSTNSRIKASMPTTIAKNTVKSVGKFCLEASFNYLKSPNFSKLINITIWFLLLSVCLGSLIYSTAALGVLMSNLGMPSYCTGYREGYLNSTNVTIATYCTGSIPCSVCLSGLDSLDTYPSLETIQITISSFKWDLTAFGLVAEWFLAYILFTRFFYVLGLAAIMQLFFSYFAVHFISNSWLMWLIINLVQMAPISAMVRMYIFFASFYYVWKSYVHVVDGCNSSTCMMCYKRNRATRVECTTIVNGVRRSFYVYANGGKGFCKLHNWNCVNCDTFCAGSTFISDEVARDLSLQFKRPINPTDQSSYIVDSVTVKNGSIHLYFDKAGQKTYERHSLSHFVNLDNLRANNTKGSLPINVIVFDGKSKCEESSAKSASVYYSQLMCQPILLLDQALVSDVGDSAEVAVKMFDAYVNTFSSTFNVPMEKLKTLVATAEAELAKNVSLDNVLSTFISAARQGFVDSDVETKDVVECLKLSHQSDIEVTGDSCNNYMLTYNKVENMTPRDLGACIDCSARHINAQVAKSHNIALIWNVKDFMSLSEQLRKQIRSAAKKNNLPFKLTCATTRQVVNVVTTKIALKGG

SEQ ID NO: 27949 - protein, 1946 aa, Artificial Sequence
  SARS-CoV-2/Wuhan-Hu-1__NC_045512.2/MN908947.2__non-structural protein 3 (NSP3) (1-1946)(A329T_P823L)
MAPTKVTFGDDTVIEVQGYKSVNITFELDERIDKVLNEKCSAYTVELGTEVNEFACVVADAVIKTLQPVSELLTPLGIDLDEWSMATYYLFDESGEFKLASHMYCSFYPPDEDEEEGDCEEEEFEPSTQYEYGTEDDYQGKPLEFGATSAALQPEEEQEEDWLDDDSQQTVGQQDGSEDNQTTTIQTIVEVQPQLEMELTPVVQTIEVNSFSGYLKLTDNVYIKNADIVEEAKKVKPTVVVNAANVYLKHGGGVAGALNKATNNAMQVESDDYIATNGPLKVGGSCVLSGHNLAKHCLHVVGPNVNKGEDIQLLKSAYENFNQHEVLLTPLLSAGIFGADPIHSLRVCVDTVRTNVYLAVFDKNLYDKLVSSFLEMKSEKQVEQKIAEIPKEEVKPFITESKPSVEQRKQDDKKIKACVEEVTTTLEETKFLTENLLLYIDINGNLHPDSATLVSDIDITFLKKDAPYIVGDVVQEGVLTAVVIPTKKAGGTTEMLAKALRKVPTDNYITTYPGQGLNGYTVEEAKTVLKKCKSAFYILPSIISNEKQEILGTVSWNLREMLAHAEETRKLMPVCVETKAIVSTIQRKYKGIKIQEGVVDYGARFYFYTSKTTVASLINTLNDLNETLVTMPLGYVTHGLNLEEAARYMRSLKVPATVSVSSPDAVTAYNGYLTSSSKTPEEHFIETISLAGSYKDWSYSGQSTQLGIEFLKRGDKSVYYTSNPTTFHLDGEVITFDNLKTLLSLREVRTIKVFTTVDNINLHTQVVDMSMTYGQQFGPTYLDGADVTKIKPHNSHEGKTFYVLPNDDTLRVEAFEYYHTTDLSFLGRYMSALNHTKKWKYPQVNGLTSIKWADNNCYLATALLTLQQIELKFNPPALQDAYYRARAGEAANFCALILAYCNKTVGELGDVRETMSYLFQHANLDSCKRVLNVVCKTCGQQQTTLKGVEAVMYMGTLSYEQFKKGVQIPCTCGKQATKYLVQQESPFVMMSAPPAQYELKHGTFTCASEYTGNYQCGHYKHITSKETLYCIDGALLTKSSEYKGPITDVFYKENSYTTTIKPVTYKLDGVVCTEIDPKLDNYYKKDNSYFTEQPIDLVPNQPYPNASFDNFKFVCDNIKFADDLNQLTGYKKPASRELKVTFFPDLNGDVVAIDYKHYTPSFKKGAKLLHKPIVWHVNNATNKATYKPNTWCIRCLWSTKPVETSNSFDVLKSEDAQGMDNLACEDLKPVSEEVVENPTIQKDVLECNVKTTEVVGDIILKPANNSLKITEEVGHTDLMAAYVDNSSLTIKKPNELSRVLGLKTLATHGLAAVNSVPWDTIANYAKPFLNKVVSTTTNIVTRCLNRVCTNYMPYFFTLLLQLCTFTRSTNSRIKASMPTTIAKNTVKSVGKFCLEASFNYLKSPNFSKLINIIIWFLLLSVCLGSLIYSTAALGVLMSNLGMPSYCTGYREGYLNSTNVTIATYCTGSIPCSVCLSGLDSLDTYPSLETIQITISSFKWDLTAFGLVAEWFLAYILFTRFFYVLGLAAIMQLFFSYFAVHFISNSWLMWLIINLVQMAPISAMVRMYIFFASFYYVWKSYVHVVDGCNSSTCMMCYKRNRATRVECTTIVNGVRRSFYVYANGGKGFCKLHNWNCVNCDTFCAGSTFISDEVARDLSLQFKRPINPTDQSSYIVDSVTVKNGSIHLYFDKAGQKTYERHSLSHFVNLDNLRANNTKGSLPINVIVFDGKSKCEESSAKSASVYYSQLMCQPILLLDQALVSDVGDSAEVAVKMFDAYVNTFSSTFNVPMEKLKTLVATAEAELAKNVSLDNVLSTFISAARQGFVDSDVETKDVVECLKLSHQSDIEVTGDSCNNYMLTYNKVENMTPRDLGACIDCSARHINAQVAKSHNIALIWNVKDFMSLSEQLRKQIRSAAKKNNLPFKLTCATTRQVVNVVTTKIALKGG

SEQ ID NO: 27950 - protein, 1946 aa, Artificial Sequence
  SARS-CoV-2/Wuhan-Hu-1__NC_045512.2/MN908947.2__non-structural protein 3 (NSP3) (1-1946)(S371L_K978Q)
MAPTKVTFGDDTVIEVQGYKSVNITFELDERIDKVLNEKCSAYTVELGTEVNEFACVVADAVIKTLQPVSELLTPLGIDLDEWSMATYYLFDESGEFKLASHMYCSFYPPDEDEEEGDCEEEEFEPSTQYEYGTEDDYQGKPLEFGATSAALQPEEEQEEDWLDDDSQQTVGQQDGSEDNQTTTIQTIVEVQPQLEMELTPVVQTIEVNSFSGYLKLTDNVYIKNADIVEEAKKVKPTVVVNAANVYLKHGGGVAGALNKATNNAMQVESDDYIATNGPLKVGGSCVLSGHNLAKHCLHVVGPNVNKGEDIQLLKSAYENFNQHEVLLAPLLSAGIFGADPIHSLRVCVDTVRTNVYLAVFDKNLYDKLVLSFLEMKSEKQVEQKIAEIPKEEVKPFITESKPSVEQRKQDDKKIKACVEEVTTTLEETKFLTENLLLYIDINGNLHPDSATLVSDIDITFLKKDAPYIVGDVVQEGVLTAVVIPTKKAGGTTEMLAKALRKVPTDNYITTYPGQGLNGYTVEEAKTVLKKCKSAFYILPSIISNEKQEILGTVSWNLREMLAHAEETRKLMPVCVETKAIVSTIQRKYKGIKIQEGVVDYGARFYFYTSKTTVASLINTLNDLNETLVTMPLGYVTHGLNLEEAARYMRSLKVPATVSVSSPDAVTAYNGYLTSSSKTPEEHFIETISLAGSYKDWSYSGQSTQLGIEFLKRGDKSVYYTSNPTTFHLDGEVITFDNLKTLLSLREVRTIKVFTTVDNINLHTQVVDMSMTYGQQFGPTYLDGADVTKIKPHNSHEGKTFYVLPNDDTLRVEAFEYYHTTDPSFLGRYMSALNHTKKWKYPQVNGLTSIKWADNNCYLATALLTLQQIELKFNPPALQDAYYRARAGEAANFCALILAYCNKTVGELGDVRETMSYLFQHANLDSCKRVLNVVCKTCGQQQTTLKGVEAVMYMGTLSYEQFKKGVQIPCTCGKQATQYLVQQESPFVMMSAPPAQYELKHGTFTCASEYTGNYQCGHYKHITSKETLYCIDGALLTKSSEYKGPITDVFYKENSYTTTIKPVTYKLDGVVCTEIDPKLDNYYKKDNSYFTEQPIDLVPNQPYPNASFDNFKFVCDNIKFADDLNQLTGYKKPASRELKVTFFPDLNGDVVAIDYKHYTPSFKKGAKLLHKPIVWHVNNATNKATYKPNTWCIRCLWSTKPVETSNSFDVLKSEDAQGMDNLACEDLKPVSEEVVENPTIQKDVLECNVKTTEVVGDIILKPANNSLKITEEVGHTDLMAAYVDNSSLTIKKPNELSRVLGLKTLATHGLAAVNSVPWDTIANYAKPFLNKVVSTTTNIVTRCLNRVCTNYMPYFFTLLLQLCTFTRSTNSRIKASMPTTIAKNTVKSVGKFCLEASFNYLKSPNFSKLINIIIWFLLLSVCLGSLIYSTAALGVLMSNLGMPSYCTGYREGYLNSTNVTIATYCTGSIPCSVCLSGLDSLDTYPSLETIQITISSFKWDLTAFGLVAEWFLAYILFTRFFYVLGLAAIMQLFFSYFAVHFISNSWLMWLIINLVQMAPISAMVRMYIFFASFYYVWKSYVHVVDGCNSSTCMMCYKRNRATRVECTTIVNGVRRSFYVYANGGKGFCKLHNWNCVNCDTFCAGSTFISDEVARDLSLQFKRPINPTDQSSYIVDSVTVKNGSIHLYFDKAGQKTYERHSLSHFVNLDNLRANNTKGSLPINVIVFDGKSKCEESSAKSASVYYSQLMCQPILLLDQALVSDVGDSAEVAVKMFDAYVNTFSSTFNVPMEKLKTLVATAEAELAKNVSLDNVLSTFISAARQGFVDSDVETKDVVECLKLSHQSDIEVTGDSCNNYMLTYNKVENMTPRDLGACIDCSARHINAQVAKSHNIALIWNVKDFMSLSEQLRKQIRSAAKKNNLPFKLTCATTRQVVNVVTTKIALKGG

SEQ ID NO: 27951 - protein, 1946 aa, Artificial Sequence
  SARS-CoV-2/Wuhan-Hu-1__NC_045512.2/MN908947.2__non-structural protein 3 (NSP3) (1-1946)(A489S_P1229L_P1470S)
MAPTKVTFGDDTVIEVQGYKSVNITFELDERIDKVLNEKCSAYTVELGTEVNEFACVVADAVIKTLQPVSELLTPLGIDLDEWSMATYYLFDESGEFKLASHMYCSFYPPDEDEEEGDCEEEEFEPSTQYEYGTEDDYQGKPLEFGATSAALQPEEEQEEDWLDDDSQQTVGQQDGSEDNQTTTIQTIVEVQPQLEMELTPVVQTIEVNSFSGYLKLTDNVYIKNADIVEEAKKVKPTVVVNAANVYLKHGGGVAGALNKATNNAMQVESDDYIATNGPLKVGGSCVLSGHNLAKHCLHVVGPNVNKGEDIQLLKSAYENFNQHEVLLAPLLSAGIFGADPIHSLRVCVDTVRTNVYLAVFDKNLYDKLVSSFLEMKSEKQVEQKIAEIPKEEVKPFITESKPSVEQRKQDDKKIKACVEEVTTTLEETKFLTENLLLYIDINGNLHPDSATLVSDIDITFLKKDAPYIVGDVVQEGVLTAVVIPTKKSGGTTEMLAKALRKVPTDNYITTYPGQGLNGYTVEEAKTVLKKCKSAFYILPSIISNEKQEILGTVSWNLREMLAHAEETRKLMPVCVETKAIVSTIQRKYKGIKIQEGVVDYGARFYFYTSKTTVASLINTLNDLNETLVTMPLGYVTHGLNLEEAARYMRSLKVPATVSVSSPDAVTAYNGYLTSSSKTPEEHFIETISLAGSYKDWSYSGQSTQLGIEFLKRGDKSVYYTSNPTTFHLDGEVITFDNLKTLLSLREVRTIKVFTTVDNINLHTQVVDMSMTYGQQFGPTYLDGADVTKIKPHNSHEGKTFYVLPNDDTLRVEAFEYYHTTDPSFLGRYMSALNHTKKWKYPQVNGLTSIKWADNNCYLATALLTLQQIELKFNPPALQDAYYRARAGEAANFCALILAYCNKTVGELGDVRETMSYLFQHANLDSCKRVLNVVCKTCGQQQTTLKGVEAVMYMGTLSYEQFKKGVQIPCTCGKQATKYLVQQESPFVMMSAPPAQYELKHGTFTCASEYTGNYQCGHYKHITSKETLYCIDGALLTKSSEYKGPITDVFYKENSYTTTIKPVTYKLDGVVCTEIDPKLDNYYKKDNSYFTEQPIDLVPNQPYPNASFDNFKFVCDNIKFADDLNQLTGYKKPASRELKVTFFPDLNGDVVAIDYKHYTPSFKKGAKLLHKPIVWHVNNATNKATYKPNTWCIRCLWSTKPVETSNSFDVLKSEDAQGMDNLACEDLKLVSEEVVENPTIQKDVLECNVKTTEVVGDIILKPANNSLKITEEVGHTDLMAAYVDNSSLTIKKPNELSRVLGLKTLATHGLAAVNSVPWDTIANYAKPFLNKVVSTTTNIVTRCLNRVCTNYMPYFFTLLLQLCTFTRSTNSRIKASMPTTIAKNTVKSVGKFCLEASFNYLKSPNFSKLINIIIWFLLLSVCLGSLIYSTAALGVLMSNLGMPSYCTGYREGYLNSTNVTIATYCTGSISCSVCLSGLDSLDTYPSLETIQITISSFKWDLTAFGLVAEWFLAYILFTRFFYVLGLAAIMQLFFSYFAVHFISNSWLMWLIINLVQMAPISAMVRMYIFFASFYYVWKSYVHVVDGCNSSTCMMCYKRNRATRVECTTIVNGVRRSFYVYANGGKGFCKLHNWNCVNCDTFCAGSTFISDEVARDLSLQFKRPINPTDQSSYIVDSVTVKNGSIHLYFDKAGQKTYERHSLSHFVNLDNLRANNTKGSLPINVIVFDGKSKCEESSAKSASVYYSQLMCQPILLLDQALVSDVGDSAEVAVKMFDAYVNTFSSTFNVPMEKLKTLVATAEAELAKNVSLDNVLSTFISAARQGFVDSDVETKDVVECLKLSHQSDIEVTGDSCNNYMLTYNKVENMTPRDLGACIDCSARHINAQVAKSHNIALIWNVKDFMSLSEQLRKQIRSAAKKNNLPFKLTCATTRQVVNVVTTKIALKGG

SEQ ID NO: 27952 - protein, 1946 aa, Artificial Sequence; identical to SEQ ID NO: 16318
  SARS-CoV-2/Wuhan-Hu-1__NC_045512.2/MN908947.2__non-structural protein 3 (NSP3) (1-1946)(K838N)

SEQ ID NO: 27953 - protein, 1946 aa, Artificial Sequence
  SARS-CoV-2/Wuhan-Hu-1__NC_045512.2/MN908947.2__non-structural protein 3 (NSP3) (1-1946)(K838N_P1229L_N1779S)
MAPTKVTFGDDTVIEVQGYKSVNITFELDERIDKVLNEKCSAYTVELGTEVNEFACVVADAVIKTLQPVSELLTPLGIDLDEWSMATYYLFDESGEFKLASHMYCSFYPPDEDEEEGDCEEEEFEPSTQYEYGTEDDYQGKPLEFGATSAALQPEEEQEEDWLDDDSQQTVGQQDGSEDNQTTTIQTIVEVQPQLEMELTPVVQTIEVNSFSGYLKLTDNVYIKNADIVEEAKKVKPTVVVNAANVYLKHGGGVAGALNKATNNAMQVESDDYIATNGPLKVGGSCVLSGHNLAKHCLHVVGPNVNKGEDIQLLKSAYENFNQHEVLLAPLLSAGIFGADPIHSLRVCVDTVRTNVYLAVFDKNLYDKLVSSFLEMKSEKQVEQKIAEIPKEEVKPFITESKPSVEQRKQDDKKIKACVEEVTTTLEETKFLTENLLLYIDINGNLHPDSATLVSDIDITFLKKDAPYIVGDVVQEGVLTAVVIPTKKAGGTTEMLAKALRKVPTDNYITTYPGQGLNGYTVEEAKTVLKKCKSAFYILPSIISNEKQEILGTVSWNLREMLAHAEETRKLMPVCVETKAIVSTIQRKYKGIKIQEGVVDYGARFYFYTSKTTVASLINTLNDLNETLVTMPLGYVTHGLNLEEAARYMRSLKVPATVSVSSPDAVTAYNGYLTSSSKTPEEHFIETISLAGSYKDWSYSGQSTQLGIEFLKRGDKSVYYTSNPTTFHLDGEVITFDNLKTLLSLREVRTIKVFTTVDNINLHTQVVDMSMTYGQQFGPTYLDGADVTKIKPHNSHEGKTFYVLPNDDTLRVEAFEYYHTTDPSFLGRYMSALNHTKNWKYPQVNGLTSIKWADNNCYLATALLTLQQIELKFNPPALQDAYYRARAGEAANFCALILAYCNKTVGELGDVRETMSYLFQHANLDSCKRVLNVVCKTCGQQQTTLKGVEAVMYMGTLSYEQFKKGVQIPCTCGKQATKYLVQQESPFVMMSAPPAQYELKHGTFTCASEYTGNYQCGHYKHITSKETLYCIDGALLTKSSEYKGPITDVFYKENSYTTTIKPVTYKLDGVVCTEIDPKLDNYYKKDNSYFTEQPIDLVPNQPYPNASFDNFKFVCDNIKFADDLNQLTGYKKPASRELKVTFFPDLNGDVVAIDYKHYTPSFKKGAKLLHKPIVWHVNNATNKATYKPNTWCIRCLWSTKPVETSNSFDVLKSEDAQGMDNLACEDLKLVSEEVVENPTIQKDVLECNVKTTEVVGDIILKPANNSLKITEEVGHTDLMAAYVDNSSLTIKKPNELSRVLGLKTLATHGLAAVNSVPWDTIANYAKPFLNKVVSTTTNIVTRCLNRVCTNYMPYFFTLLLQLCTFTRSTNSRIKASMPTTIAKNTVKSVGKFCLEASFNYLKSPNFSKLINIIIWFLLLSVCLGSLIYSTAALGVLMSNLGMPSYCTGYREGYLNSTNVTIATYCTGSIPCSVCLSGLDSLDTYPSLETIQITISSFKWDLTAFGLVAEWFLAYILFTRFFYVLGLAAIMQLFFSYFAVHFISNSWLMWLIINLVQMAPISAMVRMYIFFASFYYVWKSYVHVVDGCNSSTCMMCYKRNRATRVECTTIVNGVRRSFYVYANGGKGFCKLHNWNCVNCDTFCAGSTFISDEVARDLSLQFKRPINPTDQSSYIVDSVTVKNGSIHLYFDKAGQKTYERHSLSHFVNLDNLRANNTKGSLPINVIVFDGKSKCEESSAKSASVYYSQLMCQPILLLDQALVSDVGDSAEVAVKMFDAYVSTFSSTFNVPMEKLKTLVATAEAELAKNVSLDNVLSTFISAARQGFVDSDVETKDVVECLKLSHQSDIEVTGDSCNNYMLTYNKVENMTPRDLGACIDCSARHINAQVAKSHNIALIWNVKDFMSLSEQLRKQIRSAAKKNNLPFKLTCATTRQVVNVVTTKIALKGG

SEQ ID NO: 27954 - protein, 1946 aa, Artificial Sequence
  SARS-CoV-2/Wuhan-Hu-1__NC_045512.2/MN908947.2__non-structural protein 3 (NSP3) (1-1946)(K838N_N1779S)
MAPTKVTFGDDTVIEVQGYKSVNITFELDERIDKVLNEKCSAYTVELGTEVNEFACVVADAVIKTLQPVSELLTPLGIDLDEWSMATYYLFDESGEFKLASHMYCSFYPPDEDEEEGDCEEEEFEPSTQYEYGTEDDYQGKPLEFGATSAALQPEEEQEEDWLDDDSQQTVGQQDGSEDNQTTTIQTIVEVQPQLEMELTPVVQTIEVNSFSGYLKLTDNVYIKNADIVEEAKKVKPTVVVNAANVYLKHGGGVAGALNKATNNAMQVESDDYIATNGPLKVGGSCVLSGHNLAKHCLHVVGPNVNKGEDIQLLKSAYENFNQHEVLLAPLLSAGIFGADPIHSLRVCVDTVRTNVYLAVFDKNLYDKLVSSFLEMKSEKQVEQKIAEIPKEEVKPFITESKPSVEQRKQDDKKIKACVEEVTTTLEETKFLTENLLLYIDINGNLHPDSATLVSDIDITFLKKDAPYIVGDVVQEGVLTAVVIPTKKAGGTTEMLAKALRKVPTDNYITTYPGQGLNGYTVEEAKTVLKKCKSAFYILPSIISNEKQEILGTVSWNLREMLAHAEETRKLMPVCVETKAIVSTIQRKYKGIKIQEGVVDYGARFYFYTSKTTVASLINTLNDLNETLVTMPLGYVTHGLNLEEAARYMRSLKVPATVSVSSPDAVTAYNGYLTSSSKTPEEHFIETISLAGSYKDWSYSGQSTQLGIEFLKRGDKSVYYTSNPTTFHLDGEVITFDNLKTLLSLREVRTIKVFTTVDNINLHTQVVDMSMTYGQQFGPTYLDGADVTKIKPHNSHEGKTFYVLPNDDTLRVEAFEYYHTTDPSFLGRYMSALNHTKNWKYPQVNGLTSIKWADNNCYLATALLTLQQIELKFNPPALQDAYYRARAGEAANFCALILAYCNKTVGELGDVRETMSYLFQHANLDSCKRVLNVVCKTCGQQQTTLKGVEAVMYMGTLSYEQFKKGVQIPCTCGKQATKYLVQQESPFVMMSAPPAQYELKHGTFTCASEYTGNYQCGHYKHITSKETLYCIDGALLTKSSEYKGPITDVFYKENSYTTTIKPVTYKLDGVVCTEIDPKLDNYYKKDNSYFTEQPIDLVPNQPYPNASFDNFKFVCDNIKFADDLNQLTGYKKPASRELKVTFFPDLNGDVVAIDYKHYTPSFKKGAKLLHKPIVWHVNNATNKATYKPNTWCIRCLWSTKPVETSNSFDVLKSEDAQGMDNLACEDLKPVSEEVVENPTIQKDVLECNVKTTEVVGDIILKPANNSLKITEEVGHTDLMAAYVDNSSLTIKKPNELSRVLGLKTLATHGLAAVNSVPWDTIANYAKPFLNKVVSTTTNIVTRCLNRVCTNYMPYFFTLLLQLCTFTRSTNSRIKASMPTTIAKNTVKSVGKFCLEASFNYLKSPNFSKLINIIIWFLLLSVCLGSLIYSTAALGVLMSNLGMPSYCTGYREGYLNSTNVTIATYCTGSIPCSVCLSGLDSLDTYPSLETIQITISSFKWDLTAFGLVAEWFLAYILFTRFFYVLGLAAIMQLFFSYFAVHFISNSWLMWLIINLVQMAPISAMVRMYIFFASFYYVWKSYVHVVDGCNSSTCMMCYKRNRATRVECTTIVNGVRRSFYVYANGGKGFCKLHNWNCVNCDTFCAGSTFISDEVARDLSLQFKRPINPTDQSSYIVDSVTVKNGSIHLYFDKAGQKTYERHSLSHFVNLDNLRANNTKGSLPINVIVFDGKSKCEESSAKSASVYYSQLMCQPILLLDQALVSDVGDSAEVAVKMFDAYVSTFSSTFNVPMEKLKTLVATAEAELAKNVSLDNVLSTFISAARQGFVDSDVETKDVVECLKLSHQSDIEVTGDSCNNYMLTYNKVENMTPRDLGACIDCSARHINAQVAKSHNIALIWNVKDFMSLSEQLRKQIRSAAKKNNLPFKLTCATTRQVVNVVTTKIALKGG

SEQ ID NO: 27955 - protein, 1946 aa, Artificial Sequence
  SARS-CoV-2/Wuhan-Hu-1__NC_045512.2/MN908947.2__non-structural protein 3 (NSP3) (1-1946)(A489S_P1229L_P1470S_A1712V)
MAPTKVTFGDDTVIEVQGYKSVNITFELDERIDKVLNEKCSAYTVELGTEVNEFACVVADAVIKTLQPVSELLTPLGIDLDEWSMATYYLFDESGEFKLASHMYCSFYPPDEDEEEGDCEEEEFEPSTQYEYGTEDDYQGKPLEFGATSAALQPEEEQEEDWLDDDSQQTVGQQDGSEDNQTTTIQTIVEVQPQLEMELTPVVQTIEVNSFSGYLKLTDNVYIKNADIVEEAKKVKPTVVVNAANVYLKHGGGVAGALNKATNNAMQVESDDYIATNGPLKVGGSCVLSGHNLAKHCLHVVGPNVNKGEDIQLLKSAYENFNQHEVLLAPLLSAGIFGADPIHSLRVCVDTVRTNVYLAVFDKNLYDKLVSSFLEMKSEKQVEQKIAEIPKEEVKPFITESKPSVEQRKQDDKKIKACVEEVTTTLEETKFLTENLLLYIDINGNLHPDSATLVSDIDITFLKKDAPYIVGDVVQEGVLTAVVIPTKKSGGTTEMLAKALRKVPTDNYITTYPGQGLNGYTVEEAKTVLKKCKSAFYILPSIISNEKQEILGTVSWNLREMLAHAEETRKLMPVCVETKAIVSTIQRKYKGIKIQEGVVDYGARFYFYTSKTTVASLINTLNDLNETLVTMPLGYVTHGLNLEEAARYMRSLKVPATVSVSSPDAVTAYNGYLTSSSKTPEEHFIETISLAGSYKDWSYSGQSTQLGIEFLKRGDKSVYYTSNPTTFHLDGEVITFDNLKTLLSLREVRTIKVFTTVDNINLHTQVVDMSMTYGQQFGPTYLDGADVTKIKPHNSHEGKTFYVLPNDDTLRVEAFEYYHTTDPSFLGRYMSALNHTKKWKYPQVNGLTSIKWADNNCYLATALLTLQQIELKFNPPALQDAYYRARAGEAANFCALILAYCNKTVGELGDVRETMSYLFQHANLDSCKRVLNVVCKTCGQQQTTLKGVEAVMYMGTLSYEQFKKGVQIPCTCGKQATKYLVQQESPFVMMSAPPAQYELKHGTFTCASEYTGNYQCGHYKHITSKETLYCIDGALLTKSSEYKGPITDVFYKENSYTTTIKPVTYKLDGVVCTEIDPKLDNYYKKDNSYFTEQPIDLVPNQPYPNASFDNFKFVCDNIKFADDLNQLTGYKKPASRELKVTFFPDLNGDVVAIDYKHYTPSFKKGAKLLHKPIVWHVNNATNKATYKPNTWCIRCLWSTKPVETSNSFDVLKSEDAQGMDNLACEDLKLVSEEVVENPTIQKDVLECNVKTTEVVGDIILKPANNSLKITEEVGHTDLMAAYVDNSSLTIKKPNELSRVLGLKTLATHGLAAVNSVPWDTIANYAKPFLNKVVSTTTNIVTRCLNRVCTNYMPYFFTLLLQLCTFTRSTNSRIKASMPTTIAKNTVKSVGKFCLEASFNYLKSPNFSKLINIIIWFLLLSVCLGSLIYSTAALGVLMSNLGMPSYCTGYREGYLNSTNVTIATYCTGSISCSVCLSGLDSLDTYPSLETIQITISSFKWDLTAFGLVAEWFLAYILFTRFFYVLGLAAIMQLFFSYFAVHFISNSWLMWLIINLVQMAPISAMVRMYIFFASFYYVWKSYVHVVDGCNSSTCMMCYKRNRATRVECTTIVNGVRRSFYVYANGGKGFCKLHNWNCVNCDTFCAGSTFISDEVARDLSLQFKRPINPTDQSSYIVDSVTVKNGSIHLYFDKAGQKTYERHSLSHFVNLDNLRVNNTKGSLPINVIVFDGKSKCEESSAKSASVYYSQLMCQPILLLDQALVSDVGDSAEVAVKMFDAYVNTFSSTFNVPMEKLKTLVATAEAELAKNVSLDNVLSTFISAARQGFVDSDVETKDVVECLKLSHQSDIEVTGDSCNNYMLTYNKVENMTPRDLGACIDCSARHINAQVAKSHNIALIWNVKDFMSLSEQLRKQIRSAAKKNNLPFKLTCATTRQVVNVVTTKIALKGG

SEQ ID NO: 27956 - protein, 1946 aa, Artificial Sequence
  SARS-CoV-2/Wuhan-Hu-1__NC_045512.2/MN908947.2__non-structural protein 3 (NSP3) (1-1946)(S795L_K838N)
MAPTKVTFGDDTVIEVQGYKSVNITFELDERIDKVLNEKCSAYTVELGTEVNEFACVVADAVIKTLQPVSELLTPLGIDLDEWSMATYYLFDESGEFKLASHMYCSFYPPDEDEEEGDCEEEEFEPSTQYEYGTEDDYQGKPLEFGATSAALQPEEEQEEDWLDDDSQQTVGQQDGSEDNQTTTIQTIVEVQPQLEMELTPVVQTIEVNSFSGYLKLTDNVYIKNADIVEEAKKVKPTVVVNAANVYLKHGGGVAGALNKATNNAMQVESDDYIATNGPLKVGGSCVLSGHNLAKHCLHVVGPNVNKGEDIQLLKSAYENFNQHEVLLAPLLSAGIFGADPIHSLRVCVDTVRTNVYLAVFDKNLYDKLVSSFLEMKSEKQVEQKIAEIPKEEVKPFITESKPSVEQRKQDDKKIKACVEEVTTTLEETKFLTENLLLYIDINGNLHPDSATLVSDIDITFLKKDAPYIVGDVVQEGVLTAVVIPTKKAGGTTEMLAKALRKVPTDNYITTYPGQGLNGYTVEEAKTVLKKCKSAFYILPSIISNEKQEILGTVSWNLREMLAHAEETRKLMPVCVETKAIVSTIQRKYKGIKIQEGVVDYGARFYFYTSKTTVASLINTLNDLNETLVTMPLGYVTHGLNLEEAARYMRSLKVPATVSVSSPDAVTAYNGYLTSSSKTPEEHFIETISLAGSYKDWSYSGQSTQLGIEFLKRGDKSVYYTSNPTTFHLDGEVITFDNLKTLLSLREVRTIKVFTTVDNINLHTQVVDMSMTYGQQFGPTYLDGADVTKIKPHNLHEGKTFYVLPNDDTLRVEAFEYYHTTDPSFLGRYMSALNHTKNWKYPQVNGLTSIKWADNNCYLATALLTLQQIELKFNPPALQDAYYRARAGEAANFCALILAYCNKTVGELGDVRETMSYLFQHANLDSCKRVLNVVCKTCGQQQTTLKGVEAVMYMGTLSYEQFKKGVQIPCTCGKQATKYLVQQESPFVMMSAPPAQYELKHGTFTCASEYTGNYQCGHYKHITSKETLYCIDGALLTKSSEYKGPITDVFYKENSYTTTIKPVTYKLDGVVCTEIDPKLDNYYKKDNSYFTEQPIDLVPNQPYPNASFDNFKFVCDNIKFADDLNQLTGYKKPASRELKVTFFPDLNGDVVAIDYKHYTPSFKKGAKLLHKPIVWHVNNATNKATYKPNTWCIRCLWSTKPVETSNSFDVLKSEDAQGMDNLACEDLKPVSEEVVENPTIQKDVLECNVKTTEVVGDIILKPANNSLKITEEVGHTDLMAAYVDNSSLTIKKPNELSRVLGLKTLATHGLAAVNSVPWDTIANYAKPFLNKVVSTTTNIVTRCLNRVCTNYMPYFFTLLLQLCTFTRSTNSRIKASMPTTIAKNTVKSVGKFCLEASFNYLKSPNFSKLINIIIWFLLLSVCLGSLIYSTAALGVLMSNLGMPSYCTGYREGYLNSTNVTIATYCTGSIPCSVCLSGLDSLDTYPSLETIQITISSFKWDLTAFGLVAEWFLAYILFTRFFYVLGLAAIMQLFFSYFAVHFISNSWLMWLIINLVQMAPISAMVRMYIFFASFYYVWKSYVHVVDGCNSSTCMMCYKRNRATRVECTTIVNGVRRSFYVYANGGKGFCKLHNWNCVNCDTFCAGSTFISDEVARDLSLQFKRPINPTDQSSYIVDSVTVKNGSIHLYFDKAGQKTYERHSLSHFVNLDNLRANNTKGSLPINVIVFDGKSKCEESSAKSASVYYSQLMCQPILLLDQALVSDVGDSAEVAVKMFDAYVNTFSSTFNVPMEKLKTLVATAEAELAKNVSLDNVLSTFISAARQGFVDSDVETKDVVECLKLSHQSDIEVTGDSCNNYMLTYNKVENMTPRDLGACIDCSARHINAQVAKSHNIALIWNVKDFMSLSEQLRKQIRSAAKKNNLPFKLTCATTRQVVNVVTTKIALKGG

SEQ ID NO: 27957 - protein, 1946 aa, Artificial Sequence
  SARS-CoV-2/Wuhan-Hu-1__NC_045512.2/MN908947.2__non-structural protein 3 (NSP3) (1-1946)(A42V_T429I_D822N_P1470S)
MAPTKVTFGDDTVIEVQGYKSVNITFELDERIDKVLNEKCSVYTVELGTEVNEFACVVADAVIKTLQPVSELLTPLGIDLDEWSMATYYLFDESGEFKLASHMYCSFYPPDEDEEEGDCEEEEFEPSTQYEYGTEDDYQGKPLEFGATSAALQPEEEQEEDWLDDDSQQTVGQQDGSEDNQTTTIQTIVEVQPQLEMELTPVVQTIEVNSFSGYLKLTDNVYIKNADIVEEAKKVKPTVVVNAANVYLKHGGGVAGALNKATNNAMQVESDDYIATNGPLKVGGSCVLSGHNLAKHCLHVVGPNVNKGEDIQLLKSAYENFNQHEVLLAPLLSAGIFGADPIHSLRVCVDTVRTNVYLAVFDKNLYDKLVSSFLEMKSEKQVEQKIAEIPKEEVKPFITESKPSVEQRKQDDKKIKACVEEVTTTLEEIKFLTENLLLYIDINGNLHPDSATLVSDIDITFLKKDAPYIVGDVVQEGVLTAVVIPTKKAGGTTEMLAKALRKVPTDNYITTYPGQGLNGYTVEEAKTVLKKCKSAFYILPSIISNEKQEILGTVSWNLREMLAHAEETRKLMPVCVETKAIVSTIQRKYKGIKIQEGVVDYGARFYFYTSKTTVASLINTLNDLNETLVTMPLGYVTHGLNLEEAARYMRSLKVPATVSVSSPDAVTAYNGYLTSSSKTPEEHFIETISLAGSYKDWSYSGQSTQLGIEFLKRGDKSVYYTSNPTTFHLDGEVITFDNLKTLLSLREVRTIKVFTTVDNINLHTQVVDMSMTYGQQFGPTYLDGADVTKIKPHNSHEGKTFYVLPNDDTLRVEAFEYYHTTNPSFLGRYMSALNHTKKWKYPQVNGLTSIKWADNNCYLATALLTLQQIELKFNPPALQDAYYRARAGEAANFCALILAYCNKTVGELGDVRETMSYLFQHANLDSCKRVLNVVCKTCGQQQTTLKGVEAVMYMGTLSYEQFKKGVQIPCTCGKQATKYLVQQESPFVMMSAPPAQYELKHGTFTCASEYTGNYQCGHYKHITSKETLYCIDGALLTKSSEYKGPITDVFYKENSYTTTIKPVTYKLDGVVCTEIDPKLDNYYKKDNSYFTEQPIDLVPNQPYPNASFDNFKFVCDNIKFADDLNQLTGYKKPASRELKVTFFPDLNGDVVAIDYKHYTPSFKKGAKLLHKPIVWHVNNATNKATYKPNTWCIRCLWSTKPVETSNSFDVLKSEDAQGMDNLACEDLKPVSEEVVENPTIQKDVLECNVKTTEVVGDIILKPANNSLKITEEVGHTDLMAAYVDNSSLTIKKPNELSRVLGLKTLATHGLAAVNSVPWDTIANYAKPFLNKVVSTTTNIVTRCLNRVCTNYMPYFFTLLLQLCTFTRSTNSRIKASMPTTIAKNTVKSVGKFCLEASFNYLKSPNFSKLINIIIWFLLLSVCLGSLIYSTAALGVLMSNLGMPSYCTGYREGYLNSTNVTIATYCTGSISCSVCLSGLDSLDTYPSLETIQITISSFKWDLTAFGLVAEWFLAYILFTRFFYVLGLAAIMQLFFSYFAVHFISNSWLMWLIINLVQMAPISAMVRMYIFFASFYYVWKSYVHVVDGCNSSTCMMCYKRNRATRVECTTIVNGVRRSFYVYANGGKGFCKLHNWNCVNCDTFCAGSTFISDEVARDLSLQFKRPINPTDQSSYIVDSVTVKNGSIHLYFDKAGQKTYERHSLSHFVNLDNLRANNTKGSLPINVIVFDGKSKCEESSAKSASVYYSQLMCQPILLLDQALVSDVGDSAEVAVKMFDAYVNTFSSTFNVPMEKLKTLVATAEAELAKNVSLDNVLSTFISAARQGFVDSDVETKDVVECLKLSHQSDIEVTGDSCNNYMLTYNKVENMTPRDLGACIDCSARHINAQVAKSHNIALIWNVKDFMSLSEQLRKQIRSAAKKNNLPFKLTCATTRQVVNVVTTKIALKGG

SEQ ID NO: 27958 - protein, 1946 aa, Artificial Sequence
  SARS-CoV-2/Wuhan-Hu-1__NC_045512.2/MN908947.2__non-structural protein 3 (NSP3) (1-1946)(T238A_T721I_N1330D)
MAPTKVTFGDDTVIEVQGYKSVNITFELDERIDKVLNEKCSAYTVELGTEVNEFACVVADAVIKTLQPVSELLTPLGIDLDEWSMATYYLFDESGEFKLASHMYCSFYPPDEDEEEGDCEEEEFEPSTQYEYGTEDDYQGKPLEFGATSAALQPEEEQEEDWLDDDSQQTVGQQDGSEDNQTTTIQTIVEVQPQLEMELTPVVQTIEVNSFSGYLKLTDNVYIKNADIVEEAKKVKPAVVVNAANVYLKHGGGVAGALNKATNNAMQVESDDYIATNGPLKVGGSCVLSGHNLAKHCLHVVGPNVNKGEDIQLLKSAYENFNQHEVLLAPLLSAGIFGADPIHSLRVCVDTVRTNVYLAVFDKNLYDKLVSSFLEMKSEKQVEQKIAEIPKEEVKPFITESKPSVEQRKQDDKKIKACVEEVTTTLEETKFLTENLLLYIDINGNLHPDSATLVSDIDITFLKKDAPYIVGDVVQEGVLTAVVIPTKKAGGTTEMLAKALRKVPTDNYITTYPGQGLNGYTVEEAKTVLKKCKSAFYILPSIISNEKQEILGTVSWNLREMLAHAEETRKLMPVCVETKAIVSTIQRKYKGIKIQEGVVDYGARFYFYTSKTTVASLINTLNDLNETLVTMPLGYVTHGLNLEEAARYMRSLKVPATVSVSSPDAVTAYNGYLTSSSKTPEEHFIETISLAGSYKDWSYSGQSTQLGIEFLKRGDKSVYYISNPTTFHLDGEVITFDNLKTLLSLREVRTIKVFTTVDNINLHTQVVDMSMTYGQQFGPTYLDGADVTKIKPHNSHEGKTFYVLPNDDTLRVEAFEYYHTTDPSFLGRYMSALNHTKKWKYPQVNGLTSIKWADNNCYLATALLTLQQIELKFNPPALQDAYYRARAGEAANFCALILAYCNKTVGELGDVRETMSYLFQHANLDSCKRVLNVVCKTCGQQQTTLKGVEAVMYMGTLSYEQFKKGVQIPCTCGKQATKYLVQQESPFVMMSAPPAQYELKHGTFTCASEYTGNYQCGHYKHITSKETLYCIDGALLTKSSEYKGPITDVFYKENSYTTTIKPVTYKLDGVVCTEIDPKLDNYYKKDNSYFTEQPIDLVPNQPYPNASFDNFKFVCDNIKFADDLNQLTGYKKPASRELKVTFFPDLNGDVVAIDYKHYTPSFKKGAKLLHKPIVWHVNNATNKATYKPNTWCIRCLWSTKPVETSNSFDVLKSEDAQGMDNLACEDLKPVSEEVVENPTIQKDVLECNVKTTEVVGDIILKPANNSLKITEEVGHTDLMAAYVDNSSLTIKKPNELSRVLGLKTLATHGLAAVNSVPWDTIANYAKPFLDKVVSTTTNIVTRCLNRVCTNYMPYFFTLLLQLCTFTRSTNSRIKASMPTTIAKNTVKSVGKFCLEASFNYLKSPNFSKLINIIIWFLLLSVCLGSLIYSTAALGVLMSNLGMPSYCTGYREGYLNSTNVTIATYCTGSIPCSVCLSGLDSLDTYPSLETIQITISSFKWDLTAFGLVAEWFLAYILFTRFFYVLGLAAIMQLFFSYFAVHFISNSWLMWLIINLVQMAPISAMVRMYIFFASFYYVWKSYVHVVDGCNSSTCMMCYKRNRATRVECTTIVNGVRRSFYVYANGGKGFCKLHNWNCVNCDTFCAGSTFISDEVARDLSLQFKRPINPTDQSSYIVDSVTVKNGSIHLYFDKAGQKTYERHSLSHFVNLDNLRANNTKGSLPINVIVFDGKSKCEESSAKSASVYYSQLMCQPILLLDQALVSDVGDSAEVAVKMFDAYVNTFSSTFNVPMEKLKTLVATAEAELAKNVSLDNVLSTFISAARQGFVDSDVETKDVVECLKLSHQSDIEVTGDSCNNYMLTYNKVENMTPRDLGACIDCSARHINAQVAKSHNIALIWNVKDFMSLSEQLRKQIRSAAKKNNLPFKLTCATTRQVVNVVTTKIALKGG

SEQ ID NO: 27959 - protein, 1946 aa, Artificial Sequence
  SARS-CoV-2/Wuhan-Hu-1__NC_045512.2/MN908947.2__non-structural protein 3 (NSP3) (1-1946)(H343Y_P823L_K928I_N1588S)
MAPTKVTFGDDTVIEVQGYKSVNITFELDERIDKVLNEKCSAYTVELGTEVNEFACVVADAVIKTLQPVSELLTPLGIDLDEWSMATYYLFDESGEFKLASHMYCSFYPPDEDEEEGDCEEEEFEPSTQYEYGTEDDYQGKPLEFGATSAALQPEEEQEEDWLDDDSQQTVGQQDGSEDNQTTTIQTIVEVQPQLEMELTPVVQTIEVNSFSGYLKLTDNVYIKNADIVEEAKKVKPTVVVNAANVYLKHGGGVAGALNKATNNAMQVESDDYIATNGPLKVGGSCVLSGHNLAKHCLHVVGPNVNKGEDIQLLKSAYENFNQHEVLLAPLLSAGIFGADPIYSLRVCVDTVRTNVYLAVFDKNLYDKLVSSFLEMKSEKQVEQKIAEIPKEEVKPFITESKPSVEQRKQDDKKIKACVEEVTTTLEETKFLTENLLLYIDINGNLHPDSATLVSDIDITFLKKDAPYIVGDVVQEGVLTAVVIPTKKAGGTTEMLAKALRKVPTDNYITTYPGQGLNGYTVEEAKTVLKKCKSAFYILPSIISNEKQEILGTVSWNLREMLAHAEETRKLMPVCVETKAIVSTIQRKYKGIKIQEGVVDYGARFYFYTSKTTVASLINTLNDLNETLVTMPLGYVTHGLNLEEAARYMRSLKVPATVSVSSPDAVTAYNGYLTSSSKTPEEHFIETISLAGSYKDWSYSGQSTQLGIEFLKRGDKSVYYTSNPTTFHLDGEVITFDNLKTLLSLREVRTIKVFTTVDNINLHTQVVDMSMTYGQQFGPTYLDGADVTKIKPHNSHEGKTFYVLPNDDTLRVEAFEYYHTTDLSFLGRYMSALNHTKKWKYPQVNGLTSIKWADNNCYLATALLTLQQIELKFNPPALQDAYYRARAGEAANFCALILAYCNKTVGELGDVRETMSYLFQHANLDSCIRVLNVVCKTCGQQQTTLKGVEAVMYMGTLSYEQFKKGVQIPCTCGKQATKYLVQQESPFVMMSAPPAQYELKHGTFTCASEYTGNYQCGHYKHITSKETLYCIDGALLTKSSEYKGPITDVFYKENSYTTTIKPVTYKLDGVVCTEIDPKLDNYYKKDNSYFTEQPIDLVPNQPYPNASFDNFKFVCDNIKFADDLNQLTGYKKPASRELKVTFFPDLNGDVVAIDYKHYTPSFKKGAKLLHKPIVWHVNNATNKATYKPNTWCIRCLWSTKPVETSNSFDVLKSEDAQGMDNLACEDLKPVSEEVVENPTIQKDVLECNVKTTEVVGDIILKPANNSLKITEEVGHTDLMAAYVDNSSLTIKKPNELSRVLGLKTLATHGLAAVNSVPWDTIANYAKPFLNKVVSTTTNIVTRCLNRVCTNYMPYFFTLLLQLCTFTRSTNSRIKASMPTTIAKNTVKSVGKFCLEASFNYLKSPNFSKLINIIIWFLLLSVCLGSLIYSTAALGVLMSNLGMPSYCTGYREGYLNSTNVTIATYCTGSIPCSVCLSGLDSLDTYPSLETIQITISSFKWDLTAFGLVAEWFLAYILFTRFFYVLGLAAIMQLFFSYFAVHFISNSWLMWLIINLVQMAPISAMVRMYIFFASFYYVWKSYVHVVDGCSSSTCMMCYKRNRATRVECTTIVNGVRRSFYVYANGGKGFCKLHNWNCVNCDTFCAGSTFISDEVARDLSLQFKRPINPTDQSSYIVDSVTVKNGSIHLYFDKAGQKTYERHSLSHFVNLDNLRANNTKGSLPINVIVFDGKSKCEESSAKSASVYYSQLMCQPILLLDQALVSDVGDSAEVAVKMFDAYVNTFSSTFNVPMEKLKTLVATAEAELAKNVSLDNVLSTFISAARQGFVDSDVETKDVVECLKLSHQSDIEVTGDSCNNYMLTYNKVENMTPRDLGACIDCSARHINAQVAKSHNIALIWNVKDFMSLSEQLRKQIRSAAKKNNLPFKLTCATTRQVVNVVTTKIALKGG

SEQ ID NO: 27960 - protein, 1946 aa, Artificial Sequence
  SARS-CoV-2/Wuhan-Hu-1__NC_045512.2/MN908947.2__non-structural protein 3 (NSP3) (1-1946)(E379V_K1694N)
MAPTKVTFGDDTVIEVQGYKSVNITFELDERIDKVLNEKCSAYTVELGTEVNEFACVVADAVIKTLQPVSELLTPLGIDLDEWSMATYYLFDESGEFKLASHMYCSFYPPDEDEEEGDCEEEEFEPSTQYEYGTEDDYQGKPLEFGATSAALQPEEEQEEDWLDDDSQQTVGQQDGSEDNQTTTIQTIVEVQPQLEMELTPVVQTIEVNSFSGYLKLTDNVYIKNADIVEEAKKVKPTVVVNAANVYLKHGGGVAGALNKATNNAMQVESDDYIATNGPLKVGGSCVLSGHNLAKHCLHVVGPNVNKGEDIQLLKSAYENFNQHEVLLAPLLSAGIFGADPIHSLRVCVDTVRTNVYLAVFDKNLYDKLVSSFLEMKSVKQVEQKIAEIPKEEVKPFITESKPSVEQRKQDDKKIKACVEEVTTTLEETKFLTENLLLYIDINGNLHPDSATLVSDIDITFLKKDAPYIVGDVVQEGVLTAVVIPTKKAGGTTEMLAKALRKVPTDNYITTYPGQGLNGYTVEEAKTVLKKCKSAFYILPSIISNEKQEILGTVSWNLREMLAHAEETRKLMPVCVETKAIVSTIQRKYKGIKIQEGVVDYGARFYFYTSKTTVASLINTLNDLNETLVTMPLGYVTHGLNLEEAARYMRSLKVPATVSVSSPDAVTAYNGYLTSSSKTPEEHFIETISLAGSYKDWSYSGQSTQLGIEFLKRGDKSVYYTSNPTTFHLDGEVITFDNLKTLLSLREVRTIKVFTTVDNINLHTQVVDMSMTYGQQFGPTYLDGADVTKIKPHNSHEGKTFYVLPNDDTLRVEAFEYYHTTDPSFLGRYMSALNHTKKWKYPQVNGLTSIKWADNNCYLATALLTLQQIELKFNPPALQDAYYRARAGEAANFCALILAYCNKTVGELGDVRETMSYLFQHANLDSCKRVLNVVCKTCGQQQTTLKGVEAVMYMGTLSYEQFKKGVQIPCTCGKQATKYLVQQESPFVMMSAPPAQYELKHGTFTCASEYTGNYQCGHYKHITSKETLYCIDGALLTKSSEYKGPITDVFYKENSYTTTIKPVTYKLDGVVCTEIDPKLDNYYKKDNSYFTEQPIDLVPNQPYPNASFDNFKFVCDNIKFADDLNQLTGYKKPASRELKVTFFPDLNGDVVAIDYKHYTPSFKKGAKLLHKPIVWHVNNATNKATYKPNTWCIRCLWSTKPVETSNSFDVLKSEDAQGMDNLACEDLKPVSEEVVENPTIQKDVLECNVKTTEVVGDIILKPANNSLKITEEVGHTDLMAAYVDNSSLTIKKPNELSRVLGLKTLATHGLAAVNSVPWDTIANYAKPFLNKVVSTTTNIVTRCLNRVCTNYMPYFFTLLLQLCTFTRSTNSRIKASMPTTIAKNTVKSVGKFCLEASFNYLKSPNFSKLINIIIWFLLLSVCLGSLIYSTAALGVLMSNLGMPSYCTGYREGYLNSTNVTIATYCTGSIPCSVCLSGLDSLDTYPSLETIQITISSFKWDLTAFGLVAEWFLAYILFTRFFYVLGLAAIMQLFFSYFAVHFISNSWLMWLIINLVQMAPISAMVRMYIFFASFYYVWKSYVHVVDGCNSSTCMMCYKRNRATRVECTTIVNGVRRSFYVYANGGKGFCKLHNWNCVNCDTFCAGSTFISDEVARDLSLQFKRPINPTDQSSYIVDSVTVKNGSIHLYFDKAGQNTYERHSLSHFVNLDNLRANNTKGSLPINVIVFDGKSKCEESSAKSASVYYSQLMCQPILLLDQALVSDVGDSAEVAVKMFDAYVNTFSSTFNVPMEKLKTLVATAEAELAKNVSLDNVLSTFISAARQGFVDSDVETKDVVECLKLSHQSDIEVTGDSCNNYMLTYNKVENMTPRDLGACIDCSARHINAQVAKSHNIALIWNVKDFMSLSEQLRKQIRSAAKKNNLPFKLTCATTRQVVNVVTTKIALKGG

SEQ ID NO: 27961 - protein, 1946 aa, Artificial Sequence
  SARS-CoV-2/Wuhan-Hu-1__NC_045512.2/MN908947.2__non-structural protein 3 (NSP3) (1-1946)(T429I_P1470S_F1570V)
MAPTKVTFGDDTVIEVQGYKSVNITFELDERIDKVLNEKCSAYTVELGTEVNEFACVVADAVIKTLQPVSELLTPLGIDLDEWSMATYYLFDESGEFKLASHMYCSFYPPDEDEEEGDCEEEEFEPSTQYEYGTEDDYQGKPLEFGATSAALQPEEEQEEDWLDDDSQQTVGQQDGSEDNQTTTIQTIVEVQPQLEMELTPVVQTIEVNSFSGYLKLTDNVYIKNADIVEEAKKVKPTVVVNAANVYLKHGGGVAGALNKATNNAMQVESDDYIATNGPLKVGGSCVLSGHNLAKHCLHVVGPNVNKGEDIQLLKSAYENFNQHEVLLAPLLSAGIFGADPIHSLRVCVDTVRTNVYLAVFDKNLYDKLVSSFLEMKSEKQVEQKIAEIPKEEVKPFITESKPSVEQRKQDDKKIKACVEEVTTTLEEIKFLTENLLLYIDINGNLHPDSATLVSDIDITFLKKDAPYIVGDVVQEGVLTAVVIPTKKAGGTTEMLAKALRKVPTDNYITTYPGQGLNGYTVEEAKTVLKKCKSAFYILPSIISNEKQEILGTVSWNLREMLAHAEETRKLMPVCVETKAIVSTIQRKYKGIKIQEGVVDYGARFYFYTSKTTVASLINTLNDLNETLVTMPLGYVTHGLNLEEAARYMRSLKVPATVSVSSPDAVTAYNGYLTSSSKTPEEHFIETISLAGSYKDWSYSGQSTQLGIEFLKRGDKSVYYTSNPTTFHLDGEVITFDNLKTLLSLREVRTIKVFTTVDNINLHTQVVDMSMTYGQQFGPTYLDGADVTKIKPHNSHEGKTFYVLPNDDTLRVEAFEYYHTTDPSFLGRYMSALNHTKKWKYPQVNGLTSIKWADNNCYLATALLTLQQIELKFNPPALQDAYYRARAGEAANFCALILAYCNKTVGELGDVRETMSYLFQHANLDSCKRVLNVVCKTCGQQQTTLKGVEAVMYMGTLSYEQFKKGVQIPCTCGKQATKYLVQQESPFVMMSAPPAQYELKHGTFTCASEYTGNYQCGHYKHITSKETLYCIDGALLTKSSEYKGPITDVFYKENSYTTTIKPVTYKLDGVVCTEIDPKLDNYYKKDNSYFTEQPIDLVPNQPYPNASFDNFKFVCDNIKFADDLNQLTGYKKPASRELKVTFFPDLNGDVVAIDYKHYTPSFKKGAKLLHKPIVWHVNNATNKATYKPNTWCIRCLWSTKPVETSNSFDVLKSEDAQGMDNLACEDLKPVSEEVVENPTIQKDVLECNVKTTEVVGDIILKPANNSLKITEEVGHTDLMAAYVDNSSLTIKKPNELSRVLGLKTLATHGLAAVNSVPWDTIANYAKPFLNKVVSTTTNIVTRCLNRVCTNYMPYFFTLLLQLCTFTRSTNSRIKASMPTTIAKNTVKSVGKFCLEASFNYLKSPNFSKLINIIIWFLLLSVCLGSLIYSTAALGVLMSNLGMPSYCTGYREGYLNSTNVTIATYCTGSISCSVCLSGLDSLDTYPSLETIQITISSFKWDLTAFGLVAEWFLAYILFTRFFYVLGLAAIMQLFFSYFAVHFISNSWLMWLIINLVQMAPISAMVRMYIFVASFYYVWKSYVHVVDGCNSSTCMMCYKRNRATRVECTTIVNGVRRSFYVYANGGKGFCKLHNWNCVNCDTFCAGSTFISDEVARDLSLQFKRPINPTDQSSYIVDSVTVKNGSIHLYFDKAGQKTYERHSLSHFVNLDNLRANNTKGSLPINVIVFDGKSKCEESSAKSASVYYSQLMCQPILLLDQALVSDVGDSAEVAVKMFDAYVNTFSSTFNVPMEKLKTLVATAEAELAKNVSLDNVLSTFISAARQGFVDSDVETKDVVECLKLSHQSDIEVTGDSCNNYMLTYNKVENMTPRDLGACIDCSARHINAQVAKSHNIALIWNVKDFMSLSEQLRKQIRSAAKKNNLPFKLTCATTRQVVNVVTTKIALKGG

SEQ ID NO: 27962 - protein, 1946 aa, Artificial Sequence
  SARS-CoV-2/Wuhan-Hu-1__NC_045512.2/MN908947.2__non-structural protein 3 (NSP3) (1-1946)(D737G_S1808F)
MAPTKVTFGDDTVIEVQGYKSVNITFELDERIDKVLNEKCSAYTVELGTEVNEFACVVADAVIKTLQPVSELLTPLGIDLDEWSMATYYLFDESGEFKLASHMYCSFYPPDEDEEEGDCEEEEFEPSTQYEYGTEDDYQGKPLEFGATSAALQPEEEQEEDWLDDDSQQTVGQQDGSEDNQTTTIQTIVEVQPQLEMELTPVVQTIEVNSFSGYLKLTDNVYIKNADIVEEAKKVKPTVVVNAANVYLKHGGGVAGALNKATNNAMQVESDDYIATNGPLKVGGSCVLSGHNLAKHCLHVVGPNVNKGEDIQLLKSAYENFNQHEVLLAPLLSAGIFGADPIHSLRVCVDTVRTNVYLAVFDKNLYDKLVSSFLEMKSEKQVEQKIAEIPKEEVKPFITESKPSVEQRKQDDKKIKACVEEVTTTLEETKFLTENLLLYIDINGNLHPDSATLVSDIDITFLKKDAPYIVGDVVQEGVLTAVVIPTKKAGGTTEMLAKALRKVPTDNYITTYPGQGLNGYTVEEAKTVLKKCKSAFYILPSIISNEKQEILGTVSWNLREMLAHAEETRKLMPVCVETKAIVSTIQRKYKGIKIQEGVVDYGARFYFYTSKTTVASLINTLNDLNETLVTMPLGYVTHGLNLEEAARYMRSLKVPATVSVSSPDAVTAYNGYLTSSSKTPEEHFIETISLAGSYKDWSYSGQSTQLGIEFLKRGDKSVYYTSNPTTFHLDGEVITFGNLKTLLSLREVRTIKVFTTVDNINLHTQVVDMSMTYGQQFGPTYLDGADVTKIKPHNSHEGKTFYVLPNDDTLRVEAFEYYHTTDPSFLGRYMSALNHTKKWKYPQVNGLTSIKWADNNCYLATALLTLQQIELKFNPPALQDAYYRARAGEAANFCALILAYCNKTVGELGDVRETMSYLFQHANLDSCKRVLNVVCKTCGQQQTTLKGVEAVMYMGTLSYEQFKKGVQIPCTCGKQATKYLVQQESPFVMMSAPPAQYELKHGTFTCASEYTGNYQCGHYKHITSKETLYCIDGALLTKSSEYKGPITDVFYKENSYTTTIKPVTYKLDGVVCTEIDPKLDNYYKKDNSYFTEQPIDLVPNQPYPNASFDNFKFVCDNIKFADDLNQLTGYKKPASRELKVTFFPDLNGDVVAIDYKHYTPSFKKGAKLLHKPIVWHVNNATNKATYKPNTWCIRCLWSTKPVETSNSFDVLKSEDAQGMDNLACEDLKPVSEEVVENPTIQKDVLECNVKTTEVVGDIILKPANNSLKITEEVGHTDLMAAYVDNSSLTIKKPNELSRVLGLKTLATHGLAAVNSVPWDTIANYAKPFLNKVVSTTTNIVTRCLNRVCTNYMPYFFTLLLQLCTFTRSTNSRIKASMPTTIAKNTVKSVGKFCLEASFNYLKSPNFSKLINIIIWFLLLSVCLGSLIYSTAALGVLMSNLGMPSYCTGYREGYLNSTNVTIATYCTGSIPCSVCLSGLDSLDTYPSLETIQITISSFKWDLTAFGLVAEWFLAYILFTRFFYVLGLAAIMQLFFSYFAVHFISNSWLMWLIINLVQMAPISAMVRMYIFFASFYYVWKSYVHVVDGCNSSTCMMCYKRNRATRVECTTIVNGVRRSFYVYANGGKGFCKLHNWNCVNCDTFCAGSTFISDEVARDLSLQFKRPINPTDQSSYIVDSVTVKNGSIHLYFDKAGQKTYERHSLSHFVNLDNLRANNTKGSLPINVIVFDGKSKCEESSAKSASVYYSQLMCQPILLLDQALVSDVGDSAEVAVKMFDAYVNTFSSTFNVPMEKLKTLVATAEAELAKNVFLDNVLSTFISAARQGFVDSDVETKDVVECLKLSHQSDIEVTGDSCNNYMLTYNKVENMTPRDLGACIDCSARHINAQVAKSHNIALIWNVKDFMSLSEQLRKQIRSAAKKNNLPFKLTCATTRQVVNVVTTKIALKGG

SEQ ID NO: 27963 - protein, 1946 aa, Artificial Sequence; identical to SEQ ID NO: 15983
  SARS-CoV-2/Wuhan-Hu-1__NC_045512.2/MN908947.2__non-structural protein 3 (NSP3) (1-1946)(T750I)

SEQ ID NO: 27964 - protein, 1946 aa, Artificial Sequence; identical to SEQ ID NO: 15907
  SARS-CoV-2/Wuhan-Hu-1__NC_045512.2/MN908947.2__non-structural protein 3 (NSP3) (1-1946)(T1190I)

SEQ ID NO: 27965 - protein, 1946 aa, Artificial Sequence
  SARS-CoV-2/Wuhan-Hu-1__NC_045512.2/MN908947.2__non-structural protein 3 (NSP3) (1-1946)(A1527V_T1831I)
MAPTKVTFGDDTVIEVQGYKSVNITFELDERIDKVLNEKCSAYTVELGTEVNEFACVVADAVIKTLQPVSELLTPLGIDLDEWSMATYYLFDESGEFKLASHMYCSFYPPDEDEEEGDCEEEEFEPSTQYEYGTEDDYQGKPLEFGATSAALQPEEEQEEDWLDDDSQQTVGQQDGSEDNQTTTIQTIVEVQPQLEMELTPVVQTIEVNSFSGYLKLTDNVYIKNADIVEEAKKVKPTVVVNAANVYLKHGGGVAGALNKATNNAMQVESDDYIATNGPLKVGGSCVLSGHNLAKHCLHVVGPNVNKGEDIQLLKSAYENFNQHEVLLAPLLSAGIFGADPIHSLRVCVDTVRTNVYLAVFDKNLYDKLVSSFLEMKSEKQVEQKIAEIPKEEVKPFITESKPSVEQRKQDDKKIKACVEEVTTTLEETKFLTENLLLYIDINGNLHPDSATLVSDIDITFLKKDAPYIVGDVVQEGVLTAVVIPTKKAGGTTEMLAKALRKVPTDNYITTYPGQGLNGYTVEEAKTVLKKCKSAFYILPSIISNEKQEILGTVSWNLREMLAHAEETRKLMPVCVETKAIVSTIQRKYKGIKIQEGVVDYGARFYFYTSKTTVASLINTLNDLNETLVTMPLGYVTHGLNLEEAARYMRSLKVPATVSVSSPDAVTAYNGYLTSSSKTPEEHFIETISLAGSYKDWSYSGQSTQLGIEFLKRGDKSVYYTSNPTTFHLDGEVITFDNLKTLLSLREVRTIKVFTTVDNINLHTQVVDMSMTYGQQFGPTYLDGADVTKIKPHNSHEGKTFYVLPNDDTLRVEAFEYYHTTDPSFLGRYMSALNHTKKWKYPQVNGLTSIKWADNNCYLATALLTLQQIELKFNPPALQDAYYRARAGEAANFCALILAYCNKTVGELGDVRETMSYLFQHANLDSCKRVLNVVCKTCGQQQTTLKGVEAVMYMGTLSYEQFKKGVQIPCTCGKQATKYLVQQESPFVMMSAPPAQYELKHGTFTCASEYTGNYQCGHYKHITSKETLYCIDGALLTKSSEYKGPITDVFYKENSYTTTIKPVTYKLDGVVCTEIDPKLDNYYKKDNSYFTEQPIDLVPNQPYPNASFDNFKFVCDNIKFADDLNQLTGYKKPASRELKVTFFPDLNGDVVAIDYKHYTPSFKKGAKLLHKPIVWHVNNATNKATYKPNTWCIRCLWSTKPVETSNSFDVLKSEDAQGMDNLACEDLKPVSEEVVENPTIQKDVLECNVKTTEVVGDIILKPANNSLKITEEVGHTDLMAAYVDNSSLTIKKPNELSRVLGLKTLATHGLAAVNSVPWDTIANYAKPFLNKVVSTTTNIVTRCLNRVCTNYMPYFFTLLLQLCTFTRSTNSRIKASMPTTIAKNTVKSVGKFCLEASFNYLKSPNFSKLINIIIWFLLLSVCLGSLIYSTAALGVLMSNLGMPSYCTGYREGYLNSTNVTIATYCTGSIPCSVCLSGLDSLDTYPSLETIQITISSFKWDLTAFGLVAEWFLAYILFTRFFYVLGLVAIMQLFFSYFAVHFISNSWLMWLIINLVQMAPISAMVRMYIFFASFYYVWKSYVHVVDGCNSSTCMMCYKRNRATRVECTTIVNGVRRSFYVYANGGKGFCKLHNWNCVNCDTFCAGSTFISDEVARDLSLQFKRPINPTDQSSYIVDSVTVKNGSIHLYFDKAGQKTYERHSLSHFVNLDNLRANNTKGSLPINVIVFDGKSKCEESSAKSASVYYSQLMCQPILLLDQALVSDVGDSAEVAVKMFDAYVNTFSSTFNVPMEKLKTLVATAEAELAKNVSLDNVLSTFISAARQGFVDSDVEIKDVVECLKLSHQSDIEVTGDSCNNYMLTYNKVENMTPRDLGACIDCSARHINAQVAKSHNIALIWNVKDFMSLSEQLRKQIRSAAKKNNLPFKLTCATTRQVVNVVTTKIALKGG

SEQ ID NO: 27966 - protein, 1946 aa, Artificial Sequence
  SARS-CoV-2/Wuhan-Hu-1__NC_045512.2/MN908947.2__non-structural protein 3 (NSP3) (1-1946)(A86V_A656V_I1022V_E1847D)
MAPTKVTFGDDTVIEVQGYKSVNITFELDERIDKVLNEKCSAYTVELGTEVNEFACVVADAVIKTLQPVSELLTPLGIDLDEWSMVTYYLFDESGEFKLASHMYCSFYPPDEDEEEGDCEEEEFEPSTQYEYGTEDDYQGKPLEFGATSAALQPEEEQEEDWLDDDSQQTVGQQDGSEDNQTTTIQTIVEVQPQLEMELTPVVQTIEVNSFSGYLKLTDNVYIKNADIVEEAKKVKPTVVVNAANVYLKHGGGVAGALNKATNNAMQVESDDYIATNGPLKVGGSCVLSGHNLAKHCLHVVGPNVNKGEDIQLLKSAYENFNQHEVLLAPLLSAGIFGADPIHSLRVCVDTVRTNVYLAVFDKNLYDKLVSSFLEMKSEKQVEQKIAEIPKEEVKPFITESKPSVEQRKQDDKKIKACVEEVTTTLEETKFLTENLLLYIDINGNLHPDSATLVSDIDITFLKKDAPYIVGDVVQEGVLTAVVIPTKKAGGTTEMLAKALRKVPTDNYITTYPGQGLNGYTVEEAKTVLKKCKSAFYILPSIISNEKQEILGTVSWNLREMLAHAEETRKLMPVCVETKAIVSTIQRKYKGIKIQEGVVDYGARFYFYTSKTTVASLINTLNDLNETLVTMPLGYVTHGLNLEEAARYMRSLKVPVTVSVSSPDAVTAYNGYLTSSSKTPEEHFIETISLAGSYKDWSYSGQSTQLGIEFLKRGDKSVYYTSNPTTFHLDGEVITFDNLKTLLSLREVRTIKVFTTVDNINLHTQVVDMSMTYGQQFGPTYLDGADVTKIKPHNSHEGKTFYVLPNDDTLRVEAFEYYHTTDPSFLGRYMSALNHTKKWKYPQVNGLTSIKWADNNCYLATALLTLQQIELKFNPPALQDAYYRARAGEAANFCALILAYCNKTVGELGDVRETMSYLFQHANLDSCKRVLNVVCKTCGQQQTTLKGVEAVMYMGTLSYEQFKKGVQIPCTCGKQATKYLVQQESPFVMMSAPPAQYELKHGTFTCASEYTGNYQCGHYKHVTSKETLYCIDGALLTKSSEYKGPITDVFYKENSYTTTIKPVTYKLDGVVCTEIDPKLDNYYKKDNSYFTEQPIDLVPNQPYPNASFDNFKFVCDNIKFADDLNQLTGYKKPASRELKVTFFPDLNGDVVAIDYKHYTPSFKKGAKLLHKPIVWHVNNATNKATYKPNTWCIRCLWSTKPVETSNSFDVLKSEDAQGMDNLACEDLKPVSEEVVENPTIQKDVLECNVKTTEVVGDIILKPANNSLKITEEVGHTDLMAAYVDNSSLTIKKPNELSRVLGLKTLATHGLAAVNSVPWDTIANYAKPFLNKVVSTTTNIVTRCLNRVCTNYMPYFFTLLLQLCTFTRSTNSRIKASMPTTIAKNTVKSVGKFCLEASFNYLKSPNFSKLINIIIWFLLLSVCLGSLIYSTAALGVLMSNLGMPSYCTGYREGYLNSTNVTIATYCTGSIPCSVCLSGLDSLDTYPSLETIQITISSFKWDLTAFGLVAEWFLAYILFTRFFYVLGLAAIMQLFFSYFAVHFISNSWLMWLIINLVQMAPISAMVRMYIFFASFYYVWKSYVHVVDGCNSSTCMMCYKRNRATRVECTTIVNGVRRSFYVYANGGKGFCKLHNWNCVNCDTFCAGSTFISDEVARDLSLQFKRPINPTDQSSYIVDSVTVKNGSIHLYFDKAGQKTYERHSLSHFVNLDNLRANNTKGSLPINVIVFDGKSKCEESSAKSASVYYSQLMCQPILLLDQALVSDVGDSAEVAVKMFDAYVNTFSSTFNVPMEKLKTLVATAEAELAKNVSLDNVLSTFISAARQGFVDSDVETKDVVECLKLSHQSDIDVTGDSCNNYMLTYNKVENMTPRDLGACIDCSARHINAQVAKSHNIALIWNVKDFMSLSEQLRKQIRSAAKKNNLPFKLTCATTRQVVNVVTTKIALKGG

SEQ ID NO: 27967 - protein, 1946 aa, Artificial Sequence
  SARS-CoV-2/Wuhan-Hu-1__NC_045512.2/MN908947.2__non-structural protein 3 (NSP3) (1-1946)(D136N_E379V_K1694N)
MAPTKVTFGDDTVIEVQGYKSVNITFELDERIDKVLNEKCSAYTVELGTEVNEFACVVADAVIKTLQPVSELLTPLGIDLDEWSMATYYLFDESGEFKLASHMYCSFYPPDEDEEEGDCEEEEFEPSTQYEYGTENDYQGKPLEFGATSAALQPEEEQEEDWLDDDSQQTVGQQDGSEDNQTTTIQTIVEVQPQLEMELTPVVQTIEVNSFSGYLKLTDNVYIKNADIVEEAKKVKPTVVVNAANVYLKHGGGVAGALNKATNNAMQVESDDYIATNGPLKVGGSCVLSGHNLAKHCLHVVGPNVNKGEDIQLLKSAYENFNQHEVLLAPLLSAGIFGADPIHSLRVCVDTVRTNVYLAVFDKNLYDKLVSSFLEMKSVKQVEQKIAEIPKEEVKPFITESKPSVEQRKQDDKKIKACVEEVTTTLEETKFLTENLLLYIDINGNLHPDSATLVSDIDITFLKKDAPYIVGDVVQEGVLTAVVIPTKKAGGTTEMLAKALRKVPTDNYITTYPGQGLNGYTVEEAKTVLKKCKSAFYILPSIISNEKQEILGTVSWNLREMLAHAEETRKLMPVCVETKAIVSTIQRKYKGIKIQEGVVDYGARFYFYTSKTTVASLINTLNDLNETLVTMPLGYVTHGLNLEEAARYMRSLKVPATVSVSSPDAVTAYNGYLTSSSKTPEEHFIETISLAGSYKDWSYSGQSTQLGIEFLKRGDKSVYYTSNPTTFHLDGEVITFDNLKTLLSLREVRTIKVFTTVDNINLHTQVVDMSMTYGQQFGPTYLDGADVTKIKPHNSHEGKTFYVLPNDDTLRVEAFEYYHTTDPSFLGRYMSALNHTKKWKYPQVNGLTSIKWADNNCYLATALLTLQQIELKFNPPALQDAYYRARAGEAANFCALILAYCNKTVGELGDVRETMSYLFQHANLDSCKRVLNVVCKTCGQQQTTLKGVEAVMYMGTLSYEQFKKGVQIPCTCGKQATKYLVQQESPFVMMSAPPAQYELKHGTFTCASEYTGNYQCGHYKHITSKETLYCIDGALLTKSSEYKGPITDVFYKENSYTTTIKPVTYKLDGVVCTEIDPKLDNYYKKDNSYFTEQPIDLVPNQPYPNASFDNFKFVCDNIKFADDLNQLTGYKKPASRELKVTFFPDLNGDVVAIDYKHYTPSFKKGAKLLHKPIVWHVNNATNKATYKPNTWCIRCLWSTKPVETSNSFDVLKSEDAQGMDNLACEDLKPVSEEVVENPTIQKDVLECNVKTTEVVGDIILKPANNSLKITEEVGHTDLMAAYVDNSSLTIKKPNELSRVLGLKTLATHGLAAVNSVPWDTIANYAKPFLNKVVSTTTNIVTRCLNRVCTNYMPYFFTLLLQLCTFTRSTNSRIKASMPTTIAKNTVKSVGKFCLEASFNYLKSPNFSKLINIIIWFLLLSVCLGSLIYSTAALGVLMSNLGMPSYCTGYREGYLNSTNVTIATYCTGSIPCSVCLSGLDSLDTYPSLETIQITISSFKWDLTAFGLVAEWFLAYILFTRFFYVLGLAAIMQLFFSYFAVHFISNSWLMWLIINLVQMAPISAMVRMYIFFASFYYVWKSYVHVVDGCNSSTCMMCYKRNRATRVECTTIVNGVRRSFYVYANGGKGFCKLHNWNCVNCDTFCAGSTFISDEVARDLSLQFKRPINPTDQSSYIVDSVTVKNGSIHLYFDKAGQNTYERHSLSHFVNLDNLRANNTKGSLPINVIVFDGKSKCEESSAKSASVYYSQLMCQPILLLDQALVSDVGDSAEVAVKMFDAYVNTFSSTFNVPMEKLKTLVATAEAELAKNVSLDNVLSTFISAARQGFVDSDVETKDVVECLKLSHQSDIEVTGDSCNNYMLTYNKVENMTPRDLGACIDCSARHINAQVAKSHNIALIWNVKDFMSLSEQLRKQIRSAAKKNNLPFKLTCATTRQVVNVVTTKIALKGG

SEQ ID NO: 27968 - protein, 1946 aa, Artificial Sequence
  SARS-CoV-2/Wuhan-Hu-1__NC_045512.2/MN908947.2__non-structural protein 3 (NSP3) (1-1946)(A862S_G1129S)
MAPTKVTFGDDTVIEVQGYKSVNITFELDERIDKVLNEKCSAYTVELGTEVNEFACVVADAVIKTLQPVSELLTPLGIDLDEWSMATYYLFDESGEFKLASHMYCSFYPPDEDEEEGDCEEEEFEPSTQYEYGTEDDYQGKPLEFGATSAALQPEEEQEEDWLDDDSQQTVGQQDGSEDNQTTTIQTIVEVQPQLEMELTPVVQTIEVNSFSGYLKLTDNVYIKNADIVEEAKKVKPTVVVNAANVYLKHGGGVAGALNKATNNAMQVESDDYIATNGPLKVGGSCVLSGHNLAKHCLHVVGPNVNKGEDIQLLKSAYENFNQHEVLLAPLLSAGIFGADPIHSLRVCVDTVRTNVYLAVFDKNLYDKLVSSFLEMKSEKQVEQKIAEIPKEEVKPFITESKPSVEQRKQDDKKIKACVEEVTTTLEETKFLTENLLLYIDINGNLHPDSATLVSDIDITFLKKDAPYIVGDVVQEGVLTAVVIPTKKAGGTTEMLAKALRKVPTDNYITTYPGQGLNGYTVEEAKTVLKKCKSAFYILPSIISNEKQEILGTVSWNLREMLAHAEETRKLMPVCVETKAIVSTIQRKYKGIKIQEGVVDYGARFYFYTSKTTVASLINTLNDLNETLVTMPLGYVTHGLNLEEAARYMRSLKVPATVSVSSPDAVTAYNGYLTSSSKTPEEHFIETISLAGSYKDWSYSGQSTQLGIEFLKRGDKSVYYTSNPTTFHLDGEVITFDNLKTLLSLREVRTIKVFTTVDNINLHTQVVDMSMTYGQQFGPTYLDGADVTKIKPHNSHEGKTFYVLPNDDTLRVEAFEYYHTTDPSFLGRYMSALNHTKKWKYPQVNGLTSIKWADNNCYLATSLLTLQQIELKFNPPALQDAYYRARAGEAANFCALILAYCNKTVGELGDVRETMSYLFQHANLDSCKRVLNVVCKTCGQQQTTLKGVEAVMYMGTLSYEQFKKGVQIPCTCGKQATKYLVQQESPFVMMSAPPAQYELKHGTFTCASEYTGNYQCGHYKHITSKETLYCIDGALLTKSSEYKGPITDVFYKENSYTTTIKPVTYKLDGVVCTEIDPKLDNYYKKDNSYFTEQPIDLVPNQPYPNASFDNFKFVCDNIKFADDLNQLTSYKKPASRELKVTFFPDLNGDVVAIDYKHYTPSFKKGAKLLHKPIVWHVNNATNKATYKPNTWCIRCLWSTKPVETSNSFDVLKSEDAQGMDNLACEDLKPVSEEVVENPTIQKDVLECNVKTTEVVGDIILKPANNSLKITEEVGHTDLMAAYVDNSSLTIKKPNELSRVLGLKTLATHGLAAVNSVPWDTIANYAKPFLNKVVSTTTNIVTRCLNRVCTNYMPYFFTLLLQLCTFTRSTNSRIKASMPTTIAKNTVKSVGKFCLEASFNYLKSPNFSKLINIIIWFLLLSVCLGSLIYSTAALGVLMSNLGMPSYCTGYREGYLNSTNVTIATYCTGSIPCSVCLSGLDSLDTYPSLETIQITISSFKWDLTAFGLVAEWFLAYILFTRFFYVLGLAAIMQLFFSYFAVHFISNSWLMWLIINLVQMAPISAMVRMYIFFASFYYVWKSYVHVVDGCNSSTCMMCYKRNRATRVECTTIVNGVRRSFYVYANGGKGFCKLHNWNCVNCDTFCAGSTFISDEVARDLSLQFKRPINPTDQSSYIVDSVTVKNGSIHLYFDKAGQKTYERHSLSHFVNLDNLRANNTKGSLPINVIVFDGKSKCEESSAKSASVYYSQLMCQPILLLDQALVSDVGDSAEVAVKMFDAYVNTFSSTFNVPMEKLKTLVATAEAELAKNVSLDNVLSTFISAARQGFVDSDVETKDVVECLKLSHQSDIEVTGDSCNNYMLTYNKVENMTPRDLGACIDCSARHINAQVAKSHNIALIWNVKDFMSLSEQLRKQIRSAAKKNNLPFKLTCATTRQVVNVVTTKIALKGG

SEQ ID NO: 27969 - protein, 1946 aa, Artificial Sequence
  SARS-CoV-2/Wuhan-Hu-1__NC_045512.2/MN908947.2__non-structural protein 3 (NSP3) (1-1946)(T1190I_K1772R)
MAPTKVTFGDDTVIEVQGYKSVNITFELDERIDKVLNEKCSAYTVELGTEVNEFACVVADAVIKTLQPVSELLTPLGIDLDEWSMATYYLFDESGEFKLASHMYCSFYPPDEDEEEGDCEEEEFEPSTQYEYGTEDDYQGKPLEFGATSAALQPEEEQEEDWLDDDSQQTVGQQDGSEDNQTTTIQTIVEVQPQLEMELTPVVQTIEVNSFSGYLKLTDNVYIKNADIVEEAKKVKPTVVVNAANVYLKHGGGVAGALNKATNNAMQVESDDYIATNGPLKVGGSCVLSGHNLAKHCLHVVGPNVNKGEDIQLLKSAYENFNQHEVLLAPLLSAGIFGADPIHSLRVCVDTVRTNVYLAVFDKNLYDKLVSSFLEMKSEKQVEQKIAEIPKEEVKPFITESKPSVEQRKQDDKKIKACVEEVTTTLEETKFLTENLLLYIDINGNLHPDSATLVSDIDITFLKKDAPYIVGDVVQEGVLTAVVIPTKKAGGTTEMLAKALRKVPTDNYITTYPGQGLNGYTVEEAKTVLKKCKSAFYILPSIISNEKQEILGTVSWNLREMLAHAEETRKLMPVCVETKAIVSTIQRKYKGIKIQEGVVDYGARFYFYTSKTTVASLINTLNDLNETLVTMPLGYVTHGLNLEEAARYMRSLKVPATVSVSSPDAVTAYNGYLTSSSKTPEEHFIETISLAGSYKDWSYSGQSTQLGIEFLKRGDKSVYYTSNPTTFHLDGEVITFDNLKTLLSLREVRTIKVFTTVDNINLHTQVVDMSMTYGQQFGPTYLDGADVTKIKPHNSHEGKTFYVLPNDDTLRVEAFEYYHTTDPSFLGRYMSALNHTKKWKYPQVNGLTSIKWADNNCYLATALLTLQQIELKFNPPALQDAYYRARAGEAANFCALILAYCNKTVGELGDVRETMSYLFQHANLDSCKRVLNVVCKTCGQQQTTLKGVEAVMYMGTLSYEQFKKGVQIPCTCGKQATKYLVQQESPFVMMSAPPAQYELKHGTFTCASEYTGNYQCGHYKHITSKETLYCIDGALLTKSSEYKGPITDVFYKENSYTTTIKPVTYKLDGVVCTEIDPKLDNYYKKDNSYFTEQPIDLVPNQPYPNASFDNFKFVCDNIKFADDLNQLTGYKKPASRELKVTFFPDLNGDVVAIDYKHYTPSFKKGAKLLHKPIVWHVNNATNKATYKPNIWCIRCLWSTKPVETSNSFDVLKSEDAQGMDNLACEDLKPVSEEVVENPTIQKDVLECNVKTTEVVGDIILKPANNSLKITEEVGHTDLMAAYVDNSSLTIKKPNELSRVLGLKTLATHGLAAVNSVPWDTIANYAKPFLNKVVSTTTNIVTRCLNRVCTNYMPYFFTLLLQLCTFTRSTNSRIKASMPTTIAKNTVKSVGKFCLEASFNYLKSPNFSKLINIIIWFLLLSVCLGSLIYSTAALGVLMSNLGMPSYCTGYREGYLNSTNVTIATYCTGSIPCSVCLSGLDSLDTYPSLETIQITISSFKWDLTAFGLVAEWFLAYILFTRFFYVLGLAAIMQLFFSYFAVHFISNSWLMWLIINLVQMAPISAMVRMYIFFASFYYVWKSYVHVVDGCNSSTCMMCYKRNRATRVECTTIVNGVRRSFYVYANGGKGFCKLHNWNCVNCDTFCAGSTFISDEVARDLSLQFKRPINPTDQSSYIVDSVTVKNGSIHLYFDKAGQKTYERHSLSHFVNLDNLRANNTKGSLPINVIVFDGKSKCEESSAKSASVYYSQLMCQPILLLDQALVSDVGDSAEVAVRMFDAYVNTFSSTFNVPMEKLKTLVATAEAELAKNVSLDNVLSTFISAARQGFVDSDVETKDVVECLKLSHQSDIEVTGDSCNNYMLTYNKVENMTPRDLGACIDCSARHINAQVAKSHNIALIWNVKDFMSLSEQLRKQIRSAAKKNNLPFKLTCATTRQVVNVVTTKIALKGG

SEQ ID NO: 27970 - protein, 501 aa, Artificial Sequence
  SARS-CoV-2/Wuhan-Hu-1__NC_045512.2/MN908947.2/EPI_ISL_402128__non -structural protein 4 (NSP4) (1-501)(V168L_T493I)
MKIVNNWLKQLIKVTLVFLFVAAIFYLITPVHVMSKHTDFSSEIIGYKAIDGGVTRDIASTDTCFANKHADFDTWFSQRGGSYTNDKACPLIAAVITREVGFVVPGLPGTILRTTNGDFLHFLPRVFSAVGNICYTPSKLIEYTDFATSACVLAAECTIFKDASGKPLPYCYDTNVLEGSVAYESLRPDTRYVLMDGSIIQFPNTYLEGSVRVVTTFDSEYCRHGTCERSEAGVCVSTSGRWVLNNDYYRSLPGVFCGVDAVNLLTNMFTPLIQPIGALDISASIVAGGIVAIVVTCLAYYFMRFRRAFGEYSHVVAFNTLLFLMSFTVLCLTPVYSFLPGVYSVIYLYLTFYLTNDVSFLAHIQWMVMFTPLVPFWITIAYIICISTKHFYWFFSNYLKRRVVFNGVSFSTFEEAALCTFLLNKEMYLKLRSDVLLPLTQYNRYLALYNKYKYFSGAMDTTSYREAACCHLAKALNDFSNSGSDVLYQPPQISITSAVLQ

SEQ ID NO: 27971 - protein, 501 aa, Artificial Sequence
  SARS-CoV-2/Wuhan-Hu-1__NC_045512.2/MN908947.2/EPI_ISL_402128__non -structural protein 4 (NSP4) (1-501)(F18L)
MKIVNNWLKQLIKVTLVLLFVAAIFYLITPVHVMSKHTDFSSEIIGYKAIDGGVTRDIASTDTCFANKHADFDTWFSQRGGSYTNDKACPLIAAVITREVGFVVPGLPGTILRTTNGDFLHFLPRVFSAVGNICYTPSKLIEYTDFATSACVLAAECTIFKDASGKPVPYCYDTNVLEGSVAYESLRPDTRYVLMDGSIIQFPNTYLEGSVRVVTTFDSEYCRHGTCERSEAGVCVSTSGRWVLNNDYYRSLPGVFCGVDAVNLLTNMFTPLIQPIGALDISASIVAGGIVAIVVTCLAYYFMRFRRAFGEYSHVVAFNTLLFLMSFTVLCLTPVYSFLPGVYSVIYLYLTFYLTNDVSFLAHIQWMVMFTPLVPFWITIAYIICISTKHFYWFFSNYLKRRVVFNGVSFSTFEEAALCTFLLNKEMYLKLRSDVLLPLTQYNRYLALYNKYKYFSGAMDTTSYREAACCHLAKALNDFSNSGSDVLYQPPQTSITSAVLQ

SEQ ID NO: 27972 - protein, 501 aa, Artificial Sequence
  SARS-CoV-2/Wuhan-Hu-1__NC_045512.2/MN908947.2/EPI_ISL_402128__non -structural protein 4 (NSP4) (1-501)(I24T_G179S_S185N_A447V)
MKIVNNWLKQLIKVTLVFLFVAATFYLITPVHVMSKHTDFSSEIIGYKAIDGGVTRDIASTDTCFANKHADFDTWFSQRGGSYTNDKACPLIAAVITREVGFVVPGLPGTILRTTNGDFLHFLPRVFSAVGNICYTPSKLIEYTDFATSACVLAAECTIFKDASGKPVPYCYDTNVLESSVAYENLRPDTRYVLMDGSIIQFPNTYLEGSVRVVTTFDSEYCRHGTCERSEAGVCVSTSGRWVLNNDYYRSLPGVFCGVDAVNLLTNMFTPLIQPIGALDISASIVAGGIVAIVVTCLAYYFMRFRRAFGEYSHVVAFNTLLFLMSFTVLCLTPVYSFLPGVYSVIYLYLTFYLTNDVSFLAHIQWMVMFTPLVPFWITIAYIICISTKHFYWFFSNYLKRRVVFNGVSFSTFEEAALCTFLLNKEMYLKLRSDVLLPLTQYNRYLVLYNKYKYFSGAMDTTSYREAACCHLAKALNDFSNSGSDVLYQPPQTSITSAVLQ

SEQ ID NO: 27973 - protein, 501 aa, Artificial Sequence
  SARS-CoV-2/Wuhan-Hu-1__NC_045512.2/MN908947.2/EPI_ISL_402128__non -structural protein 4 (NSP4) (1-501)(V168L_A447V_T493I)
MKIVNNWLKQLIKVTLVFLFVAAIFYLITPVHVMSKHTDFSSEIIGYKAIDGGVTRDIASTDTCFANKHADFDTWFSQRGGSYTNDKACPLIAAVITREVGFVVPGLPGTILRTTNGDFLHFLPRVFSAVGNICYTPSKLIEYTDFATSACVLAAECTIFKDASGKPLPYCYDTNVLEGSVAYESLRPDTRYVLMDGSIIQFPNTYLEGSVRVVTTFDSEYCRHGTCERSEAGVCVSTSGRWVLNNDYYRSLPGVFCGVDAVNLLTNMFTPLIQPIGALDISASIVAGGIVAIVVTCLAYYFMRFRRAFGEYSHVVAFNTLLFLMSFTVLCLTPVYSFLPGVYSVIYLYLTFYLTNDVSFLAHIQWMVMFTPLVPFWITIAYIICISTKHFYWFFSNYLKRRVVFNGVSFSTFEEAALCTFLLNKEMYLKLRSDVLLPLTQYNRYLVLYNKYKYFSGAMDTTSYREAACCHLAKALNDFSNSGSDVLYQPPQISITSAVLQ

SEQ ID NO: 27974 - protein, 501 aa, Artificial Sequence
  SARS-CoV-2/Wuhan-Hu-1__NC_045512.2/MN908947.2/EPI_ISL_402128__non -structural protein 4 (NSP4) (1-501)(Y206H_L265F_T296I_A473S)
MKIVNNWLKQLIKVTLVFLFVAAIFYLITPVHVMSKHTDFSSEIIGYKAIDGGVTRDIASTDTCFANKHADFDTWFSQRGGSYTNDKACPLIAAVITREVGFVVPGLPGTILRTTNGDFLHFLPRVFSAVGNICYTPSKLIEYTDFATSACVLAAECTIFKDASGKPVPYCYDTNVLEGSVAYESLRPDTRYVLMDGSIIQFPNTHLEGSVRVVTTFDSEYCRHGTCERSEAGVCVSTSGRWVLNNDYYRSLPGVFCGVDAVNLFTNMFTPLIQPIGALDISASIVAGGIVAIVVICLAYYFMRFRRAFGEYSHVVAFNTLLFLMSFTVLCLTPVYSFLPGVYSVIYLYLTFYLTNDVSFLAHIQWMVMFTPLVPFWITIAYIICISTKHFYWFFSNYLKRRVVFNGVSFSTFEEAALCTFLLNKEMYLKLRSDVLLPLTQYNRYLALYNKYKYFSGAMDTTSYREAACCHLSKALNDFSNSGSDVLYQPPQTSITSAVLQ

SEQ ID NO: 27975 - protein, 501 aa, Artificial Sequence
  SARS-CoV-2/Wuhan-Hu-1__NC_045512.2/MN908947.2/EPI_ISL_402128__non -structural protein 4 (NSP4) (1-501)(T174I_A447V)
MKIVNNWLKQLIKVTLVFLFVAAIFYLITPVHVMSKHTDFSSEIIGYKAIDGGVTRDIASTDTCFANKHADFDTWFSQRGGSYTNDKACPLIAAVITREVGFVVPGLPGTILRTTNGDFLHFLPRVFSAVGNICYTPSKLIEYTDFATSACVLAAECTIFKDASGKPVPYCYDINVLEGSVAYESLRPDTRYVLMDGSIIQFPNTYLEGSVRVVTTFDSEYCRHGTCERSEAGVCVSTSGRWVLNNDYYRSLPGVFCGVDAVNLLTNMFTPLIQPIGALDISASIVAGGIVAIVVTCLAYYFMRFRRAFGEYSHVVAFNTLLFLMSFTVLCLTPVYSFLPGVYSVIYLYLTFYLTNDVSFLAHIQWMVMFTPLVPFWITIAYIICISTKHFYWFFSNYLKRRVVFNGVSFSTFEEAALCTFLLNKEMYLKLRSDVLLPLTQYNRYLVLYNKYKYFSGAMDTTSYREAACCHLAKALNDFSNSGSDVLYQPPQTSITSAVLQ

SEQ ID NO: 27976 - protein, 501 aa, Artificial Sequence
  SARS-CoV-2/Wuhan-Hu-1__NC_045512.2/MN908947.2/EPI_ISL_402128__non -structural protein 4 (NSP4) (1-501)(T190I_T493I)
MKIVNNWLKQLIKVTLVFLFVAAIFYLITPVHVMSKHTDFSSEIIGYKAIDGGVTRDIASTDTCFANKHADFDTWFSQRGGSYTNDKACPLIAAVITREVGFVVPGLPGTILRTTNGDFLHFLPRVFSAVGNICYTPSKLIEYTDFATSACVLAAECTIFKDASGKPVPYCYDTNVLEGSVAYESLRPDIRYVLMDGSIIQFPNTYLEGSVRVVTTFDSEYCRHGTCERSEAGVCVSTSGRWVLNNDYYRSLPGVFCGVDAVNLLTNMFTPLIQPIGALDISASIVAGGIVAIVVTCLAYYFMRFRRAFGEYSHVVAFNTLLFLMSFTVLCLTPVYSFLPGVYSVIYLYLTFYLTNDVSFLAHIQWMVMFTPLVPFWITIAYIICISTKHFYWFFSNYLKRRVVFNGVSFSTFEEAALCTFLLNKEMYLKLRSDVLLPLTQYNRYLALYNKYKYFSGAMDTTSYREAACCHLAKALNDFSNSGSDVLYQPPQISITSAVLQ

SEQ ID NO: 27977 - protein, 501 aa, Artificial Sequence
  SARS-CoV-2/Wuhan-Hu-1__NC_045512.2/MN908947.2/EPI_ISL_402128__non -structural protein 4 (NSP4) (1-501)(D218N_L439P)
MKIVNNWLKQLIKVTLVFLFVAAIFYLITPVHVMSKHTDFSSEIIGYKAIDGGVTRDIASTDTCFANKHADFDTWFSQRGGSYTNDKACPLIAAVITREVGFVVPGLPGTILRTTNGDFLHFLPRVFSAVGNICYTPSKLIEYTDFATSACVLAAECTIFKDASGKPVPYCYDTNVLEGSVAYESLRPDTRYVLMDGSIIQFPNTYLEGSVRVVTTFNSEYCRHGTCERSEAGVCVSTSGRWVLNNDYYRSLPGVFCGVDAVNLLTNMFTPLIQPIGALDISASIVAGGIVAIVVTCLAYYFMRFRRAFGEYSHVVAFNTLLFLMSFTVLCLTPVYSFLPGVYSVIYLYLTFYLTNDVSFLAHIQWMVMFTPLVPFWITIAYIICISTKHFYWFFSNYLKRRVVFNGVSFSTFEEAALCTFLLNKEMYLKLRSDVLLPPTQYNRYLALYNKYKYFSGAMDTTSYREAACCHLAKALNDFSNSGSDVLYQPPQTSITSAVLQ

SEQ ID NO: 27978 - protein, 501 aa, Artificial Sequence
  SARS-CoV-2/Wuhan-Hu-1__NC_045512.2/MN908947.2/EPI_ISL_402128__non -structural protein 4 (NSP4) (1-501)(D218N_D460N)
MKIVNNWLKQLIKVTLVFLFVAAIFYLITPVHVMSKHTDFSSEIIGYKAIDGGVTRDIASTDTCFANKHADFDTWFSQRGGSYTNDKACPLIAAVITREVGFVVPGLPGTILRTTNGDFLHFLPRVFSAVGNICYTPSKLIEYTDFATSACVLAAECTIFKDASGKPVPYCYDTNVLEGSVAYESLRPDTRYVLMDGSIIQFPNTYLEGSVRVVTTFNSEYCRHGTCERSEAGVCVSTSGRWVLNNDYYRSLPGVFCGVDAVNLLTNMFTPLIQPIGALDISASIVAGGIVAIVVTCLAYYFMRFRRAFGEYSHVVAFNTLLFLMSFTVLCLTPVYSFLPGVYSVIYLYLTFYLTNDVSFLAHIQWMVMFTPLVPFWITIAYIICISTKHFYWFFSNYLKRRVVFNGVSFSTFEEAALCTFLLNKEMYLKLRSDVLLPLTQYNRYLALYNKYKYFSGAMNTTSYREAACCHLAKALNDFSNSGSDVLYQPPQTSITSAVLQ

SEQ ID NO: 27979 - protein, 501 aa, Artificial Sequence
  SARS-CoV-2/Wuhan-Hu-1__NC_045512.2/MN908947.2/EPI_ISL_402128__non -structural protein 4 (NSP4) (1-501)(S396T)
MKIVNNWLKQLIKVTLVFLFVAAIFYLITPVHVMSKHTDFSSEIIGYKAIDGGVTRDIASTDTCFANKHADFDTWFSQRGGSYTNDKACPLIAAVITREVGFVVPGLPGTILRTTNGDFLHFLPRVFSAVGNICYTPSKLIEYTDFATSACVLAAECTIFKDASGKPVPYCYDTNVLEGSVAYESLRPDTRYVLMDGSIIQFPNTYLEGSVRVVTTFDSEYCRHGTCERSEAGVCVSTSGRWVLNNDYYRSLPGVFCGVDAVNLLTNMFTPLIQPIGALDISASIVAGGIVAIVVTCLAYYFMRFRRAFGEYSHVVAFNTLLFLMSFTVLCLTPVYSFLPGVYSVIYLYLTFYLTNDVSFLAHIQWMVMFTPLVPFWITIAYIICISTKHFYWFFTNYLKRRVVFNGVSFSTFEEAALCTFLLNKEMYLKLRSDVLLPLTQYNRYLALYNKYKYFSGAMDTTSYREAACCHLAKALNDFSNSGSDVLYQPPQTSITSAVLQ

SEQ ID NO: 27980 - protein, 501 aa, Artificial Sequence
  SARS-CoV-2/Wuhan-Hu-1__NC_045512.2/MN908947.2/EPI_ISL_402128__non -structural protein 4 (NSP4) (1-501)(L439P)
MKIVNNWLKQLIKVTLVFLFVAAIFYLITPVHVMSKHTDFSSEIIGYKAIDGGVTRDIASTDTCFANKHADFDTWFSQRGGSYTNDKACPLIAAVITREVGFVVPGLPGTILRTTNGDFLHFLPRVFSAVGNICYTPSKLIEYTDFATSACVLAAECTIFKDASGKPVPYCYDTNVLEGSVAYESLRPDTRYVLMDGSIIQFPNTYLEGSVRVVTTFDSEYCRHGTCERSEAGVCVSTSGRWVLNNDYYRSLPGVFCGVDAVNLLTNMFTPLIQPIGALDISASIVAGGIVAIVVTCLAYYFMRFRRAFGEYSHVVAFNTLLFLMSFTVLCLTPVYSFLPGVYSVIYLYLTFYLTNDVSFLAHIQWMVMFTPLVPFWITIAYIICISTKHFYWFFSNYLKRRVVFNGVSFSTFEEAALCTFLLNKEMYLKLRSDVLLPPTQYNRYLALYNKYKYFSGAMDTTSYREAACCHLAKALNDFSNSGSDVLYQPPQTSITSAVLQ

SEQ ID NO: 27981 - protein, 501 aa, Artificial Sequence; identical to SEQ ID NO: 16468
  SARS-CoV-2/Wuhan-Hu-1__NC_045512.2/MN908947.2/EPI_ISL_402128__non -structural protein 4 (NSP4) (1-501)(A447V)

SEQ ID NO: 27982 - protein, 501 aa, Artificial Sequence
  SARS-CoV-2/Wuhan-Hu-1__NC_045512.2/MN908947.2/EPI_ISL_402128__non -structural protein 4 (NSP4) (1-501)(L439P_T493I)
MKIVNNWLKQLIKVTLVFLFVAAIFYLITPVHVMSKHTDFSSEIIGYKAIDGGVTRDIASTDTCFANKHADFDTWFSQRGGSYTNDKACPLIAAVITREVGFVVPGLPGTILRTTNGDFLHFLPRVFSAVGNICYTPSKLIEYTDFATSACVLAAECTIFKDASGKPVPYCYDTNVLEGSVAYESLRPDTRYVLMDGSIIQFPNTYLEGSVRVVTTFDSEYCRHGTCERSEAGVCVSTSGRWVLNNDYYRSLPGVFCGVDAVNLLTNMFTPLIQPIGALDISASIVAGGIVAIVVTCLAYYFMRFRRAFGEYSHVVAFNTLLFLMSFTVLCLTPVYSFLPGVYSVIYLYLTFYLTNDVSFLAHIQWMVMFTPLVPFWITIAYIICISTKHFYWFFSNYLKRRVVFNGVSFSTFEEAALCTFLLNKEMYLKLRSDVLLPPTQYNRYLALYNKYKYFSGAMDTTSYREAACCHLAKALNDFSNSGSDVLYQPPQISITSAVLQ

SEQ ID NO: 27983 - protein, 501 aa, Artificial Sequence
  SARS-CoV-2/Wuhan-Hu-1__NC_045512.2/MN908947.2/EPI_ISL_402128__non -structural protein 4 (NSP4) (1-501)(T115I_S396T)
MKIVNNWLKQLIKVTLVFLFVAAIFYLITPVHVMSKHTDFSSEIIGYKAIDGGVTRDIASTDTCFANKHADFDTWFSQRGGSYTNDKACPLIAAVITREVGFVVPGLPGTILRTINGDFLHFLPRVFSAVGNICYTPSKLIEYTDFATSACVLAAECTIFKDASGKPVPYCYDTNVLEGSVAYESLRPDTRYVLMDGSIIQFPNTYLEGSVRVVTTFDSEYCRHGTCERSEAGVCVSTSGRWVLNNDYYRSLPGVFCGVDAVNLLTNMFTPLIQPIGALDISASIVAGGIVAIVVTCLAYYFMRFRRAFGEYSHVVAFNTLLFLMSFTVLCLTPVYSFLPGVYSVIYLYLTFYLTNDVSFLAHIQWMVMFTPLVPFWITIAYIICISTKHFYWFFTNYLKRRVVFNGVSFSTFEEAALCTFLLNKEMYLKLRSDVLLPLTQYNRYLALYNKYKYFSGAMDTTSYREAACCHLAKALNDFSNSGSDVLYQPPQTSITSAVLQ

SEQ ID NO: 27984 - protein, 501 aa, Artificial Sequence
  SARS-CoV-2/Wuhan-Hu-1__NC_045512.2/MN908947.2/EPI_ISL_402128__non -structural protein 4 (NSP4) (1-501)(K400E_L439P_A447V)
MKIVNNWLKQLIKVTLVFLFVAAIFYLITPVHVMSKHTDFSSEIIGYKAIDGGVTRDIASTDTCFANKHADFDTWFSQRGGSYTNDKACPLIAAVITREVGFVVPGLPGTILRTTNGDFLHFLPRVFSAVGNICYTPSKLIEYTDFATSACVLAAECTIFKDASGKPVPYCYDTNVLEGSVAYESLRPDTRYVLMDGSIIQFPNTYLEGSVRVVTTFDSEYCRHGTCERSEAGVCVSTSGRWVLNNDYYRSLPGVFCGVDAVNLLTNMFTPLIQPIGALDISASIVAGGIVAIVVTCLAYYFMRFRRAFGEYSHVVAFNTLLFLMSFTVLCLTPVYSFLPGVYSVIYLYLTFYLTNDVSFLAHIQWMVMFTPLVPFWITIAYIICISTKHFYWFFSNYLERRVVFNGVSFSTFEEAALCTFLLNKEMYLKLRSDVLLPPTQYNRYLVLYNKYKYFSGAMDTTSYREAACCHLAKALNDFSNSGSDVLYQPPQTSITSAVLQ

SEQ ID NO: 27985 - protein, 501 aa, Artificial Sequence; identical to SEQ ID NO: 16422
  SARS-CoV-2/Wuhan-Hu-1__NC_045512.2/MN908947.2/EPI_ISL_402128__non -structural protein 4 (NSP4) (1-501)(L448F)

SEQ ID NO: 27986 - protein, 291 aa, Artificial Sequence
  SARS-CoV-2/Wuhan-Hu-1__NC_045512.2/MN908947.2/EPI_ISL_402128__non -structural protein 6 (NSP6) (1-291)(T78A_V150A_I163V_T182I)
MSAVKRTIKGTHHWLLLTILTSLLVLVQSTQWSLFFFLYENAFLPFAMGIIAMSAFAMMFVKHKHAFLCLFLLPSLAAVAYFNMVYMPASWVMRIMTWLDMVDTSLSGFKLKDCVMYASAVVLLILMTARTVYDDGARRVWTLMNVLTLAYKVYYGNALDQAVSMWALIISVTSNYSGVVTIVMFLARGIVFMCVEYCPIFFITGNTLQCIMLVYCFLGYFCTCYFGLFCLLNRYFRLTLGVYDYLVSTQEFRYMNSQGLLPPKNSIDAFKLNIKLLGVGGKPCIKVATVQ

SEQ ID NO: 27987 - protein, 288 aa, Artificial Sequence
  SARS-CoV-2/Wuhan-Hu-1__NC_045512.2/MN908947.2/EPI_ISL_402128__non -structural protein 6 (NSP6) (1-291)(S107del_G108del_F109del)
MSAVKRTIKGTHHWLLLTILTSLLVLVQSTQWSLFFFLYENAFLPFAMGIIAMSAFAMMFVKHKHAFLCLFLLPSLATVAYFNMVYMPASWVMRIMTWLDMVDTSLKLKDCVMYASAVVLLILMTARTVYDDGARRVWTLMNVLTLVYKVYYGNALDQAISMWALIISVTSNYSGVVTTVMFLARGIVFMCVEYCPIFFITGNTLQCIMLVYCFLGYFCTCYFGLFCLLNRYFRLTLGVYDYLVSTQEFRYMNSQGLLPPKNSIDAFKLNIKLLGVGGKPCIKVATVQ

SEQ ID NO: 27988 - protein, 288 aa, Artificial Sequence
  SARS-CoV-2/Wuhan-Hu-1__NC_045512.2/MN908947.2/EPI_ISL_402128__non -structural protein 6 (NSP6) (1-291)(S107del_G108del_F109del_M165T)
MSAVKRTIKGTHHWLLLTILTSLLVLVQSTQWSLFFFLYENAFLPFAMGIIAMSAFAMMFVKHKHAFLCLFLLPSLATVAYFNMVYMPASWVMRIMTWLDMVDTSLKLKDCVMYASAVVLLILMTARTVYDDGARRVWTLMNVLTLVYKVYYGNALDQAISTWALIISVTSNYSGVVTTVMFLARGIVFMCVEYCPIFFITGNTLQCIMLVYCFLGYFCTCYFGLFCLLNRYFRLTLGVYDYLVSTQEFRYMNSQGLLPPKNSIDAFKLNIKLLGVGGKPCIKVATVQ

SEQ ID NO: 27989 - protein, 291 aa, Artificial Sequence
  SARS-CoV-2/Wuhan-Hu-1__NC_045512.2/MN908947.2/EPI_ISL_402128__non -structural protein 6 (NSP6) (1-291)(V27G_L38F_F221L_C222F)
MSAVKRTIKGTHHWLLLTILTSLLVLGQSTQWSLFFFFYENAFLPFAMGIIAMSAFAMMFVKHKHAFLCLFLLPSLATVAYFNMVYMPASWVMRIMTWLDMVDTSLSGFKLKDCVMYASAVVLLILMTARTVYDDGARRVWTLMNVLTLVYKVYYGNALDQAISMWALIISVTSNYSGVVTTVMFLARGIVFMCVEYCPIFFITGNTLQCIMLVYCFLGYLFTCYFGLFCLLNRYFRLTLGVYDYLVSTQEFRYMNSQGLLPPKNSIDAFKLNIKLLGVGGKPCIKVATVQ

SEQ ID NO: 27990 - protein, 291 aa, Artificial Sequence
  SARS-CoV-2/Wuhan-Hu-1__NC_045512.2/MN908947.2/EPI_ISL_402128__non -structural protein 6 (NSP6) (1-291)(L38F_L126F)
MSAVKRTIKGTHHWLLLTILTSLLVLVQSTQWSLFFFFYENAFLPFAMGIIAMSAFAMMFVKHKHAFLCLFLLPSLATVAYFNMVYMPASWVMRIMTWLDMVDTSLSGFKLKDCVMYASAVVLLIFMTARTVYDDGARRVWTLMNVLTLVYKVYYGNALDQAISMWALIISVTSNYSGVVTTVMFLARGIVFMCVEYCPIFFITGNTLQCIMLVYCFLGYFCTCYFGLFCLLNRYFRLTLGVYDYLVSTQEFRYMNSQGLLPPKNSIDAFKLNIKLLGVGGKPCIKVATVQ

SEQ ID NO: 27991 - protein, 288 aa, Artificial Sequence
  SARS-CoV-2/Wuhan-Hu-1__NC_045512.2/MN908947.2/EPI_ISL_402128__non -structural protein 6 (NSP6) (1-291)(S107del_G108del_F109del_L126F)
MSAVKRTIKGTHHWLLLTILTSLLVLVQSTQWSLFFFLYENAFLPFAMGIIAMSAFAMMFVKHKHAFLCLFLLPSLATVAYFNMVYMPASWVMRIMTWLDMVDTSLKLKDCVMYASAVVLLIFMTARTVYDDGARRVWTLMNVLTLVYKVYYGNALDQAISMWALIISVTSNYSGVVTTVMFLARGIVFMCVEYCPIFFITGNTLQCIMLVYCFLGYFCTCYFGLFCLLNRYFRLTLGVYDYLVSTQEFRYMNSQGLLPPKNSIDAFKLNIKLLGVGGKPCIKVATVQ

SEQ ID NO: 27992 - protein, 288 aa, Artificial Sequence
  SARS-CoV-2/Wuhan-Hu-1__NC_045512.2/MN908947.2/EPI_ISL_402128__non -structural protein 6 (NSP6) (1-291)(S107del_G108del_F109del_V279I)
MSAVKRTIKGTHHWLLLTILTSLLVLVQSTQWSLFFFLYENAFLPFAMGIIAMSAFAMMFVKHKHAFLCLFLLPSLATVAYFNMVYMPASWVMRIMTWLDMVDTSLKLKDCVMYASAVVLLILMTARTVYDDGARRVWTLMNVLTLVYKVYYGNALDQAISMWALIISVTSNYSGVVTTVMFLARGIVFMCVEYCPIFFITGNTLQCIMLVYCFLGYFCTCYFGLFCLLNRYFRLTLGVYDYLVSTQEFRYMNSQGLLPPKNSIDAFKLNIKLLGIGGKPCIKVATVQ

SEQ ID NO: 27993 - protein, 275 aa, Artificial Sequence; identical to SEQ ID NO: 16755
  SARS-CoV-2/Wuhan-Hu-1__NC_045512.2/MN908947.2/EPI_ISL_402128__ORF 3a protein (ORF3a) (1-275)(Q57H_S171L)

SEQ ID NO: 27994 - protein, 275 aa, Artificial Sequence
  SARS-CoV-2/Wuhan-Hu-1__NC_045512.2/MN908947.2/EPI_ISL_402128__ORF 3a protein (ORF3a) (1-275)(D155Y_S253P)
MDLFMRIFTIGTVTLKQGEIKDATPSDFVRATATIPIQASLPFGWLIVGVALLAVFQSASKIITLKKRWQLALSKGVHFVCNLLLLFVTVYSHLLLVAAGLEAPFLYLYALVYFLQSINFVRIIMRLWLCWKCRSKNPLLYDANYFLCWHTNCYYYCIPYNSVTSSIVITSGDGTTSPISEHDYQIGGYTEKWESGVKDCVVLHSYFTSDYYQLYSTQLSTDTGVEHVTFFIYNKIVDEPEEHVQIHTIDGSPGVVNPVMEPIYDEPTTTTSVPL

SEQ ID NO: 27995 - protein, 275 aa, Artificial Sequence
  SARS-CoV-2/Wuhan-Hu-1__NC_045512.2/MN908947.2/EPI_ISL_402128__ORF 3a protein (ORF3a) (1-275)(S253P)
MDLFMRIFTIGTVTLKQGEIKDATPSDFVRATATIPIQASLPFGWLIVGVALLAVFQSASKIITLKKRWQLALSKGVHFVCNLLLLFVTVYSHLLLVAAGLEAPFLYLYALVYFLQSINFVRIIMRLWLCWKCRSKNPLLYDANYFLCWHTNCYDYCIPYNSVTSSIVITSGDGTTSPISEHDYQIGGYTEKWESGVKDCVVLHSYFTSDYYQLYSTQLSTDTGVEHVTFFIYNKIVDEPEEHVQIHTIDGSPGVVNPVMEPIYDEPTTTTSVPL

SEQ ID NO: 27996 - protein, 275 aa, Artificial Sequence
  SARS-CoV-2/Wuhan-Hu-1__NC_045512.2/MN908947.2/EPI_ISL_402128__ORF 3a protein (ORF3a) (1-275)(L15F_W131C_T151I)
MDLFMRIFTIGTVTFKQGEIKDATPSDFVRATATIPIQASLPFGWLIVGVALLAVFQSASKIITLKKRWQLALSKGVHFVCNLLLLFVTVYSHLLLVAAGLEAPFLYLYALVYFLQSINFVRIIMRLWLCCKCRSKNPLLYDANYFLCWHINCYDYCIPYNSVTSSIVITSGDGTTSPISEHDYQIGGYTEKWESGVKDCVVLHSYFTSDYYQLYSTQLSTDTGVEHVTFFIYNKIVDEPEEHVQIHTIDGSSGVVNPVMEPIYDEPTTTTSVPL

SEQ ID NO: 27997 - protein, 275 aa, Artificial Sequence
  SARS-CoV-2/Wuhan-Hu-1__NC_045512.2/MN908947.2/EPI_ISL_402128__ORF 3a protein (ORF3a) (1-275)(P42L_Q57H)
MDLFMRIFTIGTVTLKQGEIKDATPSDFVRATATIPIQASLLFGWLIVGVALLAVFHSASKIITLKKRWQLALSKGVHFVCNLLLLFVTVYSHLLLVAAGLEAPFLYLYALVYFLQSINFVRIIMRLWLCWKCRSKNPLLYDANYFLCWHTNCYDYCIPYNSVTSSIVITSGDGTTSPISEHDYQIGGYTEKWESGVKDCVVLHSYFTSDYYQLYSTQLSTDTGVEHVTFFIYNKIVDEPEEHVQIHTIDGSSGVVNPVMEPIYDEPTTTTSVPL

SEQ ID NO: 27998 - protein, 274 aa, Artificial Sequence
  SARS-CoV-2/Wuhan-Hu-1__NC_045512.2/MN908947.2/EPI_ISL_402128__ORF 3a protein (ORF3a) (1-275)(Q57H_N257del)
MDLFMRIFTIGTVTLKQGEIKDATPSDFVRATATIPIQASLPFGWLIVGVALLAVFHSASKIITLKKRWQLALSKGVHFVCNLLLLFVTVYSHLLLVAAGLEAPFLYLYALVYFLQSINFVRIIMRLWLCWKCRSKNPLLYDANYFLCWHTNCYDYCIPYNSVTSSIVITSGDGTTSPISEHDYQIGGYTEKWESGVKDCVVLHSYFTSDYYQLYSTQLSTDTGVEHVTFFIYNKIVDEPEEHVQIHTIDGSSGVVPVMEPIYDEPTTTTSVPL

SEQ ID NO: 27999 - protein, 274 aa, Artificial Sequence
  SARS-CoV-2/Wuhan-Hu-1__NC_045512.2/MN908947.2/EPI_ISL_402128__ORF 3a protein (ORF3a) (1-275)(N257del)
MDLFMRIFTIGTVTLKQGEIKDATPSDFVRATATIPIQASLPFGWLIVGVALLAVFQSASKIITLKKRWQLALSKGVHFVCNLLLLFVTVYSHLLLVAAGLEAPFLYLYALVYFLQSINFVRIIMRLWLCWKCRSKNPLLYDANYFLCWHTNCYDYCIPYNSVTSSIVITSGDGTTSPISEHDYQIGGYTEKWESGVKDCVVLHSYFTSDYYQLYSTQLSTDTGVEHVTFFIYNKIVDEPEEHVQIHTIDGSSGVVPVMEPIYDEPTTTTSVPL

SEQ ID NO: 28000 - protein, 275 aa, Artificial Sequence
  SARS-CoV-2/Wuhan-Hu-1__NC_045512.2/MN908947.2/EPI_ISL_402128__ORF 3a protein (ORF3a) (1-275)(P42L_Q57H_P104L)
MDLFMRIFTIGTVTLKQGEIKDATPSDFVRATATIPIQASLLFGWLIVGVALLAVFHSASKIITLKKRWQLALSKGVHFVCNLLLLFVTVYSHLLLVAAGLEALFLYLYALVYFLQSINFVRIIMRLWLCWKCRSKNPLLYDANYFLCWHTNCYDYCIPYNSVTSSIVITSGDGTTSPISEHDYQIGGYTEKWESGVKDCVVLHSYFTSDYYQLYSTQLSTDTGVEHVTFFIYNKIVDEPEEHVQIHTIDGSSGVVNPVMEPIYDEPTTTTSVPL

SEQ ID NO: 28001 - protein, 121 aa, Artificial Sequence
  SARS-CoV-2/Wuhan-Hu-1__NC_045512.2/MN908947.2/EPI_ISL_402128__ORF 8 protein (ORF8) (1-121)(R52I_Y73C)
MKFLVFLGIITTVAAFHQECSLQSCTQHQPYVVDDPCPIHFYSKWYIRVGAIKSAPLIELCVDEAGSKSPIQCIDIGNYTVSCLPFTINCQEPKLGSLVVRCSFYEDFLEYHDVRVVLDFI

SEQ ID NO: 28002 - protein, 121 aa, Artificial Sequence
  SARS-CoV-2/Wuhan-Hu-1__NC_045512.2/MN908947.2/EPI_ISL_402128__ORF 8 protein (ORF8) (1-121)(E92K)
MKFLVFLGIITTVAAFHQECSLQSCTQHQPYVVDDPCPIHFYSKWYIRVGARKSAPLIELCVDEAGSKSPIQYIDIGNYTVSCLPFTINCQKPKLGSLVVRCSFYEDFLEYHDVRVVLDFI

SEQ ID NO: 28003 - protein, 119 aa, Artificial Sequence
  SARS-CoV-2/Wuhan-Hu-1__NC_045512.2/MN908947.2/EPI_ISL_402128__ORF 8 protein (ORF8) (1-121)(D119I_F120del_I121del)
MKFLVFLGIITTVAAFHQECSLQSCTQHQPYVVDDPCPIHFYSKWYIRVGARKSAPLIELCVDEAGSKSPIQYIDIGNYTVSCLPFTINCQEPKLGSLVVRCSFYEDFLEYHDVRVVLI

SEQ ID NO: 28004 - protein, 121 aa, Artificial Sequence
  SARS-CoV-2/Wuhan-Hu-1__NC_045512.2/MN908947.2/EPI_ISL_402128__ORF 8 protein (ORF8) (1-121)(K44R_F120V_I121L)
MKFLVFLGIITTVAAFHQECSLQSCTQHQPYVVDDPCPIHFYSRWYIRVGARKSAPLIELCVDEAGSKSPIQYIDIGNYTVSCLPFTINCQEPKLGSLVVRCSFYEDFLEYHDVRVVLDVL

SEQ ID NO: 28005 - protein, 121 aa, Artificial Sequence
  SARS-CoV-2/Wuhan-Hu-1__NC_045512.2/MN908947.2/EPI_ISL_402128__ORF 8 protein (ORF8) (1-121)(K2Q)
MQFLVFLGIITTVAAFHQECSLQSCTQHQPYVVDDPCPIHFYSKWYIRVGARKSAPLIELCVDEAGSKSPIQYIDIGNYTVSCLPFTINCQEPKLGSLVVRCSFYEDFLEYHDVRVVLDFI

SEQ ID NO: 28006 - protein, 121 aa, Artificial Sequence; identical to SEQ ID NO: 17029
  SARS-CoV-2/Wuhan-Hu-1__NC_045512.2/MN908947.2/EPI_ISL_402128__ORF 8 protein (ORF8) (1-121)(T11I)

SEQ ID NO: 28007 - protein, 121 aa, Artificial Sequence
  SARS-CoV-2/Wuhan-Hu-1__NC_045512.2/MN908947.2/EPI_ISL_402128__ORF 8 protein (ORF8) (1-121)(T11K_P38S_S67F)
MKFLVFLGIIKTVAAFHQECSLQSCTQHQPYVVDDPCSIHFYSKWYIRVGARKSAPLIELCVDEAGFKSPIQYIDIGNYTVSCLPFTINCQEPKLGSLVVRCSFYEDFLEYHDVRVVLDFI

SEQ ID NO: 28008 - protein, 121 aa, Artificial Sequence; identical to SEQ ID NO: 17015
  SARS-CoV-2/Wuhan-Hu-1__NC_045512.2/MN908947.2/EPI_ISL_402128__ORF 8 protein (ORF8) (1-121)(T26I)

SEQ ID NO: 28009 - protein, 121 aa, Artificial Sequence
  SARS-CoV-2/Wuhan-Hu-1__NC_045512.2/MN908947.2/EPI_ISL_402128__ORF 8 protein (ORF8) (1-121)(F3Y)
MKYLVFLGIITTVAAFHQECSLQSCTQHQPYVVDDPCPIHFYSKWYIRVGARKSAPLIELCVDEAGSKSPIQYIDIGNYTVSCLPFTINCQEPKLGSLVVRCSFYEDFLEYHDVRVVLDFI

SEQ ID NO: 28010 - protein, 121 aa, Artificial Sequence
  SARS-CoV-2/Wuhan-Hu-1__NC_045512.2/MN908947.2/EPI_ISL_402128__ORF 8 protein (ORF8) (1-121)(T11I_A51S)
MKFLVFLGIIITVAAFHQECSLQSCTQHQPYVVDDPCPIHFYSKWYIRVGSRKSAPLIELCVDEAGSKSPIQYIDIGNYTVSCLPFTINCQEPKLGSLVVRCSFYEDFLEYHDVRVVLDFI

SEQ ID NO: 28011 - protein, 121 aa, Artificial Sequence
  SARS-CoV-2/Wuhan-Hu-1__NC_045512.2/MN908947.2/EPI_ISL_402128__ORF 8 protein (ORF8) (1-121)(V32L_V100L)
MKFLVFLGIITTVAAFHQECSLQSCTQHQPYLVDDPCPIHFYSKWYIRVGARKSAPLIELCVDEAGSKSPIQYIDIGNYTVSCLPFTINCQEPKLGSLVLRCSFYEDFLEYHDVRVVLDFI

SEQ ID NO: 28012 - protein, 121 aa, Artificial Sequence; identical to SEQ ID NO: 17006
  SARS-CoV-2/Wuhan-Hu-1__NC_045512.2/MN908947.2/EPI_ISL_402128__ORF 8 protein (ORF8) (1-121)(A65V)

SEQ ID NO: 28013 - protein, 602 aa, Artificial Sequence
  SARS-CoV-2/Wuhan-Hu-1__NC_045512.2/MN908947.2/EPI_ISL_402128__non -structural protein 13 (NSP13) (1-602)(P78L)
MAVGACVLCNSQTSLRCGACIRRPFLCCKCCYDHVISTSHKLVLSVNPYVCNAPGCDVTDVTQLYLGGMSYYCKSHKLPISFPLCANGQVFGLYKNTCVGSDNVTDFNAIATCDWTNAGDYILANTCTERLKLFAAETLKATEETFKLSYGIATVREVLSDRELHLSWEVGKPRPPLNRNYVFTGYRVTKNSKVQIGEYTFEKGDYGDAVVYRGTTTYKLNVGDYFVLTSHTVMPLSAPTLVPQEHYVRITGLYPTLNISDEFSSNVANYQKVGMQKYSTLQGPPGTGKSHFAIGLALYYPSARIVYTACSHAAVDALCEKALKYLPIDKCSRIIPARARVECFDKFKVNSTLEQYVFCTVNALPETTADIVVFDEISMATNYDLSVVNARLRAKHYVYIGDPAQLPAPRTLLTKGTLEPEYFNSVCRLMKTIGPDMFLGTCRRCPAEIVDTVSALVYDNKLKAHKDKSAQCFKMFYKGVITHDVSSAINRPQIGVVREFLTRNPAWRKAVFISPYNSQNAVASKILGLPTQTVDSSQGSEYDYVIFTQTTETAHSCNVNRFNVAITRAKVGILCIMSDRDLYDKLQFTSLEIPRRNVATLQ

SEQ ID NO: 28014 - protein, 602 aa, Artificial Sequence
  SARS-CoV-2/Wuhan-Hu-1__NC_045512.2/MN908947.2/EPI_ISL_402128__non -structural protein 13 (NSP13) (1-602)(P79S_K461R)
MAVGACVLCNSQTSLRCGACIRRPFLCCKCCYDHVISTSHKLVLSVNPYVCNAPGCDVTDVTQLYLGGMSYYCKSHKPSISFPLCANGQVFGLYKNTCVGSDNVTDFNAIATCDWTNAGDYILANTCTERLKLFAAETLKATEETFKLSYGIATVREVLSDRELHLSWEVGKPRPPLNRNYVFTGYRVTKNSKVQIGEYTFEKGDYGDAVVYRGTTTYKLNVGDYFVLTSHTVMPLSAPTLVPQEHYVRITGLYPTLNISDEFSSNVANYQKVGMQKYSTLQGPPGTGKSHFAIGLALYYPSARIVYTACSHAAVDALCEKALKYLPIDKCSRIIPARARVECFDKFKVNSTLEQYVFCTVNALPETTADIVVFDEISMATNYDLSVVNARLRAKHYVYIGDPAQLPAPRTLLTKGTLEPEYFNSVCRLMKTIGPDMFLGTCRRCPAEIVDTVSALVYDNSLKAHKDKSAQCFKMFYKGVITHDVSSAINRPQIGVVREFLTRNPAWRKAVFISPYNSQNAVASKILGLPTQTVDSSQGSEYDYVIFTQTTETAHSCNVNRFNVAITRAKVGILCIMSDRDLYDKLQFTSLEIPRRNVATLQ

SEQ ID NO: 28015 - protein, 602 aa, Artificial Sequence
  SARS-CoV-2/Wuhan-Hu-1__NC_045512.2/MN908947.2/EPI_ISL_402128__non -structural protein 13 (NSP13) (1-602)(E342D)
MAVGACVLCNSQTSLRCGACIRRPFLCCKCCYDHVISTSHKLVLSVNPYVCNAPGCDVTDVTQLYLGGMSYYCKSHKPPISFPLCANGQVFGLYKNTCVGSDNVTDFNAIATCDWTNAGDYILANTCTERLKLFAAETLKATEETFKLSYGIATVREVLSDRELHLSWEVGKPRPPLNRNYVFTGYRVTKNSKVQIGEYTFEKGDYGDAVVYRGTTTYKLNVGDYFVLTSHTVMPLSAPTLVPQEHYVRITGLYPTLNISDEFSSNVANYQKVGMQKYSTLQGPPGTGKSHFAIGLALYYPSARIVYTACSHAAVDALCEKALKYLPIDKCSRIIPARARVDCFDKFKVNSTLEQYVFCTVNALPETTADIVVFDEISMATNYDLSVVNARLRAKHYVYIGDPAQLPAPRTLLTKGTLEPEYFNSVCRLMKTIGPDMFLGTCRRCPAEIVDTVSALVYDNKLKAHKDKSAQCFKMFYKGVITHDVSSAINRPQIGVVREFLTRNPAWRKAVFISPYNSQNAVASKILGLPTQTVDSSQGSEYDYVIFTQTTETAHSCNVNRFNVAITRAKVGILCIMSDRDLYDKLQFTSLEIPRRNVATLQ

SEQ ID NO: 28016 - protein, 602 aa, Artificial Sequence
  SARS-CoV-2/Wuhan-Hu-1__NC_045512.2/MN908947.2/EPI_ISL_402128__non -structural protein 13 (NSP13) (1-602)(T589I)
MAVGACVLCNSQTSLRCGACIRRPFLCCKCCYDHVISTSHKLVLSVNPYVCNAPGCDVTDVTQLYLGGMSYYCKSHKPPISFPLCANGQVFGLYKNTCVGSDNVTDFNAIATCDWTNAGDYILANTCTERLKLFAAETLKATEETFKLSYGIATVREVLSDRELHLSWEVGKPRPPLNRNYVFTGYRVTKNSKVQIGEYTFEKGDYGDAVVYRGTTTYKLNVGDYFVLTSHTVMPLSAPTLVPQEHYVRITGLYPTLNISDEFSSNVANYQKVGMQKYSTLQGPPGTGKSHFAIGLALYYPSARIVYTACSHAAVDALCEKALKYLPIDKCSRIIPARARVECFDKFKVNSTLEQYVFCTVNALPETTADIVVFDEISMATNYDLSVVNARLRAKHYVYIGDPAQLPAPRTLLTKGTLEPEYFNSVCRLMKTIGPDMFLGTCRRCPAEIVDTVSALVYDNKLKAHKDKSAQCFKMFYKGVITHDVSSAINRPQIGVVREFLTRNPAWRKAVFISPYNSQNAVASKILGLPTQTVDSSQGSEYDYVIFTQTTETAHSCNVNRFNVAITRAKVGILCIMSDRDLYDKLQFISLEIPRRNVATLQ

SEQ ID NO: 28017 - protein, 602 aa, Artificial Sequence
  SARS-CoV-2/Wuhan-Hu-1__NC_045512.2/MN908947.2/EPI_ISL_402128__non -structural protein 13 (NSP13) (1-602)(P54L_D261Y)
MAVGACVLCNSQTSLRCGACIRRPFLCCKCCYDHVISTSHKLVLSVNPYVCNALGCDVTDVTQLYLGGMSYYCKSHKPPISFPLCANGQVFGLYKNTCVGSDNVTDFNAIATCDWTNAGDYILANTCTERLKLFAAETLKATEETFKLSYGIATVREVLSDRELHLSWEVGKPRPPLNRNYVFTGYRVTKNSKVQIGEYTFEKGDYGDAVVYRGTTTYKLNVGDYFVLTSHTVMPLSAPTLVPQEHYVRITGLYPTLNISYEFSSNVANYQKVGMQKYSTLQGPPGTGKSHFAIGLALYYPSARIVYTACSHAAVDALCEKALKYLPIDKCSRIIPARARVECFDKFKVNSTLEQYVFCTVNALPETTADIVVFDEISMATNYDLSVVNARLRAKHYVYIGDPAQLPAPRTLLTKGTLEPEYFNSVCRLMKTIGPDMFLGTCRRCPAEIVDTVSALVYDNKLKAHKDKSAQCFKMFYKGVITHDVSSAINRPQIGVVREFLTRNPAWRKAVFISPYNSQNAVASKILGLPTQTVDSSQGSEYDYVIFTQTTETAHSCNVNRFNVAITRAKVGILCIMSDRDLYDKLQFTSLEIPRRNVATLQ

SEQ ID NO: 28018 - protein, 602 aa, Artificial Sequence
  SARS-CoV-2/Wuhan-Hu-1__NC_045512.2/MN908947.2/EPI_ISL_402128__non -structural protein 13 (NSP13) (1-602)(Q89H_H165Y)
MAVGACVLCNSQTSLRCGACIRRPFLCCKCCYDHVISTSHKLVLSVNPYVCNAPGCDVTDVTQLYLGGMSYYCKSHKPPISFPLCANGHVFGLYKNTCVGSDNVTDFNAIATCDWTNAGDYILANTCTERLKLFAAETLKATEETFKLSYGIATVREVLSDRELYLSWEVGKPRPPLNRNYVFTGYRVTKNSKVQIGEYTFEKGDYGDAVVYRGTTTYKLNVGDYFVLTSHTVMPLSAPTLVPQEHYVRITGLYPTLNISDEFSSNVANYQKVGMQKYSTLQGPPGTGKSHFAIGLALYYPSARIVYTACSHAAVDALCEKALKYLPIDKCSRIIPARARVECFDKFKVNSTLEQYVFCTVNALPETTADIVVFDEISMATNYDLSVVNARLRAKHYVYIGDPAQLPAPRTLLTKGTLEPEYFNSVCRLMKTIGPDMFLGTCRRCPAEIVDTVSALVYDNKLKAHKDKSAQCFKMFYKGVITHDVSSAINRPQIGVVREFLTRNPAWRKAVFISPYNSQNAVASKILGLPTQTVDSSQGSEYDYVIFTQTTETAHSCNVNRFNVAITRAKVGILCIMSDRDLYDKLQFTSLEIPRRNVATLQ

SEQ ID NO: 28019 - protein, 602 aa, Artificial Sequence
  SARS-CoV-2/Wuhan-Hu-1__NC_045512.2/MN908947.2/EPI_ISL_402128__non -structural protein 13 (NSP13) (1-602)(D106Y_P530L)
MAVGACVLCNSQTSLRCGACIRRPFLCCKCCYDHVISTSHKLVLSVNPYVCNAPGCDVTDVTQLYLGGMSYYCKSHKPPISFPLCANGQVFGLYKNTCVGSDNVTYFNAIATCDWTNAGDYILANTCTERLKLFAAETLKATEETFKLSYGIATVREVLSDRELHLSWEVGKPRPPLNRNYVFTGYRVTKNSKVQIGEYTFEKGDYGDAVVYRGTTTYKLNVGDYFVLTSHTVMPLSAPTLVPQEHYVRITGLYPTLNISDEFSSNVANYQKVGMQKYSTLQGPPGTGKSHFAIGLALYYPSARIVYTACSHAAVDALCEKALKYLPIDKCSRIIPARARVECFDKFKVNSTLEQYVFCTVNALPETTADIVVFDEISMATNYDLSVVNARLRAKHYVYIGDPAQLPAPRTLLTKGTLEPEYFNSVCRLMKTIGPDMFLGTCRRCPAEIVDTVSALVYDNKLKAHKDKSAQCFKMFYKGVITHDVSSAINRPQIGVVREFLTRNPAWRKAVFISPYNSQNAVASKILGLLTQTVDSSQGSEYDYVIFTQTTETAHSCNVNRFNVAITRAKVGILCIMSDRDLYDKLQFTSLEIPRRNVATLQ

SEQ ID NO: 28020 - protein, 602 aa, Artificial Sequence
  SARS-CoV-2/Wuhan-Hu-1__NC_045512.2/MN908947.2/EPI_ISL_402128__non -structural protein 13 (NSP13) (1-602)(P173H_E262D_P420S_P492S)
MAVGACVLCNSQTSLRCGACIRRPFLCCKCCYDHVISTSHKLVLSVNPYVCNAPGCDVTDVTQLYLGGMSYYCKSHKPPISFPLCANGQVFGLYKNTCVGSDNVTDFNAIATCDWTNAGDYILANTCTERLKLFAAETLKATEETFKLSYGIATVREVLSDRELHLSWEVGKHRPPLNRNYVFTGYRVTKNSKVQIGEYTFEKGDYGDAVVYRGTTTYKLNVGDYFVLTSHTVMPLSAPTLVPQEHYVRITGLYPTLNISDDFSSNVANYQKVGMQKYSTLQGPPGTGKSHFAIGLALYYPSARIVYTACSHAAVDALCEKALKYLPIDKCSRIIPARARVECFDKFKVNSTLEQYVFCTVNALPETTADIVVFDEISMATNYDLSVVNARLRAKHYVYIGDPAQLPAPRTLLTKGTLESEYFNSVCRLMKTIGPDMFLGTCRRCPAEIVDTVSALVYDNKLKAHKDKSAQCFKMFYKGVITHDVSSAINRSQIGVVREFLTRNPAWRKAVFISPYNSQNAVASKILGLPTQTVDSSQGSEYDYVIFTQTTETAHSCNVNRFNVAITRAKVGILCIMSDRDLYDKLQFTSLEIPRRNVATLQ

SEQ ID NO: 28021 - protein, 602 aa, Artificial Sequence
  SARS-CoV-2/Wuhan-Hu-1__NC_045512.2/MN908947.2/EPI_ISL_402128__non -structural protein 13 (NSP13) (1-602)(D261Y)
MAVGACVLCNSQTSLRCGACIRRPFLCCKCCYDHVISTSHKLVLSVNPYVCNAPGCDVTDVTQLYLGGMSYYCKSHKPPISFPLCANGQVFGLYKNTCVGSDNVTDFNAIATCDWTNAGDYILANTCTERLKLFAAETLKATEETFKLSYGIATVREVLSDRELHLSWEVGKPRPPLNRNYVFTGYRVTKNSKVQIGEYTFEKGDYGDAVVYRGTTTYKLNVGDYFVLTSHTVMPLSAPTLVPQEHYVRITGLYPTLNISYEFSSNVANYQKVGMQKYSTLQGPPGTGKSHFAIGLALYYPSARIVYTACSHAAVDALCEKALKYLPIDKCSRIIPARARVECFDKFKVNSTLEQYVFCTVNALPETTADIVVFDEISMATNYDLSVVNARLRAKHYVYIGDPAQLPAPRTLLTKGTLEPEYFNSVCRLMKTIGPDMFLGTCRRCPAEIVDTVSALVYDNKLKAHKDKSAQCFKMFYKGVITHDVSSAINRPQIGVVREFLTRNPAWRKAVFISPYNSQNAVASKILGLPTQTVDSSQGSEYDYVIFTQTTETAHSCNVNRFNVAITRAKVGILCIMSDRDLYDKLQFTSLEIPRRNVATLQ

SEQ ID NO: 28022 - protein, 528 aa, Artificial Sequence
  SARS-CoV-2/Wuhan-Hu-1__NC_045512.2/MN908947.2/EPI_ISL_402128__non -structural protein 14 (NSP14) (1-528)(T32I_P143S_P444S)
MAENVTGLFKDCSKVITGLHPTQAPTHLSVDIKFKTEGLCVDIPGIPKDMTYRRLISMMGFKMNYQVNGYPNMFITREEAIRHVRAWIGFDVEGCHATREAVGTNLPLQLGFSTGVNLVAVPTGYVDTPNNTDFSRVSAKPPSGDQFKHLIPLMYKGLPWNVVRIKIVQMLSDTLKNLSDRVVFVLWAHGFELTSMKYFVKIGPERTCCLCDRRATCFSTASDTYACWHHSIGFDYVYNPFMIDVQQWGFTGNLQSNHDLYCQVHGNAHVASCDAIMTRCLAVHECFVKRVDWTIEYPIIGDELKINAACRKVQHMVVKAALLADKFPVLHDIGNPKAIKCVPQADVEWKFYDAQPCSDKAYKIEELFYSYATHSDKFTDGVCLFWNCNVDRYPANSIVCRFDTRVLSNLNLPGCDGGSLYVNKHAFHTPAFDKSAFVNLKQLSFFYYSDSPCESHGKQVVSDIDYVPLKSATCITRCNLGGAVCRHHANEYRLYLDAYNMMISAGFSLWVYKQFDTYNLWNTFTRLQ

SEQ ID NO: 28023 - protein, 528 aa, Artificial Sequence
  SARS-CoV-2/Wuhan-Hu-1__NC_045512.2/MN908947.2/EPI_ISL_402128__non -structural protein 14 (NSP14) (1-528)(P204L_F218Y_P328Q)
MAENVTGLFKDCSKVITGLHPTQAPTHLSVDTKFKTEGLCVDIPGIPKDMTYRRLISMMGFKMNYQVNGYPNMFITREEAIRHVRAWIGFDVEGCHATREAVGTNLPLQLGFSTGVNLVAVPTGYVDTPNNTDFSRVSAKPPPGDQFKHLIPLMYKGLPWNVVRIKIVQMLSDTLKNLSDRVVFVLWAHGFELTSMKYFVKIGLERTCCLCDRRATCYSTASDTYACWHHSIGFDYVYNPFMIDVQQWGFTGNLQSNHDLYCQVHGNAHVASCDAIMTRCLAVHECFVKRVDWTIEYPIIGDELKINAACRKVQHMVVKAALLADKFQVLHDIGNPKAIKCVPQADVEWKFYDAQPCSDKAYKIEELFYSYATHSDKFTDGVCLFWNCNVDRYPANSIVCRFDTRVLSNLNLPGCDGGSLYVNKHAFHTPAFDKSAFVNLKQLPFFYYSDSPCESHGKQVVSDIDYVPLKSATCITRCNLGGAVCRHHANEYRLYLDAYNMMISAGFSLWVYKQFDTYNLWNTFTRLQ

SEQ ID NO: 28024 - protein, 528 aa, Artificial Sequence
  SARS-CoV-2/Wuhan-Hu-1__NC_045512.2/MN908947.2/EPI_ISL_402128__non -structural protein 14 (NSP14) (1-528)(E348G_P452S)
MAENVTGLFKDCSKVITGLHPTQAPTHLSVDTKFKTEGLCVDIPGIPKDMTYRRLISMMGFKMNYQVNGYPNMFITREEAIRHVRAWIGFDVEGCHATREAVGTNLPLQLGFSTGVNLVAVPTGYVDTPNNTDFSRVSAKPPPGDQFKHLIPLMYKGLPWNVVRIKIVQMLSDTLKNLSDRVVFVLWAHGFELTSMKYFVKIGPERTCCLCDRRATCFSTASDTYACWHHSIGFDYVYNPFMIDVQQWGFTGNLQSNHDLYCQVHGNAHVASCDAIMTRCLAVHECFVKRVDWTIEYPIIGDELKINAACRKVQHMVVKAALLADKFPVLHDIGNPKAIKCVPQADVGWKFYDAQPCSDKAYKIEELFYSYATHSDKFTDGVCLFWNCNVDRYPANSIVCRFDTRVLSNLNLPGCDGGSLYVNKHAFHTPAFDKSAFVNLKQLPFFYYSDSSCESHGKQVVSDIDYVPLKSATCITRCNLGGAVCRHHANEYRLYLDAYNMMISAGFSLWVYKQFDTYNLWNTFTRLQ

SEQ ID NO: 28025 - protein, 528 aa, Artificial Sequence
  SARS-CoV-2/Wuhan-Hu-1__NC_045512.2/MN908947.2/EPI_ISL_402128__non -structural protein 14 (NSP14) (1-528)(A395V)
MAENVTGLFKDCSKVITGLHPTQAPTHLSVDTKFKTEGLCVDIPGIPKDMTYRRLISMMGFKMNYQVNGYPNMFITREEAIRHVRAWIGFDVEGCHATREAVGTNLPLQLGFSTGVNLVAVPTGYVDTPNNTDFSRVSAKPPPGDQFKHLIPLMYKGLPWNVVRIKIVQMLSDTLKNLSDRVVFVLWAHGFELTSMKYFVKIGPERTCCLCDRRATCFSTASDTYACWHHSIGFDYVYNPFMIDVQQWGFTGNLQSNHDLYCQVHGNAHVASCDAIMTRCLAVHECFVKRVDWTIEYPIIGDELKINAACRKVQHMVVKAALLADKFPVLHDIGNPKAIKCVPQADVEWKFYDAQPCSDKAYKIEELFYSYATHSDKFTDGVCLFWNCNVDRYPVNSIVCRFDTRVLSNLNLPGCDGGSLYVNKHAFHTPAFDKSAFVNLKQLPFFYYSDSPCESHGKQVVSDIDYVPLKSATCITRCNLGGAVCRHHANEYRLYLDAYNMMISAGFSLWVYKQFDTYNLWNTFTRLQ

SEQ ID NO: 28026 - protein, 528 aa, Artificial Sequence
  SARS-CoV-2/Wuhan-Hu-1__NC_045512.2/MN908947.2/EPI_ISL_402128__non -structural protein 14 (NSP14) (1-528)(D145E_A275S)
MAENVTGLFKDCSKVITGLHPTQAPTHLSVDTKFKTEGLCVDIPGIPKDMTYRRLISMMGFKMNYQVNGYPNMFITREEAIRHVRAWIGFDVEGCHATREAVGTNLPLQLGFSTGVNLVAVPTGYVDTPNNTDFSRVSAKPPPGEQFKHLIPLMYKGLPWNVVRIKIVQMLSDTLKNLSDRVVFVLWAHGFELTSMKYFVKIGPERTCCLCDRRATCFSTASDTYACWHHSIGFDYVYNPFMIDVQQWGFTGNLQSNHDLYCQVHGNAHVASCDSIMTRCLAVHECFVKRVDWTIEYPIIGDELKINAACRKVQHMVVKAALLADKFPVLHDIGNPKAIKCVPQADVEWKFYDAQPCSDKAYKIEELFYSYATHSDKFTDGVCLFWNCNVDRYPANSIVCRFDTRVLSNLNLPGCDGGSLYVNKHAFHTPAFDKSAFVNLKQLPFFYYSDSPCESHGKQVVSDIDYVPLKSATCITRCNLGGAVCRHHANEYRLYLDAYNMMISAGFSLWVYKQFDTYNLWNTFTRLQ

SEQ ID NO: 28027 - protein, 528 aa, Artificial Sequence
  SARS-CoV-2/Wuhan-Hu-1__NC_045512.2/MN908947.2/EPI_ISL_402128__non -structural protein 14 (NSP14) (1-528)(D145G_Q355H)
MAENVTGLFKDCSKVITGLHPTQAPTHLSVDTKFKTEGLCVDIPGIPKDMTYRRLISMMGFKMNYQVNGYPNMFITREEAIRHVRAWIGFDVEGCHATREAVGTNLPLQLGFSTGVNLVAVPTGYVDTPNNTDFSRVSAKPPPGGQFKHLIPLMYKGLPWNVVRIKIVQMLSDTLKNLSDRVVFVLWAHGFELTSMKYFVKIGPERTCCLCDRRATCFSTASDTYACWHHSIGFDYVYNPFMIDVQQWGFTGNLQSNHDLYCQVHGNAHVASCDAIMTRCLAVHECFVKRVDWTIEYPIIGDELKINAACRKVQHMVVKAALLADKFPVLHDIGNPKAIKCVPQADVEWKFYDAHPCSDKAYKIEELFYSYATHSDKFTDGVCLFWNCNVDRYPANSIVCRFDTRVLSNLNLPGCDGGSLYVNKHAFHTPAFDKSAFVNLKQLPFFYYSDSPCESHGKQVVSDIDYVPLKSATCITRCNLGGAVCRHHANEYRLYLDAYNMMISAGFSLWVYKQFDTYNLWNTFTRLQ

SEQ ID NO: 28028 - protein, 528 aa, Artificial Sequence
  SARS-CoV-2/Wuhan-Hu-1__NC_045512.2/MN908947.2/EPI_ISL_402128__non -structural protein 14 (NSP14) (1-528)(S256I_A361V_A372T)
MAENVTGLFKDCSKVITGLHPTQAPTHLSVDTKFKTEGLCVDIPGIPKDMTYRRLISMMGFKMNYQVNGYPNMFITREEAIRHVRAWIGFDVEGCHATREAVGTNLPLQLGFSTGVNLVAVPTGYVDTPNNTDFSRVSAKPPPGDQFKHLIPLMYKGLPWNVVRIKIVQMLSDTLKNLSDRVVFVLWAHGFELTSMKYFVKIGPERTCCLCDRRATCFSTASDTYACWHHSIGFDYVYNPFMIDVQQWGFTGNLQINHDLYCQVHGNAHVASCDAIMTRCLAVHECFVKRVDWTIEYPIIGDELKINAACRKVQHMVVKAALLADKFPVLHDIGNPKAIKCVPQADVEWKFYDAQPCSDKVYKIEELFYSYTTHSDKFTDGVCLFWNCNVDRYPANSIVCRFDTRVLSNLNLPGCDGGSLYVNKHAFHTPAFDKSAFVNLKQLPFFYYSDSPCESHGKQVVSDIDYVPLKSATCITRCNLGGAVCRHHANEYRLYLDAYNMMISAGFSLWVYKQFDTYNLWNTFTRLQ

SEQ ID NO: 28029 - RNA, 1809 nt, Artificial Sequence
  SARS-CoV-2/Wuhan-Hu-1__NC_045512.2/MN908947.2/EPI_ISL_402128__non -structural protein 13 (NSP13) CDS gc
auggccgugggcgccugcguccugugcaacagccagaccucccuccgcugcggggcgugcauccggcgccccuuccugugcugcaagugcugcuacgaccacgugaucagcaccucccacaagcuggugcucagcgucaacccguacgugugcaacgcccccggcugcgacgugacggacgucacccagcuguaccucgggggcauguccuacuacugcaagagccacaagccgcccaucuccuucccccugugcgccaacggccagguguucggccuguacaagaacacgugcgugggcagcgacaacgucaccgacuucaacgccaucgcgaccugcgacuggaccaacgccggggacuacauccuggccaacacgugcaccgagcggcucaagcuguucgccgccgagacccugaaggcgaccgaggagaccuucaagcucuccuacggcaucgccaccgugcgcgaggugcugagcgaccgggagcugcaccucuccugggaggucgggaagccccgcccgccccugaaccggaacuacguguucacgggcuaccgcgugaccaagaacagcaagguccagaucggggaguacaccuucgagaagggcgacuacggcgacgccgugguguaccgggggaccacgaccuacaagcugaacgucggcgacuacuucgugcucaccucccacaccgugaugccccugagcgcccccacgcuggucccccaggagcacuacgugcgcaucaccgggcucuaccccacccugaacaucuccgacgaguucagcuccaacguggccaacuaccagaaggucggcaugcagaaguacagcacccugcagggcccgcccgggacgggcaagucccacuucgcgaucgggcucgcccuguacuaccccagcgcccggaucguguacaccgccugcagccacgccgcggucgacgcccugugcgagaaggcccucaaguaccugcccaucgacaagugcucccgcaucaucccggcccgggcccgcguggagugcuucgacaaguucaaggugaacagcacccuggagcaguacgucuucugcaccgugaacgcgcuccccgagacgaccgccgacaucguggucuucgacgagaucuccauggccaccaacuacgaccugagcguggugaacgcccggcugcgcgccaagcacuacgucuacaucggcgaccccgcgcagcuccccgccccgcggacccugcugacgaaggggacccucgagcccgaguacuucaacuccgugugccgccugaugaagaccaucggccccgacauguuccuggggaccugccggcgcugccccgccgagaucguggacacggucagcgcccucguguacgacaacaagcugaaggcgcacaaggacaaguccgcccagugcuucaagauguucuacaagggggugaucacccacgacgucagcuccgccaucaaccggccgcagaucggcguggugcgcgaguuccugacccgcaaccccgccuggcggaaggccgucuucaucagccccuacaacucccagaacgcgguggccagcaagauccucgggcugcccacccagaccguggacuccagccagggcuccgaguacgacuacgucaucuucacgcagaccaccgagaccgcccacagcugcaacgugaaccgcuucaacguggccaucacgcgggccaaggucgggauccugugcaucauguccgaccgcgaccucuacgacaagcugcaguucaccagccuggagaucccgcggcgcaacguggcgacccugcaguga

SEQ ID NO: 28030 - RNA, 1587 nt, Artificial Sequence
  SARS-CoV-2/Wuhan-Hu-1__NC_045512.2/MN908947.2/EPI_ISL_402128__non -structural protein 14 (NSP14) CDS gc
auggccgagaacgugaccggccuguucaaggacugcagcaaggucaucaccgggcuccaccccacgcaggccccgacccaccuguccguggacaccaaguucaagaccgagggccugugcguggacauccccgggauccccaaggacaugacguaccgccggcucaucagcaugaugggcuucaagaugaacuaccaggucaacggguaccccaacauguucaucacccgcgaggaggcgauccggcacgugcgcgccuggaucggcuucgacguggagggcugccacgccacccgggaggccgucgggaccaaccugccgcugcagcucggcuucuccacgggggugaaccugguggccguccccaccggcuacguggacacccccaacaacaccgacuucagccgcguguccgcgaagcccccgcccggggaccaguucaagcaccugaucccccucauguacaagggccugcccuggaacgucgugcggaucaagaucgugcagaugcugagcgacacgcucaagaaccuguccgaccgcgucguguucgugcugugggcccacggcuucgagcucaccagcaugaaguacuucgucaagaucgggccggagcggaccugcugccugugcgaccgccgggcgaccugcuucuccacggccagcgacaccuacgccugcuggcaccacuccaucggcuucgacuacguguacaaccccuucaugaucgacgugcagcaguggggguucaccggcaaccugcagagcaaccacgaccucuacugccagguccacggcaacgcccacguggccuccugcgacgccaucaugacccgcugccuggccgugcacgagugcuucgucaagcggguggacuggacgaucgaguaccccaucaucggggacgagcugaagaucaacgcggccugccgcaagguccagcacaugguggugaaggccgcccuccuggccgacaaguuccccguccugcacgacaucggcaacccgaaggcgaucaagugcgugccccaggccgacguggaguggaaguucuacgacgcccagcccugcagcgacaaggccuacaagaucgaggagcuguucuacuccuacgccacccacagcgacaaguucaccgacggggucugccuguucuggaacugcaacguggaccgguaccccgcgaacuccaucgugugccgcuucgacacccggguccugagcaaccucaaccugccgggcugcgacgggggcucccuguacgugaacaagcacgccuuccacacgcccgccuucgacaagagcgccuucgugaaccucaagcagcugcccuucuucuacuacagcgacucccccugcgagagccacggcaagcaggucguguccgacaucgacuacgugccgcucaagagcgcgaccugcaucacccgcugcaaccucgggggcgccgucugccggcaccacgccaacgaguaccgccuguaccuggacgccuacaacaugaugaucuccgccggguucagccucuggguguacaagcaguucgacaccuacaaccuguggaacacguucacccggcugcaguga

SEQ ID NO: 28031 - RNA, 669 nt, Artificial Sequence
  SARS-CoV-2/Wuhan-Hu-1__NC_045512.2/MN908947.2/EPI_ISL_402128__mem brane protein (M) CDS gc (1-222)(I82T)
auggccgacagcaacggcaccaucaccguggaggagcugaagaagcuccuggagcaguggaaccuggucaucggguuccucuuccugacguggaucugccugcuccaguucgccuacgcgaaccgcaaccgguuccuguacaucaucaagcugaucuuccucuggcugcuguggcccgugacccucgccugcuucgugcuggccgccgucuaccgcaucaacuggaucaccggcgggaucgccaccgcgauggccugccuggugggccucauguggcuguccuacuucaucgccagcuuccggcuguucgcccgcacccgguccauguggagcuucaacccggagacgaacauccuccugaacgugccccugcacgggaccauccucacccgcccccugcuggaguccgagcucgucaucggcgcggugauccugcggggccaccuccgcaucgccgggcaccaccugggccggugcgacaucaaggaccugcccaaggagaucaccguggccacgagccgcacccuguccuacuacaagcucggggccagccagcgggucgccggcgacuccggguucgcggccuacagccgcuaccggaucggcaacuacaagcugaacaccgaccacuccagcuccagcgacaacaucgcccugcucgugcaguga

SEQ ID NO: 28032 - RNA, 669 nt, Artificial Sequence
  SARS-CoV-2/Wuhan-Hu-1__NC_045512.2/MN908947.2/EPI_ISL_402128__mem brane protein (M) CDS gc (1-222)(A2S_F28L_V70L)
augagcgacagcaacggcaccaucaccguggaggagcugaagaagcuccuggagcaguggaaccuggucaucggguuccuccugcugacguggaucugccugcuccaguucgccuacgcgaaccgcaaccgguuccuguacaucaucaagcugaucuuccucuggcugcuguggcccgugacccucgccugcuucgugcuggccgcccuguaccgcaucaacuggaucaccggcgggaucgccaucgcgauggccugccuggugggccucauguggcuguccuacuucaucgccagcuuccggcuguucgcccgcacccgguccauguggagcuucaacccggagacgaacauccuccugaacgugccccugcacgggaccauccucacccgcccccugcuggaguccgagcucgucaucggcgcggugauccugcggggccaccuccgcaucgccgggcaccaccugggccggugcgacaucaaggaccugcccaaggagaucaccguggccacgagccgcacccuguccuacuacaagcucggggccagccagcgggucgccggcgacuccggguucgcggccuacagccgcuaccggaucggcaacuacaagcugaacaccgaccacuccagcuccagcgacaacaucgcccugcucgugcaguga

SEQ ID NO: 28033 - RNA, 669 nt, Artificial Sequence
  SARS-CoV-2/Wuhan-Hu-1__NC_045512.2/MN908947.2/EPI_ISL_402128__mem brane protein (M) CDS gc (1-222)(A2T_I201V)
augaccgacagcaacggcaccaucaccguggaggagcugaagaagcuccuggagcaguggaaccuggucaucggguuccucuuccugacguggaucugccugcuccaguucgccuacgcgaaccgcaaccgguuccuguacaucaucaagcugaucuuccucuggcugcuguggcccgugacccucgccugcuucgugcuggccgccgucuaccgcaucaacuggaucaccggcgggaucgccaucgcgauggccugccuggugggccucauguggcuguccuacuucaucgccagcuuccggcuguucgcccgcacccgguccauguggagcuucaacccggagacgaacauccuccugaacgugccccugcacgggaccauccucacccgcccccugcuggaguccgagcucgucaucggcgcggugauccugcggggccaccuccgcaucgccgggcaccaccugggccggugcgacaucaaggaccugcccaaggagaucaccguggccacgagccgcacccuguccuacuacaagcucggggccagccagcgggucgccggcgacuccggguucgcggccuacagccgcuaccgggugggcaacuacaagcugaacaccgaccacuccagcuccagcgacaacaucgcccugcucgugcaguga

SEQ ID NO: 28034 - RNA, 669 nt, Artificial Sequence
  SARS-CoV-2/Wuhan-Hu-1__NC_045512.2/MN908947.2/EPI_ISL_402128__mem brane protein (M) CDS gc (1-222)(N121K_H125Y_H148Y_H155Y_K162N)
auggccgacagcaacggcaccaucaccguggaggagcugaagaagcuccuggagcaguggaaccuggucaucggguuccucuuccugacguggaucugccugcuccaguucgccuacgcgaaccgcaaccgguuccuguacaucaucaagcugaucuuccucuggcugcuguggcccgugacccucgccugcuucgugcuggccgccgucuaccgcaucaacuggaucaccggcgggaucgccaucgcgauggccugccuggugggccucauguggcuguccuacuucaucgccagcuuccggcuguucgcccgcacccgguccauguggagcuucaacccggagacgaacauccuccugaaggugccccuguacgggaccauccucacccgcccccugcuggaguccgagcucgucaucggcgcggugauccugcggggcuaccuccgcaucgccgggcacuaccugggccggugcgacaucaacgaccugcccaaggagaucaccguggccacgagccgcacccuguccuacuacaagcucggggccagccagcgggucgccggcgacuccggguucgcggccuacagccgcuaccggaucggcaacuacaagcugaacaccgaccacuccagcuccagcgacaacaucgcccugcucgugcaguga

SEQ ID NO: 28035 - RNA, 669 nt, Artificial Sequence
  SARS-CoV-2/Wuhan-Hu-1__NC_045512.2/MN908947.2/EPI_ISL_402128__mem brane protein (M) CDS gc (1-222)(A63T_H125Y)
auggccgacagcaacggcaccaucaccguggaggagcugaagaagcuccuggagcaguggaaccuggucaucggguuccucuuccugacguggaucugccugcuccaguucgccuacgcgaaccgcaaccgguuccuguacaucaucaagcugaucuuccucuggcugcuguggcccgugacccucaccugcuucgugcuggccgccgucuaccgcaucaacuggaucaccggcgggaucgccaucgcgauggccugccuggugggccucauguggcuguccuacuucaucgccagcuuccggcuguucgcccgcacccgguccauguggagcuucaacccggagacgaacauccuccugaacgugccccuguacgggaccauccucacccgcccccugcuggaguccgagcucgucaucggcgcggugauccugcggggccaccuccgcaucgccgggcaccaccugggccggugcgacaucaaggaccugcccaaggagaucaccguggccacgagccgcacccuguccuacuacaagcucggggccagccagcgggucgccggcgacuccggguucgcggccuacagccgcuaccggaucggcaacuacaagcugaacaccgaccacuccagcuccagcgacaacaucgcccugcucgugcaguga

SEQ ID NO: 28036 - RNA, 669 nt, Artificial Sequence
  SARS-CoV-2/Wuhan-Hu-1__NC_045512.2/MN908947.2/EPI_ISL_402128__mem brane protein (M) CDS gc (1-222)(A2S_M109I_H125Y)
augagcgacagcaacggcaccaucaccguggaggagcugaagaagcuccuggagcaguggaaccuggucaucggguuccucuuccugacguggaucugccugcuccaguucgccuacgcgaaccgcaaccgguuccuguacaucaucaagcugaucuuccucuggcugcuguggcccgugacccucgccugcuucgugcuggccgccgucuaccgcaucaacuggaucaccggcgggaucgccaucgcgauggccugccuggugggccucauguggcuguccuacuucaucgccagcuuccggcuguucgcccgcacccgguccaucuggagcuucaacccggagacgaacauccuccugaacgugccccuguacgggaccauccucacccgcccccugcuggaguccgagcucgucaucggcgcggugauccugcggggccaccuccgcaucgccgggcaccaccugggccggugcgacaucaaggaccugcccaaggagaucaccguggccacgagccgcacccuguccuacuacaagcucggggccagccagcgggucgccggcgacuccggguucgcggccuacagccgcuaccggaucggcaacuacaagcugaacaccgaccacuccagcuccagcgacaacaucgcccugcucgugcaguga

SEQ ID NO: 28037 - RNA, 669 nt, Artificial Sequence
  SARS-CoV-2/Wuhan-Hu-1__NC_045512.2/MN908947.2/EPI_ISL_402128__mem brane protein (M) CDS gc (1-222)(A2V_M109I_H125Y)
augguggacagcaacggcaccaucaccguggaggagcugaagaagcuccuggagcaguggaaccuggucaucggguuccucuuccugacguggaucugccugcuccaguucgccuacgcgaaccgcaaccgguuccuguacaucaucaagcugaucuuccucuggcugcuguggcccgugacccucgccugcuucgugcuggccgccgucuaccgcaucaacuggaucaccggcgggaucgccaucgcgauggccugccuggugggccucauguggcuguccuacuucaucgccagcuuccggcuguucgcccgcacccgguccaucuggagcuucaacccggagacgaacauccuccugaacgugccccuguacgggaccauccucacccgcccccugcuggaguccgagcucgucaucggcgcggugauccugcggggccaccuccgcaucgccgggcaccaccugggccggugcgacaucaaggaccugcccaaggagaucaccguggccacgagccgcacccuguccuacuacaagcucggggccagccagcgggucgccggcgacuccggguucgcggccuacagccgcuaccggaucggcaacuacaagcugaacaccgaccacuccagcuccagcgacaacaucgcccugcucgugcaguga

SEQ ID NO: 28038 - RNA, 669 nt, Artificial Sequence
  SARS-CoV-2/Wuhan-Hu-1__NC_045512.2/MN908947.2/EPI_ISL_402128__mem brane protein (M) CDS gc (1-222)(L17F_M109I)
auggccgacagcaacggcaccaucaccguggaggagcugaagaagcucuucgagcaguggaaccuggucaucggguuccucuuccugacguggaucugccugcuccaguucgccuacgcgaaccgcaaccgguuccuguacaucaucaagcugaucuuccucuggcugcuguggcccgugacccucgccugcuucgugcuggccgccgucuaccgcaucaacuggaucaccggcgggaucgccaucgcgauggccugccuggugggccucauguggcuguccuacuucaucgccagcuuccggcuguucgcccgcacccgguccaucuggagcuucaacccggagacgaacauccuccugaacgugccccugcacgggaccauccucacccgcccccugcuggaguccgagcucgucaucggcgcggugauccugcggggccaccuccgcaucgccgggcaccaccugggccggugcgacaucaaggaccugcccaaggagaucaccguggccacgagccgcacccuguccuacuacaagcucggggccagccagcgggucgccggcgacuccggguucgcggccuacagccgcuaccggaucggcaacuacaagcugaacaccgaccacuccagcuccagcgacaacaucgcccugcucgugcaguga

SEQ ID NO: 28039 - RNA, 1257 nt, Artificial Sequence
  SARS-CoV-2/Wuhan-Hu-1__NC_045512.2/MN908947.2/EPI_ISL_402128__nuc leocapsid protein (N) CDS gc (1-419)(D3L_R203K_G204R_S235F)
augagcaacggcccccagaaccagcgcaacgccccgcggaucaccuucgggggccccuccgacagcaccggguccaaccagaacggcgagcgcagcggggcccgguccaagcagcgccggccccagggccugcccaacaacacggcgagcugguucaccgcccucacccagcacggcaaggaggaccugaaguucccgcgcgggcagggcgugcccaucaacaccaacuccagccccgacgaccagaucggguacuaccggcgcgccacgcggcgcauccggggcggggacggcaagaugaaggaccugagcccccgcugguacuucuacuaccucggcaccgggccggaggccggccugcccuacggggccaacaaggacggcaucaucugggucgcgaccgagggcgcccugaacacccccaaggaccacaucgggacgcggaaccccgccaacaacgccgcgaucgugcuccagcugccgcagggcaccacccugcccaagggguucuacgccgagggcucccgcgggggcucccaggccagcucccggagcuccagccgcucccggaacagcucccgcaacagcacccccggcagcuccaagcgcacgagccccgcccgcauggccggcaacgggggcgacgcggcccucgcccugcugcuccuggaccggcugaaccagcucgaguccaagauguucgggaagggccagcagcagcagggccagaccgugaccaagaaguccgccgccgaggcgagcaagaagccgcgccagaagcgcaccgccacgaaggccuacaacgucacccaggccuucgggcggcgcggccccgagcagacccaggggaacuucggcgaccaggagcugauccggcaggggaccgacuacaagcacuggccccagaucgcccaguucgcgcccuccgccagcgccuucuucggcaugucccgcaucggcauggaggugacgccgagcgggaccuggcugaccuacaccggcgccaucaagcucgacgacaaggaccccaacuucaaggaccaggugauccugcugaacaagcacaucgacgccuacaagacguucccgcccaccgagcccaagaaggacaagaagaagaaggcggacgagacccaggcccucccccagcggcagaagaagcagcagaccgucacgcugcugcccgccgccgaccucgacgacuucuccaagcagcugcagcagagcauguccagcgcggacuccacccaggccuga

SEQ ID NO: 28040 - RNA, 1260 nt, Artificial Sequence
  SARS-CoV-2/Wuhan-Hu-1__NC_045512.2/MN908947.2/EPI_ISL_402128__nuc leocapsid protein (N) CDS gc (1-419)(T205I)
augagcgacaacggcccccagaaccagcgcaacgccccgcggaucaccuucgggggccccuccgacagcaccggguccaaccagaacggcgagcgcagcggggcccgguccaagcagcgccggccccagggccugcccaacaacacggcgagcugguucaccgcccucacccagcacggcaaggaggaccugaaguucccgcgcgggcagggcgugcccaucaacaccaacuccagccccgacgaccagaucggguacuaccggcgcgccacgcggcgcauccggggcggggacggcaagaugaaggaccugagcccccgcugguacuucuacuaccucggcaccgggccggaggccggccugcccuacggggccaacaaggacggcaucaucugggucgcgaccgagggcgcccugaacacccccaaggaccacaucgggacgcggaaccccgccaacaacgccgcgaucgugcuccagcugccgcagggcaccacccugcccaagggguucuacgccgagggcucccgcgggggcucccaggccagcucccggagcuccagccgcucccggaacagcucccgcaacagcacccccggcagcucccgggggaucagccccgcccgcauggccggcaacgggggcgacgcggcccucgcccugcugcuccuggaccggcugaaccagcucgaguccaagaugagcgggaagggccagcagcagcagggccagaccgugaccaagaaguccgccgccgaggcgagcaagaagccgcgccagaagcgcaccgccacgaaggccuacaacgucacccaggccuucgggcggcgcggccccgagcagacccaggggaacuucggcgaccaggagcugauccggcaggggaccgacuacaagcacuggccccagaucgcccaguucgcgcccuccgccagcgccuucuucggcaugucccgcaucggcauggaggugacgccgagcgggaccuggcugaccuacaccggcgccaucaagcucgacgacaaggaccccaacuucaaggaccaggugauccugcugaacaagcacaucgacgccuacaagacguucccgcccaccgagcccaagaaggacaagaagaagaaggcggacgagacccaggcccucccccagcggcagaagaagcagcagaccgucacgcugcugcccgccgccgaccucgacgacuucuccaagcagcugcagcagagcauguccagcgcggacuccacccaggccuga

SEQ ID NO: 28041 - RNA, 1260 nt, Artificial Sequence
  SARS-CoV-2/Wuhan-Hu-1__NC_045512.2/MN908947.2/EPI_ISL_402128__nuc leocapsid protein (N) CDS gc (1-419)(P80R)
augagcgacaacggcccccagaaccagcgcaacgccccgcggaucaccuucgggggccccuccgacagcaccggguccaaccagaacggcgagcgcagcggggcccgguccaagcagcgccggccccagggccugcccaacaacacggcgagcugguucaccgcccucacccagcacggcaaggaggaccugaaguucccgcgcgggcagggcgugcccaucaacaccaacuccagccgcgacgaccagaucggguacuaccggcgcgccacgcggcgcauccggggcggggacggcaagaugaaggaccugagcccccgcugguacuucuacuaccucggcaccgggccggaggccggccugcccuacggggccaacaaggacggcaucaucugggucgcgaccgagggcgcccugaacacccccaaggaccacaucgggacgcggaaccccgccaacaacgccgcgaucgugcuccagcugccgcagggcaccacccugcccaagggguucuacgccgagggcucccgcgggggcucccaggccagcucccggagcuccagccgcucccggaacagcucccgcaacagcacccccggcagcucccgggggacgagccccgcccgcauggccggcaacgggggcgacgcggcccucgcccugcugcuccuggaccggcugaaccagcucgaguccaagaugagcgggaagggccagcagcagcagggccagaccgugaccaagaaguccgccgccgaggcgagcaagaagccgcgccagaagcgcaccgccacgaaggccuacaacgucacccaggccuucgggcggcgcggccccgagcagacccaggggaacuucggcgaccaggagcugauccggcaggggaccgacuacaagcacuggccccagaucgcccaguucgcgcccuccgccagcgccuucuucggcaugucccgcaucggcauggaggugacgccgagcgggaccuggcugaccuacaccggcgccaucaagcucgacgacaaggaccccaacuucaaggaccaggugauccugcugaacaagcacaucgacgccuacaagacguucccgcccaccgagcccaagaaggacaagaagaagaaggcggacgagacccaggcccucccccagcggcagaagaagcagcagaccgucacgcugcugcccgccgccgaccucgacgacuucuccaagcagcugcagcagagcauguccagcgcggacuccacccaggccuga

SEQ ID NO: 28042 - RNA, 1260 nt, Artificial Sequence
  SARS-CoV-2/Wuhan-Hu-1__NC_045512.2/MN908947.2/EPI_ISL_402128__nuc leocapsid protein (N) CDS gc (1-419)(P80R_R203K_G204R)
augagcgacaacggcccccagaaccagcgcaacgccccgcggaucaccuucgggggccccuccgacagcaccggguccaaccagaacggcgagcgcagcggggcccgguccaagcagcgccggccccagggccugcccaacaacacggcgagcugguucaccgcccucacccagcacggcaaggaggaccugaaguucccgcgcgggcagggcgugcccaucaacaccaacuccagccgcgacgaccagaucggguacuaccggcgcgccacgcggcgcauccggggcggggacggcaagaugaaggaccugagcccccgcugguacuucuacuaccucggcaccgggccggaggccggccugcccuacggggccaacaaggacggcaucaucugggucgcgaccgagggcgcccugaacacccccaaggaccacaucgggacgcggaaccccgccaacaacgccgcgaucgugcuccagcugccgcagggcaccacccugcccaagggguucuacgccgagggcucccgcgggggcucccaggccagcucccggagcuccagccgcucccggaacagcucccgcaacagcacccccggcagcuccaagcgcacgagccccgcccgcauggccggcaacgggggcgacgcggcccucgcccugcugcuccuggaccggcugaaccagcucgaguccaagaugagcgggaagggccagcagcagcagggccagaccgugaccaagaaguccgccgccgaggcgagcaagaagccgcgccagaagcgcaccgccacgaaggccuacaacgucacccaggccuucgggcggcgcggccccgagcagacccaggggaacuucggcgaccaggagcugauccggcaggggaccgacuacaagcacuggccccagaucgcccaguucgcgcccuccgccagcgccuucuucggcaugucccgcaucggcauggaggugacgccgagcgggaccuggcugaccuacaccggcgccaucaagcucgacgacaaggaccccaacuucaaggaccaggugauccugcugaacaagcacaucgacgccuacaagacguucccgcccaccgagcccaagaaggacaagaagaagaaggcggacgagacccaggcccucccccagcggcagaagaagcagcagaccgucacgcugcugcccgccgccgaccucgacgacuucuccaagcagcugcagcagagcauguccagcgcggacuccacccaggccuga

SEQ ID NO: 28043 - RNA, 1260 nt, Artificial Sequence
  SARS-CoV-2/Wuhan-Hu-1__NC_045512.2/MN908947.2/EPI_ISL_402128__nuc leocapsid protein (N) CDS gc (1-419)(D63G_R203M_G215C_D377Y)
augagcgacaacggcccccagaaccagcgcaacgccccgcggaucaccuucgggggccccuccgacagcaccggguccaaccagaacggcgagcgcagcggggcccgguccaagcagcgccggccccagggccugcccaacaacacggcgagcugguucaccgcccucacccagcacggcaaggagggccugaaguucccgcgcgggcagggcgugcccaucaacaccaacuccagccccgacgaccagaucggguacuaccggcgcgccacgcggcgcauccggggcggggacggcaagaugaaggaccugagcccccgcugguacuucuacuaccucggcaccgggccggaggccggccugcccuacggggccaacaaggacggcaucaucugggucgcgaccgagggcgcccugaacacccccaaggaccacaucgggacgcggaaccccgccaacaacgccgcgaucgugcuccagcugccgcagggcaccacccugcccaagggguucuacgccgagggcucccgcgggggcucccaggccagcucccggagcuccagccgcucccggaacagcucccgcaacagcacccccggcagcuccauggggacgagccccgcccgcauggccggcaacgggugcgacgcggcccucgcccugcugcuccuggaccggcugaaccagcucgaguccaagaugagcgggaagggccagcagcagcagggccagaccgugaccaagaaguccgccgccgaggcgagcaagaagccgcgccagaagcgcaccgccacgaaggccuacaacgucacccaggccuucgggcggcgcggccccgagcagacccaggggaacuucggcgaccaggagcugauccggcaggggaccgacuacaagcacuggccccagaucgcccaguucgcgcccuccgccagcgccuucuucggcaugucccgcaucggcauggaggugacgccgagcgggaccuggcugaccuacaccggcgccaucaagcucgacgacaaggaccccaacuucaaggaccaggugauccugcugaacaagcacaucgacgccuacaagacguucccgcccaccgagcccaagaaggacaagaagaagaaggcguacgagacccaggcccucccccagcggcagaagaagcagcagaccgucacgcugcugcccgccgccgaccucgacgacuucuccaagcagcugcagcagagcauguccagcgcggacuccacccaggccuga

SEQ ID NO: 28044 - RNA, 1260 nt, Artificial Sequence
  SARS-CoV-2/Wuhan-Hu-1__NC_045512.2/MN908947.2/EPI_ISL_402128__nuc leocapsid protein (N) CDS gc (1-419)(D63G_R203M_D377Y)
augagcgacaacggcccccagaaccagcgcaacgccccgcggaucaccuucgggggccccuccgacagcaccggguccaaccagaacggcgagcgcagcggggcccgguccaagcagcgccggccccagggccugcccaacaacacggcgagcugguucaccgcccucacccagcacggcaaggagggccugaaguucccgcgcgggcagggcgugcccaucaacaccaacuccagccccgacgaccagaucggguacuaccggcgcgccacgcggcgcauccggggcggggacggcaagaugaaggaccugagcccccgcugguacuucuacuaccucggcaccgggccggaggccggccugcccuacggggccaacaaggacggcaucaucugggucgcgaccgagggcgcccugaacacccccaaggaccacaucgggacgcggaaccccgccaacaacgccgcgaucgugcuccagcugccgcagggcaccacccugcccaagggguucuacgccgagggcucccgcgggggcucccaggccagcucccggagcuccagccgcucccggaacagcucccgcaacagcacccccggcagcuccauggggacgagccccgcccgcauggccggcaacgggggcgacgcggcccucgcccugcugcuccuggaccggcugaaccagcucgaguccaagaugagcgggaagggccagcagcagcagggccagaccgugaccaagaaguccgccgccgaggcgagcaagaagccgcgccagaagcgcaccgccacgaaggccuacaacgucacccaggccuucgggcggcgcggccccgagcagacccaggggaacuucggcgaccaggagcugauccggcaggggaccgacuacaagcacuggccccagaucgcccaguucgcgcccuccgccagcgccuucuucggcaugucccgcaucggcauggaggugacgccgagcgggaccuggcugaccuacaccggcgccaucaagcucgacgacaaggaccccaacuucaaggaccaggugauccugcugaacaagcacaucgacgccuacaagacguucccgcccaccgagcccaagaaggacaagaagaagaaggcguacgagacccaggcccucccccagcggcagaagaagcagcagaccgucacgcugcugcccgccgccgaccucgacgacuucuccaagcagcugcagcagagcauguccagcgcggacuccacccaggccuga

SEQ ID NO: 28045 - RNA, 1260 nt, Artificial Sequence
  SARS-CoV-2/Wuhan-Hu-1__NC_045512.2/MN908947.2/EPI_ISL_402128__nuc leocapsid protein (N) CDS gc (1-419)(T205I_T362I)
augagcgacaacggcccccagaaccagcgcaacgccccgcggaucaccuucgggggccccuccgacagcaccggguccaaccagaacggcgagcgcagcggggcccgguccaagcagcgccggccccagggccugcccaacaacacggcgagcugguucaccgcccucacccagcacggcaaggaggaccugaaguucccgcgcgggcagggcgugcccaucaacaccaacuccagccccgacgaccagaucggguacuaccggcgcgccacgcggcgcauccggggcggggacggcaagaugaaggaccugagcccccgcugguacuucuacuaccucggcaccgggccggaggccggccugcccuacggggccaacaaggacggcaucaucugggucgcgaccgagggcgcccugaacacccccaaggaccacaucgggacgcggaaccccgccaacaacgccgcgaucgugcuccagcugccgcagggcaccacccugcccaagggguucuacgccgagggcucccgcgggggcucccaggccagcucccggagcuccagccgcucccggaacagcucccgcaacagcacccccggcagcucccgggggaucagccccgcccgcauggccggcaacgggggcgacgcggcccucgcccugcugcuccuggaccggcugaaccagcucgaguccaagaugagcgggaagggccagcagcagcagggccagaccgugaccaagaaguccgccgccgaggcgagcaagaagccgcgccagaagcgcaccgccacgaaggccuacaacgucacccaggccuucgggcggcgcggccccgagcagacccaggggaacuucggcgaccaggagcugauccggcaggggaccgacuacaagcacuggccccagaucgcccaguucgcgcccuccgccagcgccuucuucggcaugucccgcaucggcauggaggugacgccgagcgggaccuggcugaccuacaccggcgccaucaagcucgacgacaaggaccccaacuucaaggaccaggugauccugcugaacaagcacaucgacgccuacaagaucuucccgcccaccgagcccaagaaggacaagaagaagaaggcggacgagacccaggcccucccccagcggcagaagaagcagcagaccgucacgcugcugcccgccgccgaccucgacgacuucuccaagcagcugcagcagagcauguccagcgcggacuccacccaggccuga

SEQ ID NO: 28046 - RNA, 1257 nt, Artificial Sequence
  SARS-CoV-2/Wuhan-Hu-1__NC_045512.2/MN908947.2/EPI_ISL_402128__nuc leocapsid protein (N) CDS gc (1-419)(S2Y_D3del_A12G_T205I)
auguacaacggcccccagaaccagcgcaacggcccgcggaucaccuucgggggccccuccgacagcaccggguccaaccagaacggcgagcgcagcggggcccgguccaagcagcgccggccccagggccugcccaacaacacggcgagcugguucaccgcccucacccagcacggcaaggaggaccugaaguucccgcgcgggcagggcgugcccaucaacaccaacuccagccccgacgaccagaucggguacuaccggcgcgccacgcggcgcauccggggcggggacggcaagaugaaggaccugagcccccgcugguacuucuacuaccucggcaccgggccggaggccggccugcccuacggggccaacaaggacggcaucaucugggucgcgaccgagggcgcccugaacacccccaaggaccacaucgggacgcggaaccccgccaacaacgccgcgaucgugcuccagcugccgcagggcaccacccugcccaagggguucuacgccgagggcucccgcgggggcucccaggccagcucccggagcuccagccgcucccggaacagcucccgcaacagcacccccggcagcucccgggggaucagccccgcccgcauggccggcaacgggggcgacgcggcccucgcccugcugcuccuggaccggcugaaccagcucgaguccaagaugagcgggaagggccagcagcagcagggccagaccgugaccaagaaguccgccgccgaggcgagcaagaagccgcgccagaagcgcaccgccacgaaggccuacaacgucacccaggccuucgggcggcgcggccccgagcagacccaggggaacuucggcgaccaggagcugauccggcaggggaccgacuacaagcacuggccccagaucgcccaguucgcgcccuccgccagcgccuucuucggcaugucccgcaucggcauggaggugacgccgagcgggaccuggcugaccuacaccggcgccaucaagcucgacgacaaggaccccaacuucaaggaccaggugauccugcugaacaagcacaucgacgccuacaagacguucccgcccaccgagcccaagaaggacaagaagaagaaggcggacgagacccaggcccucccccagcggcagaagaagcagcagaccgucacgcugcugcccgccgccgaccucgacgacuucuccaagcagcugcagcagagcauguccagcgcggacuccacccaggccuga

SEQ ID NO: 28047 - RNA, 1260 nt, Artificial Sequence
  SARS-CoV-2/Wuhan-Hu-1__NC_045512.2/MN908947.2/EPI_ISL_402128__nuc leocapsid protein (N) CDS gc (1-419)(P13L_R203K_G204R_G214C)
augagcgacaacggcccccagaaccagcgcaacgcccugcggaucaccuucgggggccccuccgacagcaccggguccaaccagaacggcgagcgcagcggggcccgguccaagcagcgccggccccagggccugcccaacaacacggcgagcugguucaccgcccucacccagcacggcaaggaggaccugaaguucccgcgcgggcagggcgugcccaucaacaccaacuccagccccgacgaccagaucggguacuaccggcgcgccacgcggcgcauccggggcggggacggcaagaugaaggaccugagcccccgcugguacuucuacuaccucggcaccgggccggaggccggccugcccuacggggccaacaaggacggcaucaucugggucgcgaccgagggcgcccugaacacccccaaggaccacaucgggacgcggaaccccgccaacaacgccgcgaucgugcuccagcugccgcagggcaccacccugcccaagggguucuacgccgagggcucccgcgggggcucccaggccagcucccggagcuccagccgcucccggaacagcucccgcaacagcacccccggcagcuccaagcgcacgagccccgcccgcauggccggcaacugcggcgacgcggcccucgcccugcugcuccuggaccggcugaaccagcucgaguccaagaugagcgggaagggccagcagcagcagggccagaccgugaccaagaaguccgccgccgaggcgagcaagaagccgcgccagaagcgcaccgccacgaaggccuacaacgucacccaggccuucgggcggcgcggccccgagcagacccaggggaacuucggcgaccaggagcugauccggcaggggaccgacuacaagcacuggccccagaucgcccaguucgcgcccuccgccagcgccuucuucggcaugucccgcaucggcauggaggugacgccgagcgggaccuggcugaccuacaccggcgccaucaagcucgacgacaaggaccccaacuucaaggaccaggugauccugcugaacaagcacaucgacgccuacaagacguucccgcccaccgagcccaagaaggacaagaagaagaaggcggacgagacccaggcccucccccagcggcagaagaagcagcagaccgucacgcugcugcccgccgccgaccucgacgacuucuccaagcagcugcagcagagcauguccagcgcggacuccacccaggccuga

SEQ ID NO: 28048 - RNA, 1260 nt, Artificial Sequence
  SARS-CoV-2/Wuhan-Hu-1__NC_045512.2/MN908947.2/EPI_ISL_402128__nuc leocapsid protein (N) CDS gc (1-419)(P67S_R203M_D377Y)
augagcgacaacggcccccagaaccagcgcaacgccccgcggaucaccuucgggggccccuccgacagcaccggguccaaccagaacggcgagcgcagcggggcccgguccaagcagcgccggccccagggccugcccaacaacacggcgagcugguucaccgcccucacccagcacggcaaggaggaccugaaguucagccgcgggcagggcgugcccaucaacaccaacuccagccccgacgaccagaucggguacuaccggcgcgccacgcggcgcauccggggcggggacggcaagaugaaggaccugagcccccgcugguacuucuacuaccucggcaccgggccggaggccggccugcccuacggggccaacaaggacggcaucaucugggucgcgaccgagggcgcccugaacacccccaaggaccacaucgggacgcggaaccccgccaacaacgccgcgaucgugcuccagcugccgcagggcaccacccugcccaagggguucuacgccgagggcucccgcgggggcucccaggccagcucccggagcuccagccgcucccggaacagcucccgcaacagcacccccggcagcuccauggggacgagccccgcccgcauggccggcaacgggggcgacgcggcccucgcccugcugcuccuggaccggcugaaccagcucgaguccaagaugagcgggaagggccagcagcagcagggccagaccgugaccaagaaguccgccgccgaggcgagcaagaagccgcgccagaagcgcaccgccacgaaggccuacaacgucacccaggccuucgggcggcgcggccccgagcagacccaggggaacuucggcgaccaggagcugauccggcaggggaccgacuacaagcacuggccccagaucgcccaguucgcgcccuccgccagcgccuucuucggcaugucccgcaucggcauggaggugacgccgagcgggaccuggcugaccuacaccggcgccaucaagcucgacgacaaggaccccaacuucaaggaccaggugauccugcugaacaagcacaucgacgccuacaagacguucccgcccaccgagcccaagaaggacaagaagaagaaggcguacgagacccaggcccucccccagcggcagaagaagcagcagaccgucacgcugcugcccgccgccgaccucgacgacuucuccaagcagcugcagcagagcauguccagcgcggacuccacccaggccuga

SEQ ID NO: 28049 - RNA, 1260 nt, Artificial Sequence
  SARS-CoV-2/Wuhan-Hu-1__NC_045512.2/MN908947.2/EPI_ISL_402128__nuc leocapsid protein (N) CDS gc (1-419)(I157V_R203K_G204R)
augagcgacaacggcccccagaaccagcgcaacgccccgcggaucaccuucgggggccccuccgacagcaccggguccaaccagaacggcgagcgcagcggggcccgguccaagcagcgccggccccagggccugcccaacaacacggcgagcugguucaccgcccucacccagcacggcaaggaggaccugaaguucccgcgcgggcagggcgugcccaucaacaccaacuccagccccgacgaccagaucggguacuaccggcgcgccacgcggcgcauccggggcggggacggcaagaugaaggaccugagcccccgcugguacuucuacuaccucggcaccgggccggaggccggccugcccuacggggccaacaaggacggcaucaucugggucgcgaccgagggcgcccugaacacccccaaggaccacaucgggacgcggaaccccgccaacaacgccgcgguggugcuccagcugccgcagggcaccacccugcccaagggguucuacgccgagggcucccgcgggggcucccaggccagcucccggagcuccagccgcucccggaacagcucccgcaacagcacccccggcagcuccaagcgcacgagccccgcccgcauggccggcaacgggggcgacgcggcccucgcccugcugcuccuggaccggcugaaccagcucgaguccaagaugagcgggaagggccagcagcagcagggccagaccgugaccaagaaguccgccgccgaggcgagcaagaagccgcgccagaagcgcaccgccacgaaggccuacaacgucacccaggccuucgggcggcgcggccccgagcagacccaggggaacuucggcgaccaggagcugauccggcaggggaccgacuacaagcacuggccccagaucgcccaguucgcgcccuccgccagcgccuucuucggcaugucccgcaucggcauggaggugacgccgagcgggaccuggcugaccuacaccggcgccaucaagcucgacgacaaggaccccaacuucaaggaccaggugauccugcugaacaagcacaucgacgccuacaagacguucccgcccaccgagcccaagaaggacaagaagaagaaggcggacgagacccaggcccucccccagcggcagaagaagcagcagaccgucacgcugcugcccgccgccgaccucgacgacuucuccaagcagcugcagcagagcauguccagcgcggacuccacccaggccuga

SEQ ID NO: 28050 - RNA, 1260 nt, Artificial Sequence
  SARS-CoV-2/Wuhan-Hu-1__NC_045512.2/MN908947.2/EPI_ISL_402128__nuc leocapsid protein (N) CDS gc (1-419)(A119S_R203K_G204R_M234I)
augagcgacaacggcccccagaaccagcgcaacgccccgcggaucaccuucgggggccccuccgacagcaccggguccaaccagaacggcgagcgcagcggggcccgguccaagcagcgccggccccagggccugcccaacaacacggcgagcugguucaccgcccucacccagcacggcaaggaggaccugaaguucccgcgcgggcagggcgugcccaucaacaccaacuccagccccgacgaccagaucggguacuaccggcgcgccacgcggcgcauccggggcggggacggcaagaugaaggaccugagcccccgcugguacuucuacuaccucggcaccgggccggagagcggccugcccuacggggccaacaaggacggcaucaucugggucgcgaccgagggcgcccugaacacccccaaggaccacaucgggacgcggaaccccgccaacaacgccgcgaucgugcuccagcugccgcagggcaccacccugcccaagggguucuacgccgagggcucccgcgggggcucccaggccagcucccggagcuccagccgcucccggaacagcucccgcaacagcacccccggcagcuccaagcgcacgagccccgcccgcauggccggcaacgggggcgacgcggcccucgcccugcugcuccuggaccggcugaaccagcucgaguccaagaucagcgggaagggccagcagcagcagggccagaccgugaccaagaaguccgccgccgaggcgagcaagaagccgcgccagaagcgcaccgccacgaaggccuacaacgucacccaggccuucgggcggcgcggccccgagcagacccaggggaacuucggcgaccaggagcugauccggcaggggaccgacuacaagcacuggccccagaucgcccaguucgcgcccuccgccagcgccuucuucggcaugucccgcaucggcauggaggugacgccgagcgggaccuggcugaccuacaccggcgccaucaagcucgacgacaaggaccccaacuucaaggaccaggugauccugcugaacaagcacaucgacgccuacaagacguucccgcccaccgagcccaagaaggacaagaagaagaaggcggacgagacccaggcccucccccagcggcagaagaagcagcagaccgucacgcugcugcccgccgccgaccucgacgacuucuccaagcagcugcagcagagcauguccagcgcggacuccacccaggccuga

SEQ ID NO: 28051 - RNA, 1260 nt, Artificial Sequence
  SARS-CoV-2/Wuhan-Hu-1__NC_045512.2/MN908947.2/EPI_ISL_402128__nuc leocapsid protein (N) CDS gc (1-419)(R203K_G204R)
augagcgacaacggcccccagaaccagcgcaacgccccgcggaucaccuucgggggccccuccgacagcaccggguccaaccagaacggcgagcgcagcggggcccgguccaagcagcgccggccccagggccugcccaacaacacggcgagcugguucaccgcccucacccagcacggcaaggaggaccugaaguucccgcgcgggcagggcgugcccaucaacaccaacuccagccccgacgaccagaucggguacuaccggcgcgccacgcggcgcauccggggcggggacggcaagaugaaggaccugagcccccgcugguacuucuacuaccucggcaccgggccggaggccggccugcccuacggggccaacaaggacggcaucaucugggucgcgaccgagggcgcccugaacacccccaaggaccacaucgggacgcggaaccccgccaacaacgccgcgaucgugcuccagcugccgcagggcaccacccugcccaagggguucuacgccgagggcucccgcgggggcucccaggccagcucccggagcuccagccgcucccggaacagcucccgcaacagcacccccggcagcuccaagcgcacgagccccgcccgcauggccggcaacgggggcgacgcggcccucgcccugcugcuccuggaccggcugaaccagcucgaguccaagaugagcgggaagggccagcagcagcagggccagaccgugaccaagaaguccgccgccgaggcgagcaagaagccgcgccagaagcgcaccgccacgaaggccuacaacgucacccaggccuucgggcggcgcggccccgagcagacccaggggaacuucggcgaccaggagcugauccggcaggggaccgacuacaagcacuggccccagaucgcccaguucgcgcccuccgccagcgccuucuucggcaugucccgcaucggcauggaggugacgccgagcgggaccuggcugaccuacaccggcgccaucaagcucgacgacaaggaccccaacuucaaggaccaggugauccugcugaacaagcacaucgacgccuacaagacguucccgcccaccgagcccaagaaggacaagaagaagaaggcggacgagacccaggcccucccccagcggcagaagaagcagcagaccgucacgcugcugcccgccgccgaccucgacgacuucuccaagcagcugcagcagagcauguccagcgcggacuccacccaggccuga

SEQ ID NO: 28052 - RNA, 1260 nt, Artificial Sequence
  SARS-CoV-2/Wuhan-Hu-1__NC_045512.2/MN908947.2/EPI_ISL_402128__nuc leocapsid protein (N) CDS gc (1-419)(R203K_G204R_G212V)
augagcgacaacggcccccagaaccagcgcaacgccccgcggaucaccuucgggggccccuccgacagcaccggguccaaccagaacggcgagcgcagcggggcccgguccaagcagcgccggccccagggccugcccaacaacacggcgagcugguucaccgcccucacccagcacggcaaggaggaccugaaguucccgcgcgggcagggcgugcccaucaacaccaacuccagccccgacgaccagaucggguacuaccggcgcgccacgcggcgcauccggggcggggacggcaagaugaaggaccugagcccccgcugguacuucuacuaccucggcaccgggccggaggccggccugcccuacggggccaacaaggacggcaucaucugggucgcgaccgagggcgcccugaacacccccaaggaccacaucgggacgcggaaccccgccaacaacgccgcgaucgugcuccagcugccgcagggcaccacccugcccaagggguucuacgccgagggcucccgcgggggcucccaggccagcucccggagcuccagccgcucccggaacagcucccgcaacagcacccccggcagcuccaagcgcacgagccccgcccgcauggccgugaacgggggcgacgcggcccucgcccugcugcuccuggaccggcugaaccagcucgaguccaagaugagcgggaagggccagcagcagcagggccagaccgugaccaagaaguccgccgccgaggcgagcaagaagccgcgccagaagcgcaccgccacgaaggccuacaacgucacccaggccuucgggcggcgcggccccgagcagacccaggggaacuucggcgaccaggagcugauccggcaggggaccgacuacaagcacuggccccagaucgcccaguucgcgcccuccgccagcgccuucuucggcaugucccgcaucggcauggaggugacgccgagcgggaccuggcugaccuacaccggcgccaucaagcucgacgacaaggaccccaacuucaaggaccaggugauccugcugaacaagcacaucgacgccuacaagacguucccgcccaccgagcccaagaaggacaagaagaagaaggcggacgagacccaggcccucccccagcggcagaagaagcagcagaccgucacgcugcugcccgccgccgaccucgacgacuucuccaagcagcugcagcagagcauguccagcgcggacuccacccaggccuga

SEQ ID NO: 28053 - RNA, 1257 nt, Artificial Sequence
  SARS-CoV-2/Wuhan-Hu-1__NC_045512.2/MN908947.2/EPI_ISL_402128__nuc leocapsid protein (N) CDS gc (1-419)(R203K_G204R_A208G_R209del)
augagcgacaacggcccccagaaccagcgcaacgccccgcggaucaccuucgggggccccuccgacagcaccggguccaaccagaacggcgagcgcagcggggcccgguccaagcagcgccggccccagggccugcccaacaacacggcgagcugguucaccgcccucacccagcacggcaaggaggaccugaaguucccgcgcgggcagggcgugcccaucaacaccaacuccagccccgacgaccagaucggguacuaccggcgcgccacgcggcgcauccggggcggggacggcaagaugaaggaccugagcccccgcugguacuucuacuaccucggcaccgggccggaggccggccugcccuacggggccaacaaggacggcaucaucugggucgcgaccgagggcgcccugaacacccccaaggaccacaucgggacgcggaaccccgccaacaacgccgcgaucgugcuccagcugccgcagggcaccacccugcccaagggguucuacgccgagggcucccgcgggggcucccaggccagcucccggagcuccagccgcucccggaacagcucccgcaacagcacccccggcagcuccaagcgcacgagccccggcauggccggcaacgggggcgacgcggcccucgcccugcugcuccuggaccggcugaaccagcucgaguccaagaugagcgggaagggccagcagcagcagggccagaccgugaccaagaaguccgccgccgaggcgagcaagaagccgcgccagaagcgcaccgccacgaaggccuacaacgucacccaggccuucgggcggcgcggccccgagcagacccaggggaacuucggcgaccaggagcugauccggcaggggaccgacuacaagcacuggccccagaucgcccaguucgcgcccuccgccagcgccuucuucggcaugucccgcaucggcauggaggugacgccgagcgggaccuggcugaccuacaccggcgccaucaagcucgacgacaaggaccccaacuucaaggaccaggugauccugcugaacaagcacaucgacgccuacaagacguucccgcccaccgagcccaagaaggacaagaagaagaaggcggacgagacccaggcccucccccagcggcagaagaagcagcagaccgucacgcugcugcccgccgccgaccucgacgacuucuccaagcagcugcagcagagcauguccagcgcggacuccacccaggccuga

SEQ ID NO: 28054 - RNA, 1260 nt, Artificial Sequence
  SARS-CoV-2/Wuhan-Hu-1__NC_045512.2/MN908947.2/EPI_ISL_402128__nuc leocapsid protein (N) CDS gc (1-419)(R203M_D377Y)
augagcgacaacggcccccagaaccagcgcaacgccccgcggaucaccuucgggggccccuccgacagcaccggguccaaccagaacggcgagcgcagcggggcccgguccaagcagcgccggccccagggccugcccaacaacacggcgagcugguucaccgcccucacccagcacggcaaggaggaccugaaguucccgcgcgggcagggcgugcccaucaacaccaacuccagccccgacgaccagaucggguacuaccggcgcgccacgcggcgcauccggggcggggacggcaagaugaaggaccugagcccccgcugguacuucuacuaccucggcaccgggccggaggccggccugcccuacggggccaacaaggacggcaucaucugggucgcgaccgagggcgcccugaacacccccaaggaccacaucgggacgcggaaccccgccaacaacgccgcgaucgugcuccagcugccgcagggcaccacccugcccaagggguucuacgccgagggcucccgcgggggcucccaggccagcucccggagcuccagccgcucccggaacagcucccgcaacagcacccccggcagcuccauggggacgagccccgcccgcauggccggcaacgggggcgacgcggcccucgcccugcugcuccuggaccggcugaaccagcucgaguccaagaugagcgggaagggccagcagcagcagggccagaccgugaccaagaaguccgccgccgaggcgagcaagaagccgcgccagaagcgcaccgccacgaaggccuacaacgucacccaggccuucgggcggcgcggccccgagcagacccaggggaacuucggcgaccaggagcugauccggcaggggaccgacuacaagcacuggccccagaucgcccaguucgcgcccuccgccagcgccuucuucggcaugucccgcaucggcauggaggugacgccgagcgggaccuggcugaccuacaccggcgccaucaagcucgacgacaaggaccccaacuucaaggaccaggugauccugcugaacaagcacaucgacgccuacaagacguucccgcccaccgagcccaagaaggacaagaagaagaaggcguacgagacccaggcccucccccagcggcagaagaagcagcagaccgucacgcugcugcccgccgccgaccucgacgacuucuccaagcagcugcagcagagcauguccagcgcggacuccacccaggccuga

SEQ ID NO: 28055 - RNA, 1260 nt, Artificial Sequence
  SARS-CoV-2/Wuhan-Hu-1__NC_045512.2/MN908947.2/EPI_ISL_402128__nuc leocapsid protein (N) CDS gc (1-419)(T205I_M234I)
augagcgacaacggcccccagaaccagcgcaacgccccgcggaucaccuucgggggccccuccgacagcaccggguccaaccagaacggcgagcgcagcggggcccgguccaagcagcgccggccccagggccugcccaacaacacggcgagcugguucaccgcccucacccagcacggcaaggaggaccugaaguucccgcgcgggcagggcgugcccaucaacaccaacuccagccccgacgaccagaucggguacuaccggcgcgccacgcggcgcauccggggcggggacggcaagaugaaggaccugagcccccgcugguacuucuacuaccucggcaccgggccggaggccggccugcccuacggggccaacaaggacggcaucaucugggucgcgaccgagggcgcccugaacacccccaaggaccacaucgggacgcggaaccccgccaacaacgccgcgaucgugcuccagcugccgcagggcaccacccugcccaagggguucuacgccgagggcucccgcgggggcucccaggccagcucccggagcuccagccgcucccggaacagcucccgcaacagcacccccggcagcucccgggggaucagccccgcccgcauggccggcaacgggggcgacgcggcccucgcccugcugcuccuggaccggcugaaccagcucgaguccaagaucagcgggaagggccagcagcagcagggccagaccgugaccaagaaguccgccgccgaggcgagcaagaagccgcgccagaagcgcaccgccacgaaggccuacaacgucacccaggccuucgggcggcgcggccccgagcagacccaggggaacuucggcgaccaggagcugauccggcaggggaccgacuacaagcacuggccccagaucgcccaguucgcgcccuccgccagcgccuucuucggcaugucccgcaucggcauggaggugacgccgagcgggaccuggcugaccuacaccggcgccaucaagcucgacgacaaggaccccaacuucaaggaccaggugauccugcugaacaagcacaucgacgccuacaagacguucccgcccaccgagcccaagaaggacaagaagaagaaggcggacgagacccaggcccucccccagcggcagaagaagcagcagaccgucacgcugcugcccgccgccgaccucgacgacuucuccaagcagcugcagcagagcauguccagcgcggacuccacccaggccuga

SEQ ID NO: 28056 - RNA, 1260 nt, Artificial Sequence; identical to SEQ ID NO: 17272
  SARS-CoV-2/Wuhan-Hu-1__NC_045512.2/MN908947.2/EPI_ISL_402128__nuc leocapsid protein (N) CDS gc (1-419)(M234I)

SEQ ID NO: 28057 - RNA, 1260 nt, Artificial Sequence
  SARS-CoV-2/Wuhan-Hu-1__NC_045512.2/MN908947.2/EPI_ISL_402128__nuc leocapsid protein (N) CDS gc (1-419)(A12G_T205I)
augagcgacaacggcccccagaaccagcgcaacggcccgcggaucaccuucgggggccccuccgacagcaccggguccaaccagaacggcgagcgcagcggggcccgguccaagcagcgccggccccagggccugcccaacaacacggcgagcugguucaccgcccucacccagcacggcaaggaggaccugaaguucccgcgcgggcagggcgugcccaucaacaccaacuccagccccgacgaccagaucggguacuaccggcgcgccacgcggcgcauccggggcggggacggcaagaugaaggaccugagcccccgcugguacuucuacuaccucggcaccgggccggaggccggccugcccuacggggccaacaaggacggcaucaucugggucgcgaccgagggcgcccugaacacccccaaggaccacaucgggacgcggaaccccgccaacaacgccgcgaucgugcuccagcugccgcagggcaccacccugcccaagggguucuacgccgagggcucccgcgggggcucccaggccagcucccggagcuccagccgcucccggaacagcucccgcaacagcacccccggcagcucccgggggaucagccccgcccgcauggccggcaacgggggcgacgcggcccucgcccugcugcuccuggaccggcugaaccagcucgaguccaagaugagcgggaagggccagcagcagcagggccagaccgugaccaagaaguccgccgccgaggcgagcaagaagccgcgccagaagcgcaccgccacgaaggccuacaacgucacccaggccuucgggcggcgcggccccgagcagacccaggggaacuucggcgaccaggagcugauccggcaggggaccgacuacaagcacuggccccagaucgcccaguucgcgcccuccgccagcgccuucuucggcaugucccgcaucggcauggaggugacgccgagcgggaccuggcugaccuacaccggcgccaucaagcucgacgacaaggaccccaacuucaaggaccaggugauccugcugaacaagcacaucgacgccuacaagacguucccgcccaccgagcccaagaaggacaagaagaagaaggcggacgagacccaggcccucccccagcggcagaagaagcagcagaccgucacgcugcugcccgccgccgaccucgacgacuucuccaagcagcugcagcagagcauguccagcgcggacuccacccaggccuga

SEQ ID NO: 28058 - RNA, 1260 nt, Artificial Sequence
  SARS-CoV-2/Wuhan-Hu-1__NC_045512.2/MN908947.2/EPI_ISL_402128__nuc leocapsid protein (N) CDS gc (1-419)(P13L_P199L_S202R_T205I_M234I)
augagcgacaacggcccccagaaccagcgcaacgcccugcggaucaccuucgggggccccuccgacagcaccggguccaaccagaacggcgagcgcagcggggcccgguccaagcagcgccggccccagggccugcccaacaacacggcgagcugguucaccgcccucacccagcacggcaaggaggaccugaaguucccgcgcgggcagggcgugcccaucaacaccaacuccagccccgacgaccagaucggguacuaccggcgcgccacgcggcgcauccggggcggggacggcaagaugaaggaccugagcccccgcugguacuucuacuaccucggcaccgggccggaggccggccugcccuacggggccaacaaggacggcaucaucugggucgcgaccgagggcgcccugaacacccccaaggaccacaucgggacgcggaaccccgccaacaacgccgcgaucgugcuccagcugccgcagggcaccacccugcccaagggguucuacgccgagggcucccgcgggggcucccaggccagcucccggagcuccagccgcucccggaacagcucccgcaacagcacccugggcagccgccgggggaucagccccgcccgcauggccggcaacgggggcgacgcggcccucgcccugcugcuccuggaccggcugaaccagcucgaguccaagaucagcgggaagggccagcagcagcagggccagaccgugaccaagaaguccgccgccgaggcgagcaagaagccgcgccagaagcgcaccgccacgaaggccuacaacgucacccaggccuucgggcggcgcggccccgagcagacccaggggaacuucggcgaccaggagcugauccggcaggggaccgacuacaagcacuggccccagaucgcccaguucgcgcccuccgccagcgccuucuucggcaugucccgcaucggcauggaggugacgccgagcgggaccuggcugaccuacaccggcgccaucaagcucgacgacaaggaccccaacuucaaggaccaggugauccugcugaacaagcacaucgacgccuacaagacguucccgcccaccgagcccaagaaggacaagaagaagaaggcggacgagacccaggcccucccccagcggcagaagaagcagcagaccgucacgcugcugcccgccgccgaccucgacgacuucuccaagcagcugcagcagagcauguccagcgcggacuccacccaggccuga

SEQ ID NO: 28059 - RNA, 1260 nt, Artificial Sequence
  SARS-CoV-2/Wuhan-Hu-1__NC_045512.2/MN908947.2/EPI_ISL_402128__nuc leocapsid protein (N) CDS gc (1-419)(P13L_R203K_G204R_G214C_T366I)
augagcgacaacggcccccagaaccagcgcaacgcccugcggaucaccuucgggggccccuccgacagcaccggguccaaccagaacggcgagcgcagcggggcccgguccaagcagcgccggccccagggccugcccaacaacacggcgagcugguucaccgcccucacccagcacggcaaggaggaccugaaguucccgcgcgggcagggcgugcccaucaacaccaacuccagccccgacgaccagaucggguacuaccggcgcgccacgcggcgcauccggggcggggacggcaagaugaaggaccugagcccccgcugguacuucuacuaccucggcaccgggccggaggccggccugcccuacggggccaacaaggacggcaucaucugggucgcgaccgagggcgcccugaacacccccaaggaccacaucgggacgcggaaccccgccaacaacgccgcgaucgugcuccagcugccgcagggcaccacccugcccaagggguucuacgccgagggcucccgcgggggcucccaggccagcucccggagcuccagccgcucccggaacagcucccgcaacagcacccccggcagcuccaagcgcacgagccccgcccgcauggccggcaacugcggcgacgcggcccucgcccugcugcuccuggaccggcugaaccagcucgaguccaagaugagcgggaagggccagcagcagcagggccagaccgugaccaagaaguccgccgccgaggcgagcaagaagccgcgccagaagcgcaccgccacgaaggccuacaacgucacccaggccuucgggcggcgcggccccgagcagacccaggggaacuucggcgaccaggagcugauccggcaggggaccgacuacaagcacuggccccagaucgcccaguucgcgcccuccgccagcgccuucuucggcaugucccgcaucggcauggaggugacgccgagcgggaccuggcugaccuacaccggcgccaucaagcucgacgacaaggaccccaacuucaaggaccaggugauccugcugaacaagcacaucgacgccuacaagacguucccgcccaucgagcccaagaaggacaagaagaagaaggcggacgagacccaggcccucccccagcggcagaagaagcagcagaccgucacgcugcugcccgccgccgaccucgacgacuucuccaagcagcugcagcagagcauguccagcgcggacuccacccaggccuga

SEQ ID NO: 28060 - RNA, 1257 nt, Artificial Sequence
  SARS-CoV-2/Wuhan-Hu-1__NC_045512.2/MN908947.2/EPI_ISL_402128__nuc leocapsid protein (N) CDS gc (1-419)(R203K_G204R_A208G_R209del_M234I)
augagcgacaacggcccccagaaccagcgcaacgccccgcggaucaccuucgggggccccuccgacagcaccggguccaaccagaacggcgagcgcagcggggcccgguccaagcagcgccggccccagggccugcccaacaacacggcgagcugguucaccgcccucacccagcacggcaaggaggaccugaaguucccgcgcgggcagggcgugcccaucaacaccaacuccagccccgacgaccagaucggguacuaccggcgcgccacgcggcgcauccggggcggggacggcaagaugaaggaccugagcccccgcugguacuucuacuaccucggcaccgggccggaggccggccugcccuacggggccaacaaggacggcaucaucugggucgcgaccgagggcgcccugaacacccccaaggaccacaucgggacgcggaaccccgccaacaacgccgcgaucgugcuccagcugccgcagggcaccacccugcccaagggguucuacgccgagggcucccgcgggggcucccaggccagcucccggagcuccagccgcucccggaacagcucccgcaacagcacccccggcagcuccaagcgcacgagccccggcauggccggcaacgggggcgacgcggcccucgcccugcugcuccuggaccggcugaaccagcucgaguccaagaucagcgggaagggccagcagcagcagggccagaccgugaccaagaaguccgccgccgaggcgagcaagaagccgcgccagaagcgcaccgccacgaaggccuacaacgucacccaggccuucgggcggcgcggccccgagcagacccaggggaacuucggcgaccaggagcugauccggcaggggaccgacuacaagcacuggccccagaucgcccaguucgcgcccuccgccagcgccuucuucggcaugucccgcaucggcauggaggugacgccgagcgggaccuggcugaccuacaccggcgccaucaagcucgacgacaaggaccccaacuucaaggaccaggugauccugcugaacaagcacaucgacgccuacaagacguucccgcccaccgagcccaagaaggacaagaagaagaaggcggacgagacccaggcccucccccagcggcagaagaagcagcagaccgucacgcugcugcccgccgccgaccucgacgacuucuccaagcagcugcagcagagcauguccagcgcggacuccacccaggccuga

SEQ ID NO: 28061 - RNA, 228 nt, Artificial Sequence
  SARS-CoV-2/Wuhan-Hu-1__NC_045512.2/MN908947.2/EPI_ISL_402128__env elope protein (E) CDS gc (1-75)(P71L)
auguacagcuucguguccgaggagaccggcacccugaucgucaacagcgugcuccuguuccuggccuucguggucuuccuccuggugacgcuggccauccucaccgcgcugcgccugugcgccuacugcugcaacaucgugaacgucucccucgugaagcccagcuucuacguguacucccgggucaagaaccugaacagcucccgcgugcuggaccugcucguguga

SEQ ID NO: 28062 - RNA, 228 nt, Artificial Sequence
  SARS-CoV-2/Wuhan-Hu-1__NC_045512.2/MN908947.2/EPI_ISL_402128__env elope protein (E) CDS gc (1-75)(T9I_C43F_V49L_V58F_V62F_L73F)
auguacagcuucguguccgaggagaucggcacccugaucgucaacagcgugcuccuguuccuggccuucguggucuuccuccuggugacgcuggccauccucaccgcgcugcgccugugcgccuacuucugcaacaucgugaaccugucccucgugaagcccagcuucuacuucuacucccgguucaagaaccugaacagcucccgcgugccggacuuccucguguga

SEQ ID NO: 28063 - RNA, 228 nt, Artificial Sequence
  SARS-CoV-2/Wuhan-Hu-1__NC_045512.2/MN908947.2/EPI_ISL_402128__env elope protein (E) CDS gc (1-75)(T9I_V58F_V62F_S68F_L73F)
auguacagcuucguguccgaggagaucggcacccugaucgucaacagcgugcuccuguuccuggccuucguggucuuccuccuggugacgcuggccauccucaccgcgcugcgccugugcgccuacugcugcaacaucgugaacgucucccucgugaagcccagcuucuacuucuacucccgguucaagaaccugaacagcuuccgcgugccggacuuccucguguga

SEQ ID NO: 28064 - RNA, 228 nt, Artificial Sequence
  SARS-CoV-2/Wuhan-Hu-1__NC_045512.2/MN908947.2/EPI_ISL_402128__env elope protein (E) CDS gc (1-75)(T9I_V58F_S68A_R69G_P71S)
auguacagcuucguguccgaggagaucggcacccugaucgucaacagcgugcuccuguuccuggccuucguggucuuccuccuggugacgcuggccauccucaccgcgcugcgccugugcgccuacugcugcaacaucgugaacgucucccucgugaagcccagcuucuacuucuacucccgggucaagaaccugaacagcgccggcgugagcgaccugcucguguga

SEQ ID NO: 28065 - RNA, 228 nt, Artificial Sequence
  SARS-CoV-2/Wuhan-Hu-1__NC_045512.2/MN908947.2/EPI_ISL_402128__env elope protein (E) CDS gc (1-75)(L21F)
auguacagcuucguguccgaggagaccggcacccugaucgucaacagcgugcuccuguucuucgccuucguggucuuccuccuggugacgcuggccauccucaccgcgcugcgccugugcgccuacugcugcaacaucgugaacgucucccucgugaagcccagcuucuacguguacucccgggucaagaaccugaacagcucccgcgugccggaccugcucguguga

SEQ ID NO: 28066 - RNA, 228 nt, Artificial Sequence
  SARS-CoV-2/Wuhan-Hu-1__NC_045512.2/MN908947.2/EPI_ISL_402128__env elope protein (E) CDS gc (1-75)(T9I_L21F_S55F_V58F_S68F_L73F)
auguacagcuucguguccgaggagaucggcacccugaucgucaacagcgugcuccuguucuucgccuucguggucuuccuccuggugacgcuggccauccucaccgcgcugcgccugugcgccuacugcugcaacaucgugaacgucucccucgugaagcccuucuucuacuucuacucccgggucaagaaccugaacagcuuccgcgugccggacuuccucguguga

SEQ ID NO: 28067 - RNA, 228 nt, Artificial Sequence
  SARS-CoV-2/Wuhan-Hu-1__NC_045512.2/MN908947.2/EPI_ISL_402128__env elope protein (E) CDS gc (1-75)(T9I_S55F_V58F_S68F_P71L_D72Y_L73F)
auguacagcuucguguccgaggagaucggcacccugaucgucaacagcgugcuccuguuccuggccuucguggucuuccuccuggugacgcuggccauccucaccgcgcugcgccugugcgccuacugcugcaacaucgugaacgucucccucgugaagcccuucuucuacuucuacucccgggucaagaaccugaacagcuuccgcgugcuguacuuccucguguga

SEQ ID NO: 28068 - RNA, 228 nt, Artificial Sequence
  SARS-CoV-2/Wuhan-Hu-1__NC_045512.2/MN908947.2/EPI_ISL_402128__env elope protein (E) CDS gc (1-75)(T9I_S55F_V58F_S68F_D72Y_L73F)
auguacagcuucguguccgaggagaucggcacccugaucgucaacagcgugcuccuguuccuggccuucguggucuuccuccuggugacgcuggccauccucaccgcgcugcgccugugcgccuacugcugcaacaucgugaacgucucccucgugaagcccuucuucuacuucuacucccgggucaagaaccugaacagcuuccgcgugccguacuuccucguguga

SEQ ID NO: 28069 - RNA, 5841 nt, Artificial Sequence
  SARS-CoV-2/Wuhan-Hu-1__NC_045512.2/MN908947.2__non-structural protein 3 (NSP3) CDS gc (1-1946)(T184I_A891D_I1413T)
auggcccccaccaaggugaccuucggcgacgacaccgucaucgaggugcagggguacaagagcgugaacaucaccuucgagcuggacgagcgcaucgacaagguccucaacgagaagugcuccgccuacaccguggagcugggcaccgaggugaacgaguucgcgugcgucguggccgacgccgugaucaagacgcugcagccggucagcgagcuccugacgccccuggggaucgaccucgacgagugguccauggccaccuacuaccuguucgacgagagcggcgaguucaagcuggccucccacauguacugcagcuucuacccgcccgacgaggacgaggaggagggggacugcgaggaggaggaguucgagcccuccacccaguacgaguacggcacggaggacgacuaccagggcaagccccucgaguucggggcgaccagcgccgcccugcagcccgaggaggagcaggaggaggacuggcuggacgacgacucccagcagaccgugggccagcaggacgggagcgaggacaaccagaccacgaucauccagaccaucguggagguccagccccagcucgagauggagcugaccccgguggugcagacgaucgaggucaacuccuucagcggcuaccugaagcucaccgacaacguguacaucaagaacgccgacaucguggaggaggcgaagaaggucaagcccaccgugguggucaacgccgccaacguguaccugaagcacgggggcggcguggccggggcccugaacaaggcgaccaacaacgccaugcaggucgaguccgacgacuacaucgccacgaacggcccccucaaggucgggggcagcugcgugcuguccggccacaaccuggccaagcacugccuccacgugguggggcccaacgucaacaagggcgaggacauccagcugcucaagagcgccuacgagaacuucaaccagcacgaggugcugcuggcgccgcugcucuccgccgggaucuucggcgccgaccccauccacagccugcgggugugcgucgacaccgugcgcaccaacguguaccuggccgucuucgacaagaaccucuacgacaagcugguguccagcuuccuggagaugaaguccgagaagcaggucgagcagaagaucgccgagauccccaaggaggaggugaagcccuucaucaccgagagcaagccgagcguggagcagcggaagcaggacgacaagaagaucaaggcgugcguggaggaggucacgaccacccucgaggagaccaaguuccugacggagaaccugcuccuguacaucgacaucaacgggaaccugcaccccgacuccgccacccucgugagcgacaucgacaucaccuuccugaagaaggacgcccccuacaucgugggcgacgucgugcaggagggcgugcugaccgccgucgugauccccacgaagaaggccgggggcaccaccgagaugcucgcgaaggcccugcgcaaggugccgaccgacaacuacaucacgaccuaccccgggcagggccugaacggguacaccgucgaggaggccaagaccgugcucaagaagugcaaguccgccuucuacauccugcccagcaucaucuccaacgagaagcaggagauccugggcaccgugagcuggaaccugcgggagaugcucgcgcacgccgaggagacgcgcaagcugaugcccgucugcguggagaccaaggccaucguguccaccauccagcggaaguacaagggcaucaagauccaggagggggucguggacuacggcgcccgcuucuacuucuacaccagcaagacgaccguggccucccugaucaacacccucaacgaccugaacgagacccuggucacgaugccgcucggguacgugacccacggccugaaccuggaggaggcggcccgguacaugcgcagccucaaggugcccgccaccgucuccgugagcucccccgacgccgugaccgccuacaacggguaccugacgagcuccagcaagacccccgaggagcacuucaucgagaccaucucccuggcgggcagcuacaaggacuggagcuacuccggccagagcacccagcucgggaucgaguuccugaagcggggcgacaaguccgucuacuacacgagcaacccgaccaccuuccaccuggacggggaggugaucaccuucgacaaccucaagacgcugcugucccuccgcgaggugcggaccaucaaggucuucaccaccguggacaacaucaaccugcacacccagguggucgacaugagcaugaccuacggccagcaguucggccccaccuaccuggacggggccgacgugaccaagaucaagccccacaacucccacgagggcaagacguucuacgugcucccgaacgacgacacccugcgcgucgaggccuucgaguacuaccacaccaccgaccccagcuuccuggggcgguacauguccgcccucaaccacacgaagaaguggaaguacccccaggugaacggccugaccagcaucaagugggccgacaacaacugcuaccuggcgaccgcccuccugacccugcagcagaucgagcucaaguucaacccgcccgcccugcaggacgccuacuaccgcgcgcgggccggggaggccgacaacuucugcgcccugauccucgcguacugcaacaagacggugggcgagcugggcgacguccgcgagaccauguccuaccuguuccagcacgccaaccucgacagcugcaagcgggugcugaacgucgugugcaagaccugcgggcagcagcagaccacccugaagggcguggaggccgucauguacauggggacgcucuccuacgagcaguucaagaagggcgugcagauccccugcacgugcgggaagcaggccaccaaguaccuggugcagcaggagagccccuucgucaugauguccgcgcccccggcccaguacgagcugaagcacggcaccuucacgugcgccagcgaguacaccggcaacuaccagugcgggcacuacaagcacaucaccuccaaggagacccucuacugcaucgacggcgcccugcugaccaagagcagcgaguacaaggggcccaucaccgacguguucuacaaggagaacuccuacaccaccacgaucaagcccgugaccuacaagcucgacggcgucgugugcaccgagaucgaccccaagcuggacaacuacuacaagaaggacaacagcuacuucaccgagcagccgaucgaccuggugcccaaccagcccuaccccaacgccuccuucgacaacuucaaguucgucugcgacaacaucaaguucgccgacgaccucaaccagcugacgggguacaagaagccggcgagccgcgagcugaaggugaccuucuuccccgaccucaacggcgacguggucgccaucgacuacaagcacuacacccccuccuucaagaagggcgccaagcugcugcacaagcccaucguguggcacgugaacaacgccaccaacaaggcgacguacaagccgaacaccuggugcauccggugccucuggagcaccaagcccgucgagaccuccaacagcuucgacgugcugaaguccgaggacgcccaggggauggacaaccuggccugcgaggaccucaagcccgugagcgaggaggucguggagaaccccacgauccagaaggacgugcuggagugcaacgucaagaccaccgagguggugggcgacaucauccugaagccggccaacaacucccucaagaucaccgaggaggucgggcacacggaccugauggccgcguacguggacaacagcucccugaccaucaagaagcccaacgagcucagccgcgugcugggccugaagacccucgccacccacgggcuggccgccgucaacuccgugcccugggacacgaucgccaacuacgcgaagccguuccugaacaagguggucagcaccaccaccaacaucgugacgcgcugccucaaccgggugugcaccaacuacaugcccuacuucuucacccugcugcuccagcugugcaccuucacgcgcuccaccaacagccggaucaaggccuccaugcccaccaccaucgccaagaacaccgucaagagcgugggcaaguucugccuggaggccagcuucaacuaccucaagucccccaacuucagcaagcugaucaacaucaccaucugguuccugcuccuguccgugugccugggcagccucaucuacuccacggccgcgcuggggguccugaugagcaaccucggcaugccguccuacugcaccggguaccgcgagggcuaccugaacagcaccaacgugaccaucgccacguacugcaccggcuccauccccugcagcgugugccuguccgggcucgacagccuggacaccuaccccucccuggagaccauccagaucacgaucagcuccuucaagugggaccucaccgccuucggccuggucgccgagugguuccuggccuacauccucuucacccgguucuucuacgugcuggggcuggcggccaucaugcagcuguucuucagcuacuucgccgugcacuucaucuccaacagcuggcucauguggcugaucaucaaccugguccagauggcccccaucuccgcgauggugcgcauguacaucuucuucgccagcuucuacuacguguggaaguccuacguccacgugguggacggcugcaacagcagcacgugcaugaugugcuacaagcggaaccgcgccacgcgggucgagugcaccaccaucgugaacgggguccgccgguccuucuacguguacgccaacggcggcaagggguucugcaagcuccacaacuggaacugcgugaacugcgacaccuucugcgccggcagcacguucaucuccgacgaggucgcgcgcgaccugagccugcaguucaagcggccgaucaaccccaccgaccaguccagcuacaucguggacuccgugaccgucaagaacgggagcauccaccucuacuucgacaaggccggccagaagaccuacgagcgccacucccugagccacuucgugaaccuggacaaccuccgggccaacaacacgaaggggucccugcccaucaacgugaucgucuucgacggcaagagcaagugcgaggaguccagcgccaaguccgccagcguguacuacucccagcugaugugccagcccauccuccugcuggaccaggcgcucgugagcgacgucggcgacagcgccgagguggccgugaagauguucgacgccuacgucaacaccuucuccagcaccuucaacgugccgauggagaagcugaagacccugguggccacggcggaggccgagcucgccaagaacgucucccuggacaacgugcugagcaccuucaucuccgccgcgcgccagggguucguggacagcgacgucgagaccaaggacgugguggagugccucaagcugucccaccagagcgacaucgaggucaccggcgacuccugcaacaacuacaugcugacguacaacaagguggagaacaugacgccccgggaccucggggccugcaucgacugcagcgcccgccacaucaacgcccagguggccaagucccacaacaucgcgcugaucuggaacgucaaggacuucaugagccuguccgagcagcuccggaagcagauccgcagcgccgccaagaagaacaaccugcccuucaagcugaccugcgccaccacccgccagguggugaacgucgugaccaccaagaucgcccucaagggcggguga

SEQ ID NO: 28070 - RNA, 5841 nt, Artificial Sequence
  SARS-CoV-2/Wuhan-Hu-1__NC_045512.2/MN908947.2__non-structural protein 3 (NSP3) CDS gc (1-1946)(A329T_P823L)
auggcccccaccaaggugaccuucggcgacgacaccgucaucgaggugcagggguacaagagcgugaacaucaccuucgagcuggacgagcgcaucgacaagguccucaacgagaagugcuccgccuacaccguggagcugggcaccgaggugaacgaguucgcgugcgucguggccgacgccgugaucaagacgcugcagccggucagcgagcuccugacgccccuggggaucgaccucgacgagugguccauggccaccuacuaccuguucgacgagagcggcgaguucaagcuggccucccacauguacugcagcuucuacccgcccgacgaggacgaggaggagggggacugcgaggaggaggaguucgagcccuccacccaguacgaguacggcacggaggacgacuaccagggcaagccccucgaguucggggcgaccagcgccgcccugcagcccgaggaggagcaggaggaggacuggcuggacgacgacucccagcagaccgugggccagcaggacgggagcgaggacaaccagaccacgaccauccagaccaucguggagguccagccccagcucgagauggagcugaccccgguggugcagacgaucgaggucaacuccuucagcggcuaccugaagcucaccgacaacguguacaucaagaacgccgacaucguggaggaggcgaagaaggucaagcccaccgugguggucaacgccgccaacguguaccugaagcacgggggcggcguggccggggcccugaacaaggcgaccaacaacgccaugcaggucgaguccgacgacuacaucgccacgaacggcccccucaaggucgggggcagcugcgugcuguccggccacaaccuggccaagcacugccuccacgugguggggcccaacgucaacaagggcgaggacauccagcugcucaagagcgccuacgagaacuucaaccagcacgaggugcugcugaccccgcugcucuccgccgggaucuucggcgccgaccccauccacagccugcgggugugcgucgacaccgugcgcaccaacguguaccuggccgucuucgacaagaaccucuacgacaagcugguguccagcuuccuggagaugaaguccgagaagcaggucgagcagaagaucgccgagauccccaaggaggaggugaagcccuucaucaccgagagcaagccgagcguggagcagcggaagcaggacgacaagaagaucaaggcgugcguggaggaggucacgaccacccucgaggagaccaaguuccugacggagaaccugcuccuguacaucgacaucaacgggaaccugcaccccgacuccgccacccucgugagcgacaucgacaucaccuuccugaagaaggacgcccccuacaucgugggcgacgucgugcaggagggcgugcugaccgccgucgugauccccacgaagaaggccgggggcaccaccgagaugcucgcgaaggcccugcgcaaggugccgaccgacaacuacaucacgaccuaccccgggcagggccugaacggguacaccgucgaggaggccaagaccgugcucaagaagugcaaguccgccuucuacauccugcccagcaucaucuccaacgagaagcaggagauccugggcaccgugagcuggaaccugcgggagaugcucgcgcacgccgaggagacgcgcaagcugaugcccgucugcguggagaccaaggccaucguguccaccauccagcggaaguacaagggcaucaagauccaggagggggucguggacuacggcgcccgcuucuacuucuacaccagcaagacgaccguggccucccugaucaacacccucaacgaccugaacgagacccuggucacgaugccgcucggguacgugacccacggccugaaccuggaggaggcggcccgguacaugcgcagccucaaggugcccgccaccgucuccgugagcucccccgacgccgugaccgccuacaacggguaccugacgagcuccagcaagacccccgaggagcacuucaucgagaccaucucccuggcgggcagcuacaaggacuggagcuacuccggccagagcacccagcucgggaucgaguuccugaagcggggcgacaaguccgucuacuacacgagcaacccgaccaccuuccaccuggacggggaggugaucaccuucgacaaccucaagacgcugcugucccuccgcgaggugcggaccaucaaggucuucaccaccguggacaacaucaaccugcacacccagguggucgacaugagcaugaccuacggccagcaguucggccccaccuaccuggacggggccgacgugaccaagaucaagccccacaacucccacgagggcaagacguucuacgugcucccgaacgacgacacccugcgcgucgaggccuucgaguacuaccacaccaccgaccugagcuuccuggggcgguacauguccgcccucaaccacacgaagaaguggaaguacccccaggugaacggccugaccagcaucaagugggccgacaacaacugcuaccuggcgaccgcccuccugacccugcagcagaucgagcucaaguucaacccgcccgcccugcaggacgccuacuaccgcgcgcgggccggggaggccgccaacuucugcgcccugauccucgcguacugcaacaagacggugggcgagcugggcgacguccgcgagaccauguccuaccuguuccagcacgccaaccucgacagcugcaagcgggugcugaacgucgugugcaagaccugcgggcagcagcagaccacccugaagggcguggaggccgucauguacauggggacgcucuccuacgagcaguucaagaagggcgugcagauccccugcacgugcgggaagcaggccaccaaguaccuggugcagcaggagagccccuucgucaugauguccgcgcccccggcccaguacgagcugaagcacggcaccuucacgugcgccagcgaguacaccggcaacuaccagugcgggcacuacaagcacaucaccuccaaggagacccucuacugcaucgacggcgcccugcugaccaagagcagcgaguacaaggggcccaucaccgacguguucuacaaggagaacuccuacaccaccacgaucaagcccgugaccuacaagcucgacggcgucgugugcaccgagaucgaccccaagcuggacaacuacuacaagaaggacaacagcuacuucaccgagcagccgaucgaccuggugcccaaccagcccuaccccaacgccuccuucgacaacuucaaguucgucugcgacaacaucaaguucgccgacgaccucaaccagcugacgggguacaagaagccggcgagccgcgagcugaaggugaccuucuuccccgaccucaacggcgacguggucgccaucgacuacaagcacuacacccccuccuucaagaagggcgccaagcugcugcacaagcccaucguguggcacgugaacaacgccaccaacaaggcgacguacaagccgaacaccuggugcauccggugccucuggagcaccaagcccgucgagaccuccaacagcuucgacgugcugaaguccgaggacgcccaggggauggacaaccuggccugcgaggaccucaagcccgugagcgaggaggucguggagaaccccacgauccagaaggacgugcuggagugcaacgucaagaccaccgagguggugggcgacaucauccugaagccggccaacaacucccucaagaucaccgaggaggucgggcacacggaccugauggccgcguacguggacaacagcucccugaccaucaagaagcccaacgagcucagccgcgugcugggccugaagacccucgccacccacgggcuggccgccgucaacuccgugcccugggacacgaucgccaacuacgcgaagccguuccugaacaagguggucagcaccaccaccaacaucgugacgcgcugccucaaccgggugugcaccaacuacaugcccuacuucuucacccugcugcuccagcugugcaccuucacgcgcuccaccaacagccggaucaaggccuccaugcccaccaccaucgccaagaacaccgucaagagcgugggcaaguucugccuggaggccagcuucaacuaccucaagucccccaacuucagcaagcugaucaacaucaucaucugguuccugcuccuguccgugugccugggcagccucaucuacuccacggccgcgcuggggguccugaugagcaaccucggcaugccguccuacugcaccggguaccgcgagggcuaccugaacagcaccaacgugaccaucgccacguacugcaccggcuccauccccugcagcgugugccuguccgggcucgacagccuggacaccuaccccucccuggagaccauccagaucacgaucagcuccuucaagugggaccucaccgccuucggccuggucgccgagugguuccuggccuacauccucuucacccgguucuucuacgugcuggggcuggcggccaucaugcagcuguucuucagcuacuucgccgugcacuucaucuccaacagcuggcucauguggcugaucaucaaccugguccagauggcccccaucuccgcgauggugcgcauguacaucuucuucgccagcuucuacuacguguggaaguccuacguccacgugguggacggcugcaacagcagcacgugcaugaugugcuacaagcggaaccgcgccacgcgggucgagugcaccaccaucgugaacgggguccgccgguccuucuacguguacgccaacggcggcaagggguucugcaagcuccacaacuggaacugcgugaacugcgacaccuucugcgccggcagcacguucaucuccgacgaggucgcgcgcgaccugagccugcaguucaagcggccgaucaaccccaccgaccaguccagcuacaucguggacuccgugaccgucaagaacgggagcauccaccucuacuucgacaaggccggccagaagaccuacgagcgccacucccugagccacuucgugaaccuggacaaccuccgggccaacaacacgaaggggucccugcccaucaacgugaucgucuucgacggcaagagcaagugcgaggaguccagcgccaaguccgccagcguguacuacucccagcugaugugccagcccauccuccugcuggaccaggcgcucgugagcgacgucggcgacagcgccgagguggccgugaagauguucgacgccuacgucaacaccuucuccagcaccuucaacgugccgauggagaagcugaagacccugguggccacggcggaggccgagcucgccaagaacgucucccuggacaacgugcugagcaccuucaucuccgccgcgcgccagggguucguggacagcgacgucgagaccaaggacgugguggagugccucaagcugucccaccagagcgacaucgaggucaccggcgacuccugcaacaacuacaugcugacguacaacaagguggagaacaugacgccccgggaccucggggccugcaucgacugcagcgcccgccacaucaacgcccagguggccaagucccacaacaucgcgcugaucuggaacgucaaggacuucaugagccuguccgagcagcuccggaagcagauccgcagcgccgccaagaagaacaaccugcccuucaagcugaccugcgccaccacccgccagguggugaacgucgugaccaccaagaucgcccucaagggcggguga

SEQ ID NO: 28071 - RNA, 5841 nt, Artificial Sequence
  SARS-CoV-2/Wuhan-Hu-1__NC_045512.2/MN908947.2__non-structural protein 3 (NSP3) CDS gc (1-1946)(S371L_K978Q)
auggcccccaccaaggugaccuucggcgacgacaccgucaucgaggugcagggguacaagagcgugaacaucaccuucgagcuggacgagcgcaucgacaagguccucaacgagaagugcuccgccuacaccguggagcugggcaccgaggugaacgaguucgcgugcgucguggccgacgccgugaucaagacgcugcagccggucagcgagcuccugacgccccuggggaucgaccucgacgagugguccauggccaccuacuaccuguucgacgagagcggcgaguucaagcuggccucccacauguacugcagcuucuacccgcccgacgaggacgaggaggagggggacugcgaggaggaggaguucgagcccuccacccaguacgaguacggcacggaggacgacuaccagggcaagccccucgaguucggggcgaccagcgccgcccugcagcccgaggaggagcaggaggaggacuggcuggacgacgacucccagcagaccgugggccagcaggacgggagcgaggacaaccagaccacgaccauccagaccaucguggagguccagccccagcucgagauggagcugaccccgguggugcagacgaucgaggucaacuccuucagcggcuaccugaagcucaccgacaacguguacaucaagaacgccgacaucguggaggaggcgaagaaggucaagcccaccgugguggucaacgccgccaacguguaccugaagcacgggggcggcguggccggggcccugaacaaggcgaccaacaacgccaugcaggucgaguccgacgacuacaucgccacgaacggcccccucaaggucgggggcagcugcgugcuguccggccacaaccuggccaagcacugccuccacgugguggggcccaacgucaacaagggcgaggacauccagcugcucaagagcgccuacgagaacuucaaccagcacgaggugcugcuggcgccgcugcucuccgccgggaucuucggcgccgaccccauccacagccugcgggugugcgucgacaccgugcgcaccaacguguaccuggccgucuucgacaagaaccucuacgacaagcuggugcugagcuuccuggagaugaaguccgagaagcaggucgagcagaagaucgccgagauccccaaggaggaggugaagcccuucaucaccgagagcaagccgagcguggagcagcggaagcaggacgacaagaagaucaaggcgugcguggaggaggucacgaccacccucgaggagaccaaguuccugacggagaaccugcuccuguacaucgacaucaacgggaaccugcaccccgacuccgccacccucgugagcgacaucgacaucaccuuccugaagaaggacgcccccuacaucgugggcgacgucgugcaggagggcgugcugaccgccgucgugauccccacgaagaaggccgggggcaccaccgagaugcucgcgaaggcccugcgcaaggugccgaccgacaacuacaucacgaccuaccccgggcagggccugaacggguacaccgucgaggaggccaagaccgugcucaagaagugcaaguccgccuucuacauccugcccagcaucaucuccaacgagaagcaggagauccugggcaccgugagcuggaaccugcgggagaugcucgcgcacgccgaggagacgcgcaagcugaugcccgucugcguggagaccaaggccaucguguccaccauccagcggaaguacaagggcaucaagauccaggagggggucguggacuacggcgcccgcuucuacuucuacaccagcaagacgaccguggccucccugaucaacacccucaacgaccugaacgagacccuggucacgaugccgcucggguacgugacccacggccugaaccuggaggaggcggcccgguacaugcgcagccucaaggugcccgccaccgucuccgugagcucccccgacgccgugaccgccuacaacggguaccugacgagcuccagcaagacccccgaggagcacuucaucgagaccaucucccuggcgggcagcuacaaggacuggagcuacuccggccagagcacccagcucgggaucgaguuccugaagcggggcgacaaguccgucuacuacacgagcaacccgaccaccuuccaccuggacggggaggugaucaccuucgacaaccucaagacgcugcugucccuccgcgaggugcggaccaucaaggucuucaccaccguggacaacaucaaccugcacacccagguggucgacaugagcaugaccuacggccagcaguucggccccaccuaccuggacggggccgacgugaccaagaucaagccccacaacucccacgagggcaagacguucuacgugcucccgaacgacgacacccugcgcgucgaggccuucgaguacuaccacaccaccgaccccagcuuccuggggcgguacauguccgcccucaaccacacgaagaaguggaaguacccccaggugaacggccugaccagcaucaagugggccgacaacaacugcuaccuggcgaccgcccuccugacccugcagcagaucgagcucaaguucaacccgcccgcccugcaggacgccuacuaccgcgcgcgggccggggaggccgccaacuucugcgcccugauccucgcguacugcaacaagacggugggcgagcugggcgacguccgcgagaccauguccuaccuguuccagcacgccaaccucgacagcugcaagcgggugcugaacgucgugugcaagaccugcgggcagcagcagaccacccugaagggcguggaggccgucauguacauggggacgcucuccuacgagcaguucaagaagggcgugcagauccccugcacgugcgggaagcaggccacccaguaccuggugcagcaggagagccccuucgucaugauguccgcgcccccggcccaguacgagcugaagcacggcaccuucacgugcgccagcgaguacaccggcaacuaccagugcgggcacuacaagcacaucaccuccaaggagacccucuacugcaucgacggcgcccugcugaccaagagcagcgaguacaaggggcccaucaccgacguguucuacaaggagaacuccuacaccaccacgaucaagcccgugaccuacaagcucgacggcgucgugugcaccgagaucgaccccaagcuggacaacuacuacaagaaggacaacagcuacuucaccgagcagccgaucgaccuggugcccaaccagcccuaccccaacgccuccuucgacaacuucaaguucgucugcgacaacaucaaguucgccgacgaccucaaccagcugacgggguacaagaagccggcgagccgcgagcugaaggugaccuucuuccccgaccucaacggcgacguggucgccaucgacuacaagcacuacacccccuccuucaagaagggcgccaagcugcugcacaagcccaucguguggcacgugaacaacgccaccaacaaggcgacguacaagccgaacaccuggugcauccggugccucuggagcaccaagcccgucgagaccuccaacagcuucgacgugcugaaguccgaggacgcccaggggauggacaaccuggccugcgaggaccucaagcccgugagcgaggaggucguggagaaccccacgauccagaaggacgugcuggagugcaacgucaagaccaccgagguggugggcgacaucauccugaagccggccaacaacucccucaagaucaccgaggaggucgggcacacggaccugauggccgcguacguggacaacagcucccugaccaucaagaagcccaacgagcucagccgcgugcugggccugaagacccucgccacccacgggcuggccgccgucaacuccgugcccugggacacgaucgccaacuacgcgaagccguuccugaacaagguggucagcaccaccaccaacaucgugacgcgcugccucaaccgggugugcaccaacuacaugcccuacuucuucacccugcugcuccagcugugcaccuucacgcgcuccaccaacagccggaucaaggccuccaugcccaccaccaucgccaagaacaccgucaagagcgugggcaaguucugccuggaggccagcuucaacuaccucaagucccccaacuucagcaagcugaucaacaucaucaucugguuccugcuccuguccgugugccugggcagccucaucuacuccacggccgcgcuggggguccugaugagcaaccucggcaugccguccuacugcaccggguaccgcgagggcuaccugaacagcaccaacgugaccaucgccacguacugcaccggcuccauccccugcagcgugugccuguccgggcucgacagccuggacaccuaccccucccuggagaccauccagaucacgaucagcuccuucaagugggaccucaccgccuucggccuggucgccgagugguuccuggccuacauccucuucacccgguucuucuacgugcuggggcuggcggccaucaugcagcuguucuucagcuacuucgccgugcacuucaucuccaacagcuggcucauguggcugaucaucaaccugguccagauggcccccaucuccgcgauggugcgcauguacaucuucuucgccagcuucuacuacguguggaaguccuacguccacgugguggacggcugcaacagcagcacgugcaugaugugcuacaagcggaaccgcgccacgcgggucgagugcaccaccaucgugaacgggguccgccgguccuucuacguguacgccaacggcggcaagggguucugcaagcuccacaacuggaacugcgugaacugcgacaccuucugcgccggcagcacguucaucuccgacgaggucgcgcgcgaccugagccugcaguucaagcggccgaucaaccccaccgaccaguccagcuacaucguggacuccgugaccgucaagaacgggagcauccaccucuacuucgacaaggccggccagaagaccuacgagcgccacucccugagccacuucgugaaccuggacaaccuccgggccaacaacacgaaggggucccugcccaucaacgugaucgucuucgacggcaagagcaagugcgaggaguccagcgccaaguccgccagcguguacuacucccagcugaugugccagcccauccuccugcuggaccaggcgcucgugagcgacgucggcgacagcgccgagguggccgugaagauguucgacgccuacgucaacaccuucuccagcaccuucaacgugccgauggagaagcugaagacccugguggccacggcggaggccgagcucgccaagaacgucucccuggacaacgugcugagcaccuucaucuccgccgcgcgccagggguucguggacagcgacgucgagaccaaggacgugguggagugccucaagcugucccaccagagcgacaucgaggucaccggcgacuccugcaacaacuacaugcugacguacaacaagguggagaacaugacgccccgggaccucggggccugcaucgacugcagcgcccgccacaucaacgcccagguggccaagucccacaacaucgcgcugaucuggaacgucaaggacuucaugagccuguccgagcagcuccggaagcagauccgcagcgccgccaagaagaacaaccugcccuucaagcugaccugcgccaccacccgccagguggugaacgucgugaccaccaagaucgcccucaagggcggguga

SEQ ID NO: 28072 - RNA, 5841 nt, Artificial Sequence
  SARS-CoV-2/Wuhan-Hu-1__NC_045512.2/MN908947.2__non-structural protein 3 (NSP3) CDS gc (1-1946)(A489S_P1229L_P1470S)
auggcccccaccaaggugaccuucggcgacgacaccgucaucgaggugcagggguacaagagcgugaacaucaccuucgagcuggacgagcgcaucgacaagguccucaacgagaagugcuccgccuacaccguggagcugggcaccgaggugaacgaguucgcgugcgucguggccgacgccgugaucaagacgcugcagccggucagcgagcuccugacgccccuggggaucgaccucgacgagugguccauggccaccuacuaccuguucgacgagagcggcgaguucaagcuggccucccacauguacugcagcuucuacccgcccgacgaggacgaggaggagggggacugcgaggaggaggaguucgagcccuccacccaguacgaguacggcacggaggacgacuaccagggcaagccccucgaguucggggcgaccagcgccgcccugcagcccgaggaggagcaggaggaggacuggcuggacgacgacucccagcagaccgugggccagcaggacgggagcgaggacaaccagaccacgaccauccagaccaucguggagguccagccccagcucgagauggagcugaccccgguggugcagacgaucgaggucaacuccuucagcggcuaccugaagcucaccgacaacguguacaucaagaacgccgacaucguggaggaggcgaagaaggucaagcccaccgugguggucaacgccgccaacguguaccugaagcacgggggcggcguggccggggcccugaacaaggcgaccaacaacgccaugcaggucgaguccgacgacuacaucgccacgaacggcccccucaaggucgggggcagcugcgugcuguccggccacaaccuggccaagcacugccuccacgugguggggcccaacgucaacaagggcgaggacauccagcugcucaagagcgccuacgagaacuucaaccagcacgaggugcugcuggcgccgcugcucuccgccgggaucuucggcgccgaccccauccacagccugcgggugugcgucgacaccgugcgcaccaacguguaccuggccgucuucgacaagaaccucuacgacaagcugguguccagcuuccuggagaugaaguccgagaagcaggucgagcagaagaucgccgagauccccaaggaggaggugaagcccuucaucaccgagagcaagccgagcguggagcagcggaagcaggacgacaagaagaucaaggcgugcguggaggaggucacgaccacccucgaggagaccaaguuccugacggagaaccugcuccuguacaucgacaucaacgggaaccugcaccccgacuccgccacccucgugagcgacaucgacaucaccuuccugaagaaggacgcccccuacaucgugggcgacgucgugcaggagggcgugcugaccgccgucgugauccccacgaagaagagcgggggcaccaccgagaugcucgcgaaggcccugcgcaaggugccgaccgacaacuacaucacgaccuaccccgggcagggccugaacggguacaccgucgaggaggccaagaccgugcucaagaagugcaaguccgccuucuacauccugcccagcaucaucuccaacgagaagcaggagauccugggcaccgugagcuggaaccugcgggagaugcucgcgcacgccgaggagacgcgcaagcugaugcccgucugcguggagaccaaggccaucguguccaccauccagcggaaguacaagggcaucaagauccaggagggggucguggacuacggcgcccgcuucuacuucuacaccagcaagacgaccguggccucccugaucaacacccucaacgaccugaacgagacccuggucacgaugccgcucggguacgugacccacggccugaaccuggaggaggcggcccgguacaugcgcagccucaaggugcccgccaccgucuccgugagcucccccgacgccgugaccgccuacaacggguaccugacgagcuccagcaagacccccgaggagcacuucaucgagaccaucucccuggcgggcagcuacaaggacuggagcuacuccggccagagcacccagcucgggaucgaguuccugaagcggggcgacaaguccgucuacuacacgagcaacccgaccaccuuccaccuggacggggaggugaucaccuucgacaaccucaagacgcugcugucccuccgcgaggugcggaccaucaaggucuucaccaccguggacaacaucaaccugcacacccagguggucgacaugagcaugaccuacggccagcaguucggccccaccuaccuggacggggccgacgugaccaagaucaagccccacaacucccacgagggcaagacguucuacgugcucccgaacgacgacacccugcgcgucgaggccuucgaguacuaccacaccaccgaccccagcuuccuggggcgguacauguccgcccucaaccacacgaagaaguggaaguacccccaggugaacggccugaccagcaucaagugggccgacaacaacugcuaccuggcgaccgcccuccugacccugcagcagaucgagcucaaguucaacccgcccgcccugcaggacgccuacuaccgcgcgcgggccggggaggccgccaacuucugcgcccugauccucgcguacugcaacaagacggugggcgagcugggcgacguccgcgagaccauguccuaccuguuccagcacgccaaccucgacagcugcaagcgggugcugaacgucgugugcaagaccugcgggcagcagcagaccacccugaagggcguggaggccgucauguacauggggacgcucuccuacgagcaguucaagaagggcgugcagauccccugcacgugcgggaagcaggccaccaaguaccuggugcagcaggagagccccuucgucaugauguccgcgcccccggcccaguacgagcugaagcacggcaccuucacgugcgccagcgaguacaccggcaacuaccagugcgggcacuacaagcacaucaccuccaaggagacccucuacugcaucgacggcgcccugcugaccaagagcagcgaguacaaggggcccaucaccgacguguucuacaaggagaacuccuacaccaccacgaucaagcccgugaccuacaagcucgacggcgucgugugcaccgagaucgaccccaagcuggacaacuacuacaagaaggacaacagcuacuucaccgagcagccgaucgaccuggugcccaaccagcccuaccccaacgccuccuucgacaacuucaaguucgucugcgacaacaucaaguucgccgacgaccucaaccagcugacgggguacaagaagccggcgagccgcgagcugaaggugaccuucuuccccgaccucaacggcgacguggucgccaucgacuacaagcacuacacccccuccuucaagaagggcgccaagcugcugcacaagcccaucguguggcacgugaacaacgccaccaacaaggcgacguacaagccgaacaccuggugcauccggugccucuggagcaccaagcccgucgagaccuccaacagcuucgacgugcugaaguccgaggacgcccaggggauggacaaccuggccugcgaggaccucaagcuggugagcgaggaggucguggagaaccccacgauccagaaggacgugcuggagugcaacgucaagaccaccgagguggugggcgacaucauccugaagccggccaacaacucccucaagaucaccgaggaggucgggcacacggaccugauggccgcguacguggacaacagcucccugaccaucaagaagcccaacgagcucagccgcgugcugggccugaagacccucgccacccacgggcuggccgccgucaacuccgugcccugggacacgaucgccaacuacgcgaagccguuccugaacaagguggucagcaccaccaccaacaucgugacgcgcugccucaaccgggugugcaccaacuacaugcccuacuucuucacccugcugcuccagcugugcaccuucacgcgcuccaccaacagccggaucaaggccuccaugcccaccaccaucgccaagaacaccgucaagagcgugggcaaguucugccuggaggccagcuucaacuaccucaagucccccaacuucagcaagcugaucaacaucaucaucugguuccugcuccuguccgugugccugggcagccucaucuacuccacggccgcgcuggggguccugaugagcaaccucggcaugccguccuacugcaccggguaccgcgagggcuaccugaacagcaccaacgugaccaucgccacguacugcaccggcuccaucagcugcagcgugugccuguccgggcucgacagccuggacaccuaccccucccuggagaccauccagaucacgaucagcuccuucaagugggaccucaccgccuucggccuggucgccgagugguuccuggccuacauccucuucacccgguucuucuacgugcuggggcuggcggccaucaugcagcuguucuucagcuacuucgccgugcacuucaucuccaacagcuggcucauguggcugaucaucaaccugguccagauggcccccaucuccgcgauggugcgcauguacaucuucuucgccagcuucuacuacguguggaaguccuacguccacgugguggacggcugcaacagcagcacgugcaugaugugcuacaagcggaaccgcgccacgcgggucgagugcaccaccaucgugaacgggguccgccgguccuucuacguguacgccaacggcggcaagggguucugcaagcuccacaacuggaacugcgugaacugcgacaccuucugcgccggcagcacguucaucuccgacgaggucgcgcgcgaccugagccugcaguucaagcggccgaucaaccccaccgaccaguccagcuacaucguggacuccgugaccgucaagaacgggagcauccaccucuacuucgacaaggccggccagaagaccuacgagcgccacucccugagccacuucgugaaccuggacaaccuccgggccaacaacacgaaggggucccugcccaucaacgugaucgucuucgacggcaagagcaagugcgaggaguccagcgccaaguccgccagcguguacuacucccagcugaugugccagcccauccuccugcuggaccaggcgcucgugagcgacgucggcgacagcgccgagguggccgugaagauguucgacgccuacgucaacaccuucuccagcaccuucaacgugccgauggagaagcugaagacccugguggccacggcggaggccgagcucgccaagaacgucucccuggacaacgugcugagcaccuucaucuccgccgcgcgccagggguucguggacagcgacgucgagaccaaggacgugguggagugccucaagcugucccaccagagcgacaucgaggucaccggcgacuccugcaacaacuacaugcugacguacaacaagguggagaacaugacgccccgggaccucggggccugcaucgacugcagcgcccgccacaucaacgcccagguggccaagucccacaacaucgcgcugaucuggaacgucaaggacuucaugagccuguccgagcagcuccggaagcagauccgcagcgccgccaagaagaacaaccugcccuucaagcugaccugcgccaccacccgccagguggugaacgucgugaccaccaagaucgcccucaagggcggguga

SEQ ID NO: 28073 - RNA, 5841 nt, Artificial Sequence
  SARS-CoV-2/Wuhan-Hu-1__NC_045512.2/MN908947.2__non-structural protein 3 (NSP3) CDS gc (1-1946)(K838N)
auggcccccaccaaggugaccuucggcgacgacaccgucaucgaggugcagggguacaagagcgugaacaucaccuucgagcuggacgagcgcaucgacaagguccucaacgagaagugcuccgccuacaccguggagcugggcaccgaggugaacgaguucgcgugcgucguggccgacgccgugaucaagacgcugcagccggucagcgagcuccugacgccccuggggaucgaccucgacgagugguccauggccaccuacuaccuguucgacgagagcggcgaguucaagcuggccucccacauguacugcagcuucuacccgcccgacgaggacgaggaggagggggacugcgaggaggaggaguucgagcccuccacccaguacgaguacggcacggaggacgacuaccagggcaagccccucgaguucggggcgaccagcgccgcccugcagcccgaggaggagcaggaggaggacuggcuggacgacgacucccagcagaccgugggccagcaggacgggagcgaggacaaccagaccacgaccauccagaccaucguggagguccagccccagcucgagauggagcugaccccgguggugcagacgaucgaggucaacuccuucagcggcuaccugaagcucaccgacaacguguacaucaagaacgccgacaucguggaggaggcgaagaaggucaagcccaccgugguggucaacgccgccaacguguaccugaagcacgggggcggcguggccggggcccugaacaaggcgaccaacaacgccaugcaggucgaguccgacgacuacaucgccacgaacggcccccucaaggucgggggcagcugcgugcuguccggccacaaccuggccaagcacugccuccacgugguggggcccaacgucaacaagggcgaggacauccagcugcucaagagcgccuacgagaacuucaaccagcacgaggugcugcuggcgccgcugcucuccgccgggaucuucggcgccgaccccauccacagccugcgggugugcgucgacaccgugcgcaccaacguguaccuggccgucuucgacaagaaccucuacgacaagcugguguccagcuuccuggagaugaaguccgagaagcaggucgagcagaagaucgccgagauccccaaggaggaggugaagcccuucaucaccgagagcaagccgagcguggagcagcggaagcaggacgacaagaagaucaaggcgugcguggaggaggucacgaccacccucgaggagaccaaguuccugacggagaaccugcuccuguacaucgacaucaacgggaaccugcaccccgacuccgccacccucgugagcgacaucgacaucaccuuccugaagaaggacgcccccuacaucgugggcgacgucgugcaggagggcgugcugaccgccgucgugauccccacgaagaaggccgggggcaccaccgagaugcucgcgaaggcccugcgcaaggugccgaccgacaacuacaucacgaccuaccccgggcagggccugaacggguacaccgucgaggaggccaagaccgugcucaagaagugcaaguccgccuucuacauccugcccagcaucaucuccaacgagaagcaggagauccugggcaccgugagcuggaaccugcgggagaugcucgcgcacgccgaggagacgcgcaagcugaugcccgucugcguggagaccaaggccaucguguccaccauccagcggaaguacaagggcaucaagauccaggagggggucguggacuacggcgcccgcuucuacuucuacaccagcaagacgaccguggccucccugaucaacacccucaacgaccugaacgagacccuggucacgaugccgcucggguacgugacccacggccugaaccuggaggaggcggcccgguacaugcgcagccucaaggugcccgccaccgucuccgugagcucccccgacgccgugaccgccuacaacggguaccugacgagcuccagcaagacccccgaggagcacuucaucgagaccaucucccuggcgggcagcuacaaggacuggagcuacuccggccagagcacccagcucgggaucgaguuccugaagcggggcgacaaguccgucuacuacacgagcaacccgaccaccuuccaccuggacggggaggugaucaccuucgacaaccucaagacgcugcugucccuccgcgaggugcggaccaucaaggucuucaccaccguggacaacaucaaccugcacacccagguggucgacaugagcaugaccuacggccagcaguucggccccaccuaccuggacggggccgacgugaccaagaucaagccccacaacucccacgagggcaagacguucuacgugcucccgaacgacgacacccugcgcgucgaggccuucgaguacuaccacaccaccgaccccagcuuccuggggcgguacauguccgcccucaaccacacgaagaacuggaaguacccccaggugaacggccugaccagcaucaagugggccgacaacaacugcuaccuggcgaccgcccuccugacccugcagcagaucgagcucaaguucaacccgcccgcccugcaggacgccuacuaccgcgcgcgggccggggaggccgccaacuucugcgcccugauccucgcguacugcaacaagacggugggcgagcugggcgacguccgcgagaccauguccuaccuguuccagcacgccaaccucgacagcugcaagcgggugcugaacgucgugugcaagaccugcgggcagcagcagaccacccugaagggcguggaggccgucauguacauggggacgcucuccuacgagcaguucaagaagggcgugcagauccccugcacgugcgggaagcaggccaccaaguaccuggugcagcaggagagccccuucgucaugauguccgcgcccccggcccaguacgagcugaagcacggcaccuucacgugcgccagcgaguacaccggcaacuaccagugcgggcacuacaagcacaucaccuccaaggagacccucuacugcaucgacggcgcccugcugaccaagagcagcgaguacaaggggcccaucaccgacguguucuacaaggagaacuccuacaccaccacgaucaagcccgugaccuacaagcucgacggcgucgugugcaccgagaucgaccccaagcuggacaacuacuacaagaaggacaacagcuacuucaccgagcagccgaucgaccuggugcccaaccagcccuaccccaacgccuccuucgacaacuucaaguucgucugcgacaacaucaaguucgccgacgaccucaaccagcugacgggguacaagaagccggcgagccgcgagcugaaggugaccuucuuccccgaccucaacggcgacguggucgccaucgacuacaagcacuacacccccuccuucaagaagggcgccaagcugcugcacaagcccaucguguggcacgugaacaacgccaccaacaaggcgacguacaagccgaacaccuggugcauccggugccucuggagcaccaagcccgucgagaccuccaacagcuucgacgugcugaaguccgaggacgcccaggggauggacaaccuggccugcgaggaccucaagcccgugagcgaggaggucguggagaaccccacgauccagaaggacgugcuggagugcaacgucaagaccaccgagguggugggcgacaucauccugaagccggccaacaacucccucaagaucaccgaggaggucgggcacacggaccugauggccgcguacguggacaacagcucccugaccaucaagaagcccaacgagcucagccgcgugcugggccugaagacccucgccacccacgggcuggccgccgucaacuccgugcccugggacacgaucgccaacuacgcgaagccguuccugaacaagguggucagcaccaccaccaacaucgugacgcgcugccucaaccgggugugcaccaacuacaugcccuacuucuucacccugcugcuccagcugugcaccuucacgcgcuccaccaacagccggaucaaggccuccaugcccaccaccaucgccaagaacaccgucaagagcgugggcaaguucugccuggaggccagcuucaacuaccucaagucccccaacuucagcaagcugaucaacaucaucaucugguuccugcuccuguccgugugccugggcagccucaucuacuccacggccgcgcuggggguccugaugagcaaccucggcaugccguccuacugcaccggguaccgcgagggcuaccugaacagcaccaacgugaccaucgccacguacugcaccggcuccauccccugcagcgugugccuguccgggcucgacagccuggacaccuaccccucccuggagaccauccagaucacgaucagcuccuucaagugggaccucaccgccuucggccuggucgccgagugguuccuggccuacauccucuucacccgguucuucuacgugcuggggcuggcggccaucaugcagcuguucuucagcuacuucgccgugcacuucaucuccaacagcuggcucauguggcugaucaucaaccugguccagauggcccccaucuccgcgauggugcgcauguacaucuucuucgccagcuucuacuacguguggaaguccuacguccacgugguggacggcugcaacagcagcacgugcaugaugugcuacaagcggaaccgcgccacgcgggucgagugcaccaccaucgugaacgggguccgccgguccuucuacguguacgccaacggcggcaagggguucugcaagcuccacaacuggaacugcgugaacugcgacaccuucugcgccggcagcacguucaucuccgacgaggucgcgcgcgaccugagccugcaguucaagcggccgaucaaccccaccgaccaguccagcuacaucguggacuccgugaccgucaagaacgggagcauccaccucuacuucgacaaggccggccagaagaccuacgagcgccacucccugagccacuucgugaaccuggacaaccuccgggccaacaacacgaaggggucccugcccaucaacgugaucgucuucgacggcaagagcaagugcgaggaguccagcgccaaguccgccagcguguacuacucccagcugaugugccagcccauccuccugcuggaccaggcgcucgugagcgacgucggcgacagcgccgagguggccgugaagauguucgacgccuacgucaacaccuucuccagcaccuucaacgugccgauggagaagcugaagacccugguggccacggcggaggccgagcucgccaagaacgucucccuggacaacgugcugagcaccuucaucuccgccgcgcgccagggguucguggacagcgacgucgagaccaaggacgugguggagugccucaagcugucccaccagagcgacaucgaggucaccggcgacuccugcaacaacuacaugcugacguacaacaagguggagaacaugacgccccgggaccucggggccugcaucgacugcagcgcccgccacaucaacgcccagguggccaagucccacaacaucgcgcugaucuggaacgucaaggacuucaugagccuguccgagcagcuccggaagcagauccgcagcgccgccaagaagaacaaccugcccuucaagcugaccugcgccaccacccgccagguggugaacgucgugaccaccaagaucgcccucaagggcggguga

SEQ ID NO: 28074 - RNA, 5841 nt, Artificial Sequence
  SARS-CoV-2/Wuhan-Hu-1__NC_045512.2/MN908947.2__non-structural protein 3 (NSP3) CDS gc (1-1946)(K838N_P1229L_N1779S)
auggcccccaccaaggugaccuucggcgacgacaccgucaucgaggugcagggguacaagagcgugaacaucaccuucgagcuggacgagcgcaucgacaagguccucaacgagaagugcuccgccuacaccguggagcugggcaccgaggugaacgaguucgcgugcgucguggccgacgccgugaucaagacgcugcagccggucagcgagcuccugacgccccuggggaucgaccucgacgagugguccauggccaccuacuaccuguucgacgagagcggcgaguucaagcuggccucccacauguacugcagcuucuacccgcccgacgaggacgaggaggagggggacugcgaggaggaggaguucgagcccuccacccaguacgaguacggcacggaggacgacuaccagggcaagccccucgaguucggggcgaccagcgccgcccugcagcccgaggaggagcaggaggaggacuggcuggacgacgacucccagcagaccgugggccagcaggacgggagcgaggacaaccagaccacgaccauccagaccaucguggagguccagccccagcucgagauggagcugaccccgguggugcagacgaucgaggucaacuccuucagcggcuaccugaagcucaccgacaacguguacaucaagaacgccgacaucguggaggaggcgaagaaggucaagcccaccgugguggucaacgccgccaacguguaccugaagcacgggggcggcguggccggggcccugaacaaggcgaccaacaacgccaugcaggucgaguccgacgacuacaucgccacgaacggcccccucaaggucgggggcagcugcgugcuguccggccacaaccuggccaagcacugccuccacgugguggggcccaacgucaacaagggcgaggacauccagcugcucaagagcgccuacgagaacuucaaccagcacgaggugcugcuggcgccgcugcucuccgccgggaucuucggcgccgaccccauccacagccugcgggugugcgucgacaccgugcgcaccaacguguaccuggccgucuucgacaagaaccucuacgacaagcugguguccagcuuccuggagaugaaguccgagaagcaggucgagcagaagaucgccgagauccccaaggaggaggugaagcccuucaucaccgagagcaagccgagcguggagcagcggaagcaggacgacaagaagaucaaggcgugcguggaggaggucacgaccacccucgaggagaccaaguuccugacggagaaccugcuccuguacaucgacaucaacgggaaccugcaccccgacuccgccacccucgugagcgacaucgacaucaccuuccugaagaaggacgcccccuacaucgugggcgacgucgugcaggagggcgugcugaccgccgucgugauccccacgaagaaggccgggggcaccaccgagaugcucgcgaaggcccugcgcaaggugccgaccgacaacuacaucacgaccuaccccgggcagggccugaacggguacaccgucgaggaggccaagaccgugcucaagaagugcaaguccgccuucuacauccugcccagcaucaucuccaacgagaagcaggagauccugggcaccgugagcuggaaccugcgggagaugcucgcgcacgccgaggagacgcgcaagcugaugcccgucugcguggagaccaaggccaucguguccaccauccagcggaaguacaagggcaucaagauccaggagggggucguggacuacggcgcccgcuucuacuucuacaccagcaagacgaccguggccucccugaucaacacccucaacgaccugaacgagacccuggucacgaugccgcucggguacgugacccacggccugaaccuggaggaggcggcccgguacaugcgcagccucaaggugcccgccaccgucuccgugagcucccccgacgccgugaccgccuacaacggguaccugacgagcuccagcaagacccccgaggagcacuucaucgagaccaucucccuggcgggcagcuacaaggacuggagcuacuccggccagagcacccagcucgggaucgaguuccugaagcggggcgacaaguccgucuacuacacgagcaacccgaccaccuuccaccuggacggggaggugaucaccuucgacaaccucaagacgcugcugucccuccgcgaggugcggaccaucaaggucuucaccaccguggacaacaucaaccugcacacccagguggucgacaugagcaugaccuacggccagcaguucggccccaccuaccuggacggggccgacgugaccaagaucaagccccacaacucccacgagggcaagacguucuacgugcucccgaacgacgacacccugcgcgucgaggccuucgaguacuaccacaccaccgaccccagcuuccuggggcgguacauguccgcccucaaccacacgaagaacuggaaguacccccaggugaacggccugaccagcaucaagugggccgacaacaacugcuaccuggcgaccgcccuccugacccugcagcagaucgagcucaaguucaacccgcccgcccugcaggacgccuacuaccgcgcgcgggccggggaggccgccaacuucugcgcccugauccucgcguacugcaacaagacggugggcgagcugggcgacguccgcgagaccauguccuaccuguuccagcacgccaaccucgacagcugcaagcgggugcugaacgucgugugcaagaccugcgggcagcagcagaccacccugaagggcguggaggccgucauguacauggggacgcucuccuacgagcaguucaagaagggcgugcagauccccugcacgugcgggaagcaggccaccaaguaccuggugcagcaggagagccccuucgucaugauguccgcgcccccggcccaguacgagcugaagcacggcaccuucacgugcgccagcgaguacaccggcaacuaccagugcgggcacuacaagcacaucaccuccaaggagacccucuacugcaucgacggcgcccugcugaccaagagcagcgaguacaaggggcccaucaccgacguguucuacaaggagaacuccuacaccaccacgaucaagcccgugaccuacaagcucgacggcgucgugugcaccgagaucgaccccaagcuggacaacuacuacaagaaggacaacagcuacuucaccgagcagccgaucgaccuggugcccaaccagcccuaccccaacgccuccuucgacaacuucaaguucgucugcgacaacaucaaguucgccgacgaccucaaccagcugacgggguacaagaagccggcgagccgcgagcugaaggugaccuucuuccccgaccucaacggcgacguggucgccaucgacuacaagcacuacacccccuccuucaagaagggcgccaagcugcugcacaagcccaucguguggcacgugaacaacgccaccaacaaggcgacguacaagccgaacaccuggugcauccggugccucuggagcaccaagcccgucgagaccuccaacagcuucgacgugcugaaguccgaggacgcccaggggauggacaaccuggccugcgaggaccucaagcuggugagcgaggaggucguggagaaccccacgauccagaaggacgugcuggagugcaacgucaagaccaccgagguggugggcgacaucauccugaagccggccaacaacucccucaagaucaccgaggaggucgggcacacggaccugauggccgcguacguggacaacagcucccugaccaucaagaagcccaacgagcucagccgcgugcugggccugaagacccucgccacccacgggcuggccgccgucaacuccgugcccugggacacgaucgccaacuacgcgaagccguuccugaacaagguggucagcaccaccaccaacaucgugacgcgcugccucaaccgggugugcaccaacuacaugcccuacuucuucacccugcugcuccagcugugcaccuucacgcgcuccaccaacagccggaucaaggccuccaugcccaccaccaucgccaagaacaccgucaagagcgugggcaaguucugccuggaggccagcuucaacuaccucaagucccccaacuucagcaagcugaucaacaucaucaucugguuccugcuccuguccgugugccugggcagccucaucuacuccacggccgcgcuggggguccugaugagcaaccucggcaugccguccuacugcaccggguaccgcgagggcuaccugaacagcaccaacgugaccaucgccacguacugcaccggcuccauccccugcagcgugugccuguccgggcucgacagccuggacaccuaccccucccuggagaccauccagaucacgaucagcuccuucaagugggaccucaccgccuucggccuggucgccgagugguuccuggccuacauccucuucacccgguucuucuacgugcuggggcuggcggccaucaugcagcuguucuucagcuacuucgccgugcacuucaucuccaacagcuggcucauguggcugaucaucaaccugguccagauggcccccaucuccgcgauggugcgcauguacaucuucuucgccagcuucuacuacguguggaaguccuacguccacgugguggacggcugcaacagcagcacgugcaugaugugcuacaagcggaaccgcgccacgcgggucgagugcaccaccaucgugaacgggguccgccgguccuucuacguguacgccaacggcggcaagggguucugcaagcuccacaacuggaacugcgugaacugcgacaccuucugcgccggcagcacguucaucuccgacgaggucgcgcgcgaccugagccugcaguucaagcggccgaucaaccccaccgaccaguccagcuacaucguggacuccgugaccgucaagaacgggagcauccaccucuacuucgacaaggccggccagaagaccuacgagcgccacucccugagccacuucgugaaccuggacaaccuccgggccaacaacacgaaggggucccugcccaucaacgugaucgucuucgacggcaagagcaagugcgaggaguccagcgccaaguccgccagcguguacuacucccagcugaugugccagcccauccuccugcuggaccaggcgcucgugagcgacgucggcgacagcgccgagguggccgugaagauguucgacgccuacgucagcaccuucuccagcaccuucaacgugccgauggagaagcugaagacccugguggccacggcggaggccgagcucgccaagaacgucucccuggacaacgugcugagcaccuucaucuccgccgcgcgccagggguucguggacagcgacgucgagaccaaggacgugguggagugccucaagcugucccaccagagcgacaucgaggucaccggcgacuccugcaacaacuacaugcugacguacaacaagguggagaacaugacgccccgggaccucggggccugcaucgacugcagcgcccgccacaucaacgcccagguggccaagucccacaacaucgcgcugaucuggaacgucaaggacuucaugagccuguccgagcagcuccggaagcagauccgcagcgccgccaagaagaacaaccugcccuucaagcugaccugcgccaccacccgccagguggugaacgucgugaccaccaagaucgcccucaagggcggguga

SEQ ID NO: 28075 - RNA, 5841 nt, Artificial Sequence
  SARS-CoV-2/Wuhan-Hu-1__NC_045512.2/MN908947.2__non-structural protein 3 (NSP3) CDS gc (1-1946)(K838N_N1779S)
auggcccccaccaaggugaccuucggcgacgacaccgucaucgaggugcagggguacaagagcgugaacaucaccuucgagcuggacgagcgcaucgacaagguccucaacgagaagugcuccgccuacaccguggagcugggcaccgaggugaacgaguucgcgugcgucguggccgacgccgugaucaagacgcugcagccggucagcgagcuccugacgccccuggggaucgaccucgacgagugguccauggccaccuacuaccuguucgacgagagcggcgaguucaagcuggccucccacauguacugcagcuucuacccgcccgacgaggacgaggaggagggggacugcgaggaggaggaguucgagcccuccacccaguacgaguacggcacggaggacgacuaccagggcaagccccucgaguucggggcgaccagcgccgcccugcagcccgaggaggagcaggaggaggacuggcuggacgacgacucccagcagaccgugggccagcaggacgggagcgaggacaaccagaccacgaccauccagaccaucguggagguccagccccagcucgagauggagcugaccccgguggugcagacgaucgaggucaacuccuucagcggcuaccugaagcucaccgacaacguguacaucaagaacgccgacaucguggaggaggcgaagaaggucaagcccaccgugguggucaacgccgccaacguguaccugaagcacgggggcggcguggccggggcccugaacaaggcgaccaacaacgccaugcaggucgaguccgacgacuacaucgccacgaacggcccccucaaggucgggggcagcugcgugcuguccggccacaaccuggccaagcacugccuccacgugguggggcccaacgucaacaagggcgaggacauccagcugcucaagagcgccuacgagaacuucaaccagcacgaggugcugcuggcgccgcugcucuccgccgggaucuucggcgccgaccccauccacagccugcgggugugcgucgacaccgugcgcaccaacguguaccuggccgucuucgacaagaaccucuacgacaagcugguguccagcuuccuggagaugaaguccgagaagcaggucgagcagaagaucgccgagauccccaaggaggaggugaagcccuucaucaccgagagcaagccgagcguggagcagcggaagcaggacgacaagaagaucaaggcgugcguggaggaggucacgaccacccucgaggagaccaaguuccugacggagaaccugcuccuguacaucgacaucaacgggaaccugcaccccgacuccgccacccucgugagcgacaucgacaucaccuuccugaagaaggacgcccccuacaucgugggcgacgucgugcaggagggcgugcugaccgccgucgugauccccacgaagaaggccgggggcaccaccgagaugcucgcgaaggcccugcgcaaggugccgaccgacaacuacaucacgaccuaccccgggcagggccugaacggguacaccgucgaggaggccaagaccgugcucaagaagugcaaguccgccuucuacauccugcccagcaucaucuccaacgagaagcaggagauccugggcaccgugagcuggaaccugcgggagaugcucgcgcacgccgaggagacgcgcaagcugaugcccgucugcguggagaccaaggccaucguguccaccauccagcggaaguacaagggcaucaagauccaggagggggucguggacuacggcgcccgcuucuacuucuacaccagcaagacgaccguggccucccugaucaacacccucaacgaccugaacgagacccuggucacgaugccgcucggguacgugacccacggccugaaccuggaggaggcggcccgguacaugcgcagccucaaggugcccgccaccgucuccgugagcucccccgacgccgugaccgccuacaacggguaccugacgagcuccagcaagacccccgaggagcacuucaucgagaccaucucccuggcgggcagcuacaaggacuggagcuacuccggccagagcacccagcucgggaucgaguuccugaagcggggcgacaaguccgucuacuacacgagcaacccgaccaccuuccaccuggacggggaggugaucaccuucgacaaccucaagacgcugcugucccuccgcgaggugcggaccaucaaggucuucaccaccguggacaacaucaaccugcacacccagguggucgacaugagcaugaccuacggccagcaguucggccccaccuaccuggacggggccgacgugaccaagaucaagccccacaacucccacgagggcaagacguucuacgugcucccgaacgacgacacccugcgcgucgaggccuucgaguacuaccacaccaccgaccccagcuuccuggggcgguacauguccgcccucaaccacacgaagaacuggaaguacccccaggugaacggccugaccagcaucaagugggccgacaacaacugcuaccuggcgaccgcccuccugacccugcagcagaucgagcucaaguucaacccgcccgcccugcaggacgccuacuaccgcgcgcgggccggggaggccgccaacuucugcgcccugauccucgcguacugcaacaagacggugggcgagcugggcgacguccgcgagaccauguccuaccuguuccagcacgccaaccucgacagcugcaagcgggugcugaacgucgugugcaagaccugcgggcagcagcagaccacccugaagggcguggaggccgucauguacauggggacgcucuccuacgagcaguucaagaagggcgugcagauccccugcacgugcgggaagcaggccaccaaguaccuggugcagcaggagagccccuucgucaugauguccgcgcccccggcccaguacgagcugaagcacggcaccuucacgugcgccagcgaguacaccggcaacuaccagugcgggcacuacaagcacaucaccuccaaggagacccucuacugcaucgacggcgcccugcugaccaagagcagcgaguacaaggggcccaucaccgacguguucuacaaggagaacuccuacaccaccacgaucaagcccgugaccuacaagcucgacggcgucgugugcaccgagaucgaccccaagcuggacaacuacuacaagaaggacaacagcuacuucaccgagcagccgaucgaccuggugcccaaccagcccuaccccaacgccuccuucgacaacuucaaguucgucugcgacaacaucaaguucgccgacgaccucaaccagcugacgggguacaagaagccggcgagccgcgagcugaaggugaccuucuuccccgaccucaacggcgacguggucgccaucgacuacaagcacuacacccccuccuucaagaagggcgccaagcugcugcacaagcccaucguguggcacgugaacaacgccaccaacaaggcgacguacaagccgaacaccuggugcauccggugccucuggagcaccaagcccgucgagaccuccaacagcuucgacgugcugaaguccgaggacgcccaggggauggacaaccuggccugcgaggaccucaagcccgugagcgaggaggucguggagaaccccacgauccagaaggacgugcuggagugcaacgucaagaccaccgagguggugggcgacaucauccugaagccggccaacaacucccucaagaucaccgaggaggucgggcacacggaccugauggccgcguacguggacaacagcucccugaccaucaagaagcccaacgagcucagccgcgugcugggccugaagacccucgccacccacgggcuggccgccgucaacuccgugcccugggacacgaucgccaacuacgcgaagccguuccugaacaagguggucagcaccaccaccaacaucgugacgcgcugccucaaccgggugugcaccaacuacaugcccuacuucuucacccugcugcuccagcugugcaccuucacgcgcuccaccaacagccggaucaaggccuccaugcccaccaccaucgccaagaacaccgucaagagcgugggcaaguucugccuggaggccagcuucaacuaccucaagucccccaacuucagcaagcugaucaacaucaucaucugguuccugcuccuguccgugugccugggcagccucaucuacuccacggccgcgcuggggguccugaugagcaaccucggcaugccguccuacugcaccggguaccgcgagggcuaccugaacagcaccaacgugaccaucgccacguacugcaccggcuccauccccugcagcgugugccuguccgggcucgacagccuggacaccuaccccucccuggagaccauccagaucacgaucagcuccuucaagugggaccucaccgccuucggccuggucgccgagugguuccuggccuacauccucuucacccgguucuucuacgugcuggggcuggcggccaucaugcagcuguucuucagcuacuucgccgugcacuucaucuccaacagcuggcucauguggcugaucaucaaccugguccagauggcccccaucuccgcgauggugcgcauguacaucuucuucgccagcuucuacuacguguggaaguccuacguccacgugguggacggcugcaacagcagcacgugcaugaugugcuacaagcggaaccgcgccacgcgggucgagugcaccaccaucgugaacgggguccgccgguccuucuacguguacgccaacggcggcaagggguucugcaagcuccacaacuggaacugcgugaacugcgacaccuucugcgccggcagcacguucaucuccgacgaggucgcgcgcgaccugagccugcaguucaagcggccgaucaaccccaccgaccaguccagcuacaucguggacuccgugaccgucaagaacgggagcauccaccucuacuucgacaaggccggccagaagaccuacgagcgccacucccugagccacuucgugaaccuggacaaccuccgggccaacaacacgaaggggucccugcccaucaacgugaucgucuucgacggcaagagcaagugcgaggaguccagcgccaaguccgccagcguguacuacucccagcugaugugccagcccauccuccugcuggaccaggcgcucgugagcgacgucggcgacagcgccgagguggccgugaagauguucgacgccuacgucagcaccuucuccagcaccuucaacgugccgauggagaagcugaagacccugguggccacggcggaggccgagcucgccaagaacgucucccuggacaacgugcugagcaccuucaucuccgccgcgcgccagggguucguggacagcgacgucgagaccaaggacgugguggagugccucaagcugucccaccagagcgacaucgaggucaccggcgacuccugcaacaacuacaugcugacguacaacaagguggagaacaugacgccccgggaccucggggccugcaucgacugcagcgcccgccacaucaacgcccagguggccaagucccacaacaucgcgcugaucuggaacgucaaggacuucaugagccuguccgagcagcuccggaagcagauccgcagcgccgccaagaagaacaaccugcccuucaagcugaccugcgccaccacccgccagguggugaacgucgugaccaccaagaucgcccucaagggcggguga

SEQ ID NO: 28076 - RNA, 5841 nt, Artificial Sequence
  SARS-CoV-2/Wuhan-Hu-1__NC_045512.2/MN908947.2__non-structural protein 3 (NSP3) CDS gc (1-1946)(A489S_P1229L_P1470S_A1712V)
auggcccccaccaaggugaccuucggcgacgacaccgucaucgaggugcagggguacaagagcgugaacaucaccuucgagcuggacgagcgcaucgacaagguccucaacgagaagugcuccgccuacaccguggagcugggcaccgaggugaacgaguucgcgugcgucguggccgacgccgugaucaagacgcugcagccggucagcgagcuccugacgccccuggggaucgaccucgacgagugguccauggccaccuacuaccuguucgacgagagcggcgaguucaagcuggccucccacauguacugcagcuucuacccgcccgacgaggacgaggaggagggggacugcgaggaggaggaguucgagcccuccacccaguacgaguacggcacggaggacgacuaccagggcaagccccucgaguucggggcgaccagcgccgcccugcagcccgaggaggagcaggaggaggacuggcuggacgacgacucccagcagaccgugggccagcaggacgggagcgaggacaaccagaccacgaccauccagaccaucguggagguccagccccagcucgagauggagcugaccccgguggugcagacgaucgaggucaacuccuucagcggcuaccugaagcucaccgacaacguguacaucaagaacgccgacaucguggaggaggcgaagaaggucaagcccaccgugguggucaacgccgccaacguguaccugaagcacgggggcggcguggccggggcccugaacaaggcgaccaacaacgccaugcaggucgaguccgacgacuacaucgccacgaacggcccccucaaggucgggggcagcugcgugcuguccggccacaaccuggccaagcacugccuccacgugguggggcccaacgucaacaagggcgaggacauccagcugcucaagagcgccuacgagaacuucaaccagcacgaggugcugcuggcgccgcugcucuccgccgggaucuucggcgccgaccccauccacagccugcgggugugcgucgacaccgugcgcaccaacguguaccuggccgucuucgacaagaaccucuacgacaagcugguguccagcuuccuggagaugaaguccgagaagcaggucgagcagaagaucgccgagauccccaaggaggaggugaagcccuucaucaccgagagcaagccgagcguggagcagcggaagcaggacgacaagaagaucaaggcgugcguggaggaggucacgaccacccucgaggagaccaaguuccugacggagaaccugcuccuguacaucgacaucaacgggaaccugcaccccgacuccgccacccucgugagcgacaucgacaucaccuuccugaagaaggacgcccccuacaucgugggcgacgucgugcaggagggcgugcugaccgccgucgugauccccacgaagaagagcgggggcaccaccgagaugcucgcgaaggcccugcgcaaggugccgaccgacaacuacaucacgaccuaccccgggcagggccugaacggguacaccgucgaggaggccaagaccgugcucaagaagugcaaguccgccuucuacauccugcccagcaucaucuccaacgagaagcaggagauccugggcaccgugagcuggaaccugcgggagaugcucgcgcacgccgaggagacgcgcaagcugaugcccgucugcguggagaccaaggccaucguguccaccauccagcggaaguacaagggcaucaagauccaggagggggucguggacuacggcgcccgcuucuacuucuacaccagcaagacgaccguggccucccugaucaacacccucaacgaccugaacgagacccuggucacgaugccgcucggguacgugacccacggccugaaccuggaggaggcggcccgguacaugcgcagccucaaggugcccgccaccgucuccgugagcucccccgacgccgugaccgccuacaacggguaccugacgagcuccagcaagacccccgaggagcacuucaucgagaccaucucccuggcgggcagcuacaaggacuggagcuacuccggccagagcacccagcucgggaucgaguuccugaagcggggcgacaaguccgucuacuacacgagcaacccgaccaccuuccaccuggacggggaggugaucaccuucgacaaccucaagacgcugcugucccuccgcgaggugcggaccaucaaggucuucaccaccguggacaacaucaaccugcacacccagguggucgacaugagcaugaccuacggccagcaguucggccccaccuaccuggacggggccgacgugaccaagaucaagccccacaacucccacgagggcaagacguucuacgugcucccgaacgacgacacccugcgcgucgaggccuucgaguacuaccacaccaccgaccccagcuuccuggggcgguacauguccgcccucaaccacacgaagaaguggaaguacccccaggugaacggccugaccagcaucaagugggccgacaacaacugcuaccuggcgaccgcccuccugacccugcagcagaucgagcucaaguucaacccgcccgcccugcaggacgccuacuaccgcgcgcgggccggggaggccgccaacuucugcgcccugauccucgcguacugcaacaagacggugggcgagcugggcgacguccgcgagaccauguccuaccuguuccagcacgccaaccucgacagcugcaagcgggugcugaacgucgugugcaagaccugcgggcagcagcagaccacccugaagggcguggaggccgucauguacauggggacgcucuccuacgagcaguucaagaagggcgugcagauccccugcacgugcgggaagcaggccaccaaguaccuggugcagcaggagagccccuucgucaugauguccgcgcccccggcccaguacgagcugaagcacggcaccuucacgugcgccagcgaguacaccggcaacuaccagugcgggcacuacaagcacaucaccuccaaggagacccucuacugcaucgacggcgcccugcugaccaagagcagcgaguacaaggggcccaucaccgacguguucuacaaggagaacuccuacaccaccacgaucaagcccgugaccuacaagcucgacggcgucgugugcaccgagaucgaccccaagcuggacaacuacuacaagaaggacaacagcuacuucaccgagcagccgaucgaccuggugcccaaccagcccuaccccaacgccuccuucgacaacuucaaguucgucugcgacaacaucaaguucgccgacgaccucaaccagcugacgggguacaagaagccggcgagccgcgagcugaaggugaccuucuuccccgaccucaacggcgacguggucgccaucgacuacaagcacuacacccccuccuucaagaagggcgccaagcugcugcacaagcccaucguguggcacgugaacaacgccaccaacaaggcgacguacaagccgaacaccuggugcauccggugccucuggagcaccaagcccgucgagaccuccaacagcuucgacgugcugaaguccgaggacgcccaggggauggacaaccuggccugcgaggaccucaagcuggugagcgaggaggucguggagaaccccacgauccagaaggacgugcuggagugcaacgucaagaccaccgagguggugggcgacaucauccugaagccggccaacaacucccucaagaucaccgaggaggucgggcacacggaccugauggccgcguacguggacaacagcucccugaccaucaagaagcccaacgagcucagccgcgugcugggccugaagacccucgccacccacgggcuggccgccgucaacuccgugcccugggacacgaucgccaacuacgcgaagccguuccugaacaagguggucagcaccaccaccaacaucgugacgcgcugccucaaccgggugugcaccaacuacaugcccuacuucuucacccugcugcuccagcugugcaccuucacgcgcuccaccaacagccggaucaaggccuccaugcccaccaccaucgccaagaacaccgucaagagcgugggcaaguucugccuggaggccagcuucaacuaccucaagucccccaacuucagcaagcugaucaacaucaucaucugguuccugcuccuguccgugugccugggcagccucaucuacuccacggccgcgcuggggguccugaugagcaaccucggcaugccguccuacugcaccggguaccgcgagggcuaccugaacagcaccaacgugaccaucgccacguacugcaccggcuccaucagcugcagcgugugccuguccgggcucgacagccuggacaccuaccccucccuggagaccauccagaucacgaucagcuccuucaagugggaccucaccgccuucggccuggucgccgagugguuccuggccuacauccucuucacccgguucuucuacgugcuggggcuggcggccaucaugcagcuguucuucagcuacuucgccgugcacuucaucuccaacagcuggcucauguggcugaucaucaaccugguccagauggcccccaucuccgcgauggugcgcauguacaucuucuucgccagcuucuacuacguguggaaguccuacguccacgugguggacggcugcaacagcagcacgugcaugaugugcuacaagcggaaccgcgccacgcgggucgagugcaccaccaucgugaacgggguccgccgguccuucuacguguacgccaacggcggcaagggguucugcaagcuccacaacuggaacugcgugaacugcgacaccuucugcgccggcagcacguucaucuccgacgaggucgcgcgcgaccugagccugcaguucaagcggccgaucaaccccaccgaccaguccagcuacaucguggacuccgugaccgucaagaacgggagcauccaccucuacuucgacaaggccggccagaagaccuacgagcgccacucccugagccacuucgugaaccuggacaaccuccgggugaacaacacgaaggggucccugcccaucaacgugaucgucuucgacggcaagagcaagugcgaggaguccagcgccaaguccgccagcguguacuacucccagcugaugugccagcccauccuccugcuggaccaggcgcucgugagcgacgucggcgacagcgccgagguggccgugaagauguucgacgccuacgucaacaccuucuccagcaccuucaacgugccgauggagaagcugaagacccugguggccacggcggaggccgagcucgccaagaacgucucccuggacaacgugcugagcaccuucaucuccgccgcgcgccagggguucguggacagcgacgucgagaccaaggacgugguggagugccucaagcugucccaccagagcgacaucgaggucaccggcgacuccugcaacaacuacaugcugacguacaacaagguggagaacaugacgccccgggaccucggggccugcaucgacugcagcgcccgccacaucaacgcccagguggccaagucccacaacaucgcgcugaucuggaacgucaaggacuucaugagccuguccgagcagcuccggaagcagauccgcagcgccgccaagaagaacaaccugcccuucaagcugaccugcgccaccacccgccagguggugaacgucgugaccaccaagaucgcccucaagggcggguga

SEQ ID NO: 28077 - RNA, 5841 nt, Artificial Sequence
  SARS-CoV-2/Wuhan-Hu-1__NC_045512.2/MN908947.2__non-structural protein 3 (NSP3) CDS gc (1-1946)(S795L_K838N)
auggcccccaccaaggugaccuucggcgacgacaccgucaucgaggugcagggguacaagagcgugaacaucaccuucgagcuggacgagcgcaucgacaagguccucaacgagaagugcuccgccuacaccguggagcugggcaccgaggugaacgaguucgcgugcgucguggccgacgccgugaucaagacgcugcagccggucagcgagcuccugacgccccuggggaucgaccucgacgagugguccauggccaccuacuaccuguucgacgagagcggcgaguucaagcuggccucccacauguacugcagcuucuacccgcccgacgaggacgaggaggagggggacugcgaggaggaggaguucgagcccuccacccaguacgaguacggcacggaggacgacuaccagggcaagccccucgaguucggggcgaccagcgccgcccugcagcccgaggaggagcaggaggaggacuggcuggacgacgacucccagcagaccgugggccagcaggacgggagcgaggacaaccagaccacgaccauccagaccaucguggagguccagccccagcucgagauggagcugaccccgguggugcagacgaucgaggucaacuccuucagcggcuaccugaagcucaccgacaacguguacaucaagaacgccgacaucguggaggaggcgaagaaggucaagcccaccgugguggucaacgccgccaacguguaccugaagcacgggggcggcguggccggggcccugaacaaggcgaccaacaacgccaugcaggucgaguccgacgacuacaucgccacgaacggcccccucaaggucgggggcagcugcgugcuguccggccacaaccuggccaagcacugccuccacgugguggggcccaacgucaacaagggcgaggacauccagcugcucaagagcgccuacgagaacuucaaccagcacgaggugcugcuggcgccgcugcucuccgccgggaucuucggcgccgaccccauccacagccugcgggugugcgucgacaccgugcgcaccaacguguaccuggccgucuucgacaagaaccucuacgacaagcugguguccagcuuccuggagaugaaguccgagaagcaggucgagcagaagaucgccgagauccccaaggaggaggugaagcccuucaucaccgagagcaagccgagcguggagcagcggaagcaggacgacaagaagaucaaggcgugcguggaggaggucacgaccacccucgaggagaccaaguuccugacggagaaccugcuccuguacaucgacaucaacgggaaccugcaccccgacuccgccacccucgugagcgacaucgacaucaccuuccugaagaaggacgcccccuacaucgugggcgacgucgugcaggagggcgugcugaccgccgucgugauccccacgaagaaggccgggggcaccaccgagaugcucgcgaaggcccugcgcaaggugccgaccgacaacuacaucacgaccuaccccgggcagggccugaacggguacaccgucgaggaggccaagaccgugcucaagaagugcaaguccgccuucuacauccugcccagcaucaucuccaacgagaagcaggagauccugggcaccgugagcuggaaccugcgggagaugcucgcgcacgccgaggagacgcgcaagcugaugcccgucugcguggagaccaaggccaucguguccaccauccagcggaaguacaagggcaucaagauccaggagggggucguggacuacggcgcccgcuucuacuucuacaccagcaagacgaccguggccucccugaucaacacccucaacgaccugaacgagacccuggucacgaugccgcucggguacgugacccacggccugaaccuggaggaggcggcccgguacaugcgcagccucaaggugcccgccaccgucuccgugagcucccccgacgccgugaccgccuacaacggguaccugacgagcuccagcaagacccccgaggagcacuucaucgagaccaucucccuggcgggcagcuacaaggacuggagcuacuccggccagagcacccagcucgggaucgaguuccugaagcggggcgacaaguccgucuacuacacgagcaacccgaccaccuuccaccuggacggggaggugaucaccuucgacaaccucaagacgcugcugucccuccgcgaggugcggaccaucaaggucuucaccaccguggacaacaucaaccugcacacccagguggucgacaugagcaugaccuacggccagcaguucggccccaccuaccuggacggggccgacgugaccaagaucaagccccacaaccugcacgagggcaagacguucuacgugcucccgaacgacgacacccugcgcgucgaggccuucgaguacuaccacaccaccgaccccagcuuccuggggcgguacauguccgcccucaaccacacgaagaacuggaaguacccccaggugaacggccugaccagcaucaagugggccgacaacaacugcuaccuggcgaccgcccuccugacccugcagcagaucgagcucaaguucaacccgcccgcccugcaggacgccuacuaccgcgcgcgggccggggaggccgccaacuucugcgcccugauccucgcguacugcaacaagacggugggcgagcugggcgacguccgcgagaccauguccuaccuguuccagcacgccaaccucgacagcugcaagcgggugcugaacgucgugugcaagaccugcgggcagcagcagaccacccugaagggcguggaggccgucauguacauggggacgcucuccuacgagcaguucaagaagggcgugcagauccccugcacgugcgggaagcaggccaccaaguaccuggugcagcaggagagccccuucgucaugauguccgcgcccccggcccaguacgagcugaagcacggcaccuucacgugcgccagcgaguacaccggcaacuaccagugcgggcacuacaagcacaucaccuccaaggagacccucuacugcaucgacggcgcccugcugaccaagagcagcgaguacaaggggcccaucaccgacguguucuacaaggagaacuccuacaccaccacgaucaagcccgugaccuacaagcucgacggcgucgugugcaccgagaucgaccccaagcuggacaacuacuacaagaaggacaacagcuacuucaccgagcagccgaucgaccuggugcccaaccagcccuaccccaacgccuccuucgacaacuucaaguucgucugcgacaacaucaaguucgccgacgaccucaaccagcugacgggguacaagaagccggcgagccgcgagcugaaggugaccuucuuccccgaccucaacggcgacguggucgccaucgacuacaagcacuacacccccuccuucaagaagggcgccaagcugcugcacaagcccaucguguggcacgugaacaacgccaccaacaaggcgacguacaagccgaacaccuggugcauccggugccucuggagcaccaagcccgucgagaccuccaacagcuucgacgugcugaaguccgaggacgcccaggggauggacaaccuggccugcgaggaccucaagcccgugagcgaggaggucguggagaaccccacgauccagaaggacgugcuggagugcaacgucaagaccaccgagguggugggcgacaucauccugaagccggccaacaacucccucaagaucaccgaggaggucgggcacacggaccugauggccgcguacguggacaacagcucccugaccaucaagaagcccaacgagcucagccgcgugcugggccugaagacccucgccacccacgggcuggccgccgucaacuccgugcccugggacacgaucgccaacuacgcgaagccguuccugaacaagguggucagcaccaccaccaacaucgugacgcgcugccucaaccgggugugcaccaacuacaugcccuacuucuucacccugcugcuccagcugugcaccuucacgcgcuccaccaacagccggaucaaggccuccaugcccaccaccaucgccaagaacaccgucaagagcgugggcaaguucugccuggaggccagcuucaacuaccucaagucccccaacuucagcaagcugaucaacaucaucaucugguuccugcuccuguccgugugccugggcagccucaucuacuccacggccgcgcuggggguccugaugagcaaccucggcaugccguccuacugcaccggguaccgcgagggcuaccugaacagcaccaacgugaccaucgccacguacugcaccggcuccauccccugcagcgugugccuguccgggcucgacagccuggacaccuaccccucccuggagaccauccagaucacgaucagcuccuucaagugggaccucaccgccuucggccuggucgccgagugguuccuggccuacauccucuucacccgguucuucuacgugcuggggcuggcggccaucaugcagcuguucuucagcuacuucgccgugcacuucaucuccaacagcuggcucauguggcugaucaucaaccugguccagauggcccccaucuccgcgauggugcgcauguacaucuucuucgccagcuucuacuacguguggaaguccuacguccacgugguggacggcugcaacagcagcacgugcaugaugugcuacaagcggaaccgcgccacgcgggucgagugcaccaccaucgugaacgggguccgccgguccuucuacguguacgccaacggcggcaagggguucugcaagcuccacaacuggaacugcgugaacugcgacaccuucugcgccggcagcacguucaucuccgacgaggucgcgcgcgaccugagccugcaguucaagcggccgaucaaccccaccgaccaguccagcuacaucguggacuccgugaccgucaagaacgggagcauccaccucuacuucgacaaggccggccagaagaccuacgagcgccacucccugagccacuucgugaaccuggacaaccuccgggccaacaacacgaaggggucccugcccaucaacgugaucgucuucgacggcaagagcaagugcgaggaguccagcgccaaguccgccagcguguacuacucccagcugaugugccagcccauccuccugcuggaccaggcgcucgugagcgacgucggcgacagcgccgagguggccgugaagauguucgacgccuacgucaacaccuucuccagcaccuucaacgugccgauggagaagcugaagacccugguggccacggcggaggccgagcucgccaagaacgucucccuggacaacgugcugagcaccuucaucuccgccgcgcgccagggguucguggacagcgacgucgagaccaaggacgugguggagugccucaagcugucccaccagagcgacaucgaggucaccggcgacuccugcaacaacuacaugcugacguacaacaagguggagaacaugacgccccgggaccucggggccugcaucgacugcagcgcccgccacaucaacgcccagguggccaagucccacaacaucgcgcugaucuggaacgucaaggacuucaugagccuguccgagcagcuccggaagcagauccgcagcgccgccaagaagaacaaccugcccuucaagcugaccugcgccaccacccgccagguggugaacgucgugaccaccaagaucgcccucaagggcggguga

SEQ ID NO: 28078 - RNA, 5841 nt, Artificial Sequence
  SARS-CoV-2/Wuhan-Hu-1__NC_045512.2/MN908947.2__non-structural protein 3 (NSP3) CDS gc (1-1946)(A42V_T429I_D822N_P1470S)
auggcccccaccaaggugaccuucggcgacgacaccgucaucgaggugcagggguacaagagcgugaacaucaccuucgagcuggacgagcgcaucgacaagguccucaacgagaagugcuccguguacaccguggagcugggcaccgaggugaacgaguucgcgugcgucguggccgacgccgugaucaagacgcugcagccggucagcgagcuccugacgccccuggggaucgaccucgacgagugguccauggccaccuacuaccuguucgacgagagcggcgaguucaagcuggccucccacauguacugcagcuucuacccgcccgacgaggacgaggaggagggggacugcgaggaggaggaguucgagcccuccacccaguacgaguacggcacggaggacgacuaccagggcaagccccucgaguucggggcgaccagcgccgcccugcagcccgaggaggagcaggaggaggacuggcuggacgacgacucccagcagaccgugggccagcaggacgggagcgaggacaaccagaccacgaccauccagaccaucguggagguccagccccagcucgagauggagcugaccccgguggugcagacgaucgaggucaacuccuucagcggcuaccugaagcucaccgacaacguguacaucaagaacgccgacaucguggaggaggcgaagaaggucaagcccaccgugguggucaacgccgccaacguguaccugaagcacgggggcggcguggccggggcccugaacaaggcgaccaacaacgccaugcaggucgaguccgacgacuacaucgccacgaacggcccccucaaggucgggggcagcugcgugcuguccggccacaaccuggccaagcacugccuccacgugguggggcccaacgucaacaagggcgaggacauccagcugcucaagagcgccuacgagaacuucaaccagcacgaggugcugcuggcgccgcugcucuccgccgggaucuucggcgccgaccccauccacagccugcgggugugcgucgacaccgugcgcaccaacguguaccuggccgucuucgacaagaaccucuacgacaagcugguguccagcuuccuggagaugaaguccgagaagcaggucgagcagaagaucgccgagauccccaaggaggaggugaagcccuucaucaccgagagcaagccgagcguggagcagcggaagcaggacgacaagaagaucaaggcgugcguggaggaggucacgaccacccucgaggagaucaaguuccugacggagaaccugcuccuguacaucgacaucaacgggaaccugcaccccgacuccgccacccucgugagcgacaucgacaucaccuuccugaagaaggacgcccccuacaucgugggcgacgucgugcaggagggcgugcugaccgccgucgugauccccacgaagaaggccgggggcaccaccgagaugcucgcgaaggcccugcgcaaggugccgaccgacaacuacaucacgaccuaccccgggcagggccugaacggguacaccgucgaggaggccaagaccgugcucaagaagugcaaguccgccuucuacauccugcccagcaucaucuccaacgagaagcaggagauccugggcaccgugagcuggaaccugcgggagaugcucgcgcacgccgaggagacgcgcaagcugaugcccgucugcguggagaccaaggccaucguguccaccauccagcggaaguacaagggcaucaagauccaggagggggucguggacuacggcgcccgcuucuacuucuacaccagcaagacgaccguggccucccugaucaacacccucaacgaccugaacgagacccuggucacgaugccgcucggguacgugacccacggccugaaccuggaggaggcggcccgguacaugcgcagccucaaggugcccgccaccgucuccgugagcucccccgacgccgugaccgccuacaacggguaccugacgagcuccagcaagacccccgaggagcacuucaucgagaccaucucccuggcgggcagcuacaaggacuggagcuacuccggccagagcacccagcucgggaucgaguuccugaagcggggcgacaaguccgucuacuacacgagcaacccgaccaccuuccaccuggacggggaggugaucaccuucgacaaccucaagacgcugcugucccuccgcgaggugcggaccaucaaggucuucaccaccguggacaacaucaaccugcacacccagguggucgacaugagcaugaccuacggccagcaguucggccccaccuaccuggacggggccgacgugaccaagaucaagccccacaacucccacgagggcaagacguucuacgugcucccgaacgacgacacccugcgcgucgaggccuucgaguacuaccacaccaccaaccccagcuuccuggggcgguacauguccgcccucaaccacacgaagaaguggaaguacccccaggugaacggccugaccagcaucaagugggccgacaacaacugcuaccuggcgaccgcccuccugacccugcagcagaucgagcucaaguucaacccgcccgcccugcaggacgccuacuaccgcgcgcgggccggggaggccgccaacuucugcgcccugauccucgcguacugcaacaagacggugggcgagcugggcgacguccgcgagaccauguccuaccuguuccagcacgccaaccucgacagcugcaagcgggugcugaacgucgugugcaagaccugcgggcagcagcagaccacccugaagggcguggaggccgucauguacauggggacgcucuccuacgagcaguucaagaagggcgugcagauccccugcacgugcgggaagcaggccaccaaguaccuggugcagcaggagagccccuucgucaugauguccgcgcccccggcccaguacgagcugaagcacggcaccuucacgugcgccagcgaguacaccggcaacuaccagugcgggcacuacaagcacaucaccuccaaggagacccucuacugcaucgacggcgcccugcugaccaagagcagcgaguacaaggggcccaucaccgacguguucuacaaggagaacuccuacaccaccacgaucaagcccgugaccuacaagcucgacggcgucgugugcaccgagaucgaccccaagcuggacaacuacuacaagaaggacaacagcuacuucaccgagcagccgaucgaccuggugcccaaccagcccuaccccaacgccuccuucgacaacuucaaguucgucugcgacaacaucaaguucgccgacgaccucaaccagcugacgggguacaagaagccggcgagccgcgagcugaaggugaccuucuuccccgaccucaacggcgacguggucgccaucgacuacaagcacuacacccccuccuucaagaagggcgccaagcugcugcacaagcccaucguguggcacgugaacaacgccaccaacaaggcgacguacaagccgaacaccuggugcauccggugccucuggagcaccaagcccgucgagaccuccaacagcuucgacgugcugaaguccgaggacgcccaggggauggacaaccuggccugcgaggaccucaagcccgugagcgaggaggucguggagaaccccacgauccagaaggacgugcuggagugcaacgucaagaccaccgagguggugggcgacaucauccugaagccggccaacaacucccucaagaucaccgaggaggucgggcacacggaccugauggccgcguacguggacaacagcucccugaccaucaagaagcccaacgagcucagccgcgugcugggccugaagacccucgccacccacgggcuggccgccgucaacuccgugcccugggacacgaucgccaacuacgcgaagccguuccugaacaagguggucagcaccaccaccaacaucgugacgcgcugccucaaccgggugugcaccaacuacaugcccuacuucuucacccugcugcuccagcugugcaccuucacgcgcuccaccaacagccggaucaaggccuccaugcccaccaccaucgccaagaacaccgucaagagcgugggcaaguucugccuggaggccagcuucaacuaccucaagucccccaacuucagcaagcugaucaacaucaucaucugguuccugcuccuguccgugugccugggcagccucaucuacuccacggccgcgcuggggguccugaugagcaaccucggcaugccguccuacugcaccggguaccgcgagggcuaccugaacagcaccaacgugaccaucgccacguacugcaccggcuccaucagcugcagcgugugccuguccgggcucgacagccuggacaccuaccccucccuggagaccauccagaucacgaucagcuccuucaagugggaccucaccgccuucggccuggucgccgagugguuccuggccuacauccucuucacccgguucuucuacgugcuggggcuggcggccaucaugcagcuguucuucagcuacuucgccgugcacuucaucuccaacagcuggcucauguggcugaucaucaaccugguccagauggcccccaucuccgcgauggugcgcauguacaucuucuucgccagcuucuacuacguguggaaguccuacguccacgugguggacggcugcaacagcagcacgugcaugaugugcuacaagcggaaccgcgccacgcgggucgagugcaccaccaucgugaacgggguccgccgguccuucuacguguacgccaacggcggcaagggguucugcaagcuccacaacuggaacugcgugaacugcgacaccuucugcgccggcagcacguucaucuccgacgaggucgcgcgcgaccugagccugcaguucaagcggccgaucaaccccaccgaccaguccagcuacaucguggacuccgugaccgucaagaacgggagcauccaccucuacuucgacaaggccggccagaagaccuacgagcgccacucccugagccacuucgugaaccuggacaaccuccgggccaacaacacgaaggggucccugcccaucaacgugaucgucuucgacggcaagagcaagugcgaggaguccagcgccaaguccgccagcguguacuacucccagcugaugugccagcccauccuccugcuggaccaggcgcucgugagcgacgucggcgacagcgccgagguggccgugaagauguucgacgccuacgucaacaccuucuccagcaccuucaacgugccgauggagaagcugaagacccugguggccacggcggaggccgagcucgccaagaacgucucccuggacaacgugcugagcaccuucaucuccgccgcgcgccagggguucguggacagcgacgucgagaccaaggacgugguggagugccucaagcugucccaccagagcgacaucgaggucaccggcgacuccugcaacaacuacaugcugacguacaacaagguggagaacaugacgccccgggaccucggggccugcaucgacugcagcgcccgccacaucaacgcccagguggccaagucccacaacaucgcgcugaucuggaacgucaaggacuucaugagccuguccgagcagcuccggaagcagauccgcagcgccgccaagaagaacaaccugcccuucaagcugaccugcgccaccacccgccagguggugaacgucgugaccaccaagaucgcccucaagggcggguga

SEQ ID NO: 28079 - RNA, 5841 nt, Artificial Sequence
  SARS-CoV-2/Wuhan-Hu-1__NC_045512.2/MN908947.2__non-structural protein 3 (NSP3) CDS gc (1-1946)(T238A_T721I_N1330D)
auggcccccaccaaggugaccuucggcgacgacaccgucaucgaggugcagggguacaagagcgugaacaucaccuucgagcuggacgagcgcaucgacaagguccucaacgagaagugcuccgccuacaccguggagcugggcaccgaggugaacgaguucgcgugcgucguggccgacgccgugaucaagacgcugcagccggucagcgagcuccugacgccccuggggaucgaccucgacgagugguccauggccaccuacuaccuguucgacgagagcggcgaguucaagcuggccucccacauguacugcagcuucuacccgcccgacgaggacgaggaggagggggacugcgaggaggaggaguucgagcccuccacccaguacgaguacggcacggaggacgacuaccagggcaagccccucgaguucggggcgaccagcgccgcccugcagcccgaggaggagcaggaggaggacuggcuggacgacgacucccagcagaccgugggccagcaggacgggagcgaggacaaccagaccacgaccauccagaccaucguggagguccagccccagcucgagauggagcugaccccgguggugcagacgaucgaggucaacuccuucagcggcuaccugaagcucaccgacaacguguacaucaagaacgccgacaucguggaggaggcgaagaaggucaagcccgccgugguggucaacgccgccaacguguaccugaagcacgggggcggcguggccggggcccugaacaaggcgaccaacaacgccaugcaggucgaguccgacgacuacaucgccacgaacggcccccucaaggucgggggcagcugcgugcuguccggccacaaccuggccaagcacugccuccacgugguggggcccaacgucaacaagggcgaggacauccagcugcucaagagcgccuacgagaacuucaaccagcacgaggugcugcuggcgccgcugcucuccgccgggaucuucggcgccgaccccauccacagccugcgggugugcgucgacaccgugcgcaccaacguguaccuggccgucuucgacaagaaccucuacgacaagcugguguccagcuuccuggagaugaaguccgagaagcaggucgagcagaagaucgccgagauccccaaggaggaggugaagcccuucaucaccgagagcaagccgagcguggagcagcggaagcaggacgacaagaagaucaaggcgugcguggaggaggucacgaccacccucgaggagaccaaguuccugacggagaaccugcuccuguacaucgacaucaacgggaaccugcaccccgacuccgccacccucgugagcgacaucgacaucaccuuccugaagaaggacgcccccuacaucgugggcgacgucgugcaggagggcgugcugaccgccgucgugauccccacgaagaaggccgggggcaccaccgagaugcucgcgaaggcccugcgcaaggugccgaccgacaacuacaucacgaccuaccccgggcagggccugaacggguacaccgucgaggaggccaagaccgugcucaagaagugcaaguccgccuucuacauccugcccagcaucaucuccaacgagaagcaggagauccugggcaccgugagcuggaaccugcgggagaugcucgcgcacgccgaggagacgcgcaagcugaugcccgucugcguggagaccaaggccaucguguccaccauccagcggaaguacaagggcaucaagauccaggagggggucguggacuacggcgcccgcuucuacuucuacaccagcaagacgaccguggccucccugaucaacacccucaacgaccugaacgagacccuggucacgaugccgcucggguacgugacccacggccugaaccuggaggaggcggcccgguacaugcgcagccucaaggugcccgccaccgucuccgugagcucccccgacgccgugaccgccuacaacggguaccugacgagcuccagcaagacccccgaggagcacuucaucgagaccaucucccuggcgggcagcuacaaggacuggagcuacuccggccagagcacccagcucgggaucgaguuccugaagcggggcgacaaguccgucuacuacaucagcaacccgaccaccuuccaccuggacggggaggugaucaccuucgacaaccucaagacgcugcugucccuccgcgaggugcggaccaucaaggucuucaccaccguggacaacaucaaccugcacacccagguggucgacaugagcaugaccuacggccagcaguucggccccaccuaccuggacggggccgacgugaccaagaucaagccccacaacucccacgagggcaagacguucuacgugcucccgaacgacgacacccugcgcgucgaggccuucgaguacuaccacaccaccgaccccagcuuccuggggcgguacauguccgcccucaaccacacgaagaaguggaaguacccccaggugaacggccugaccagcaucaagugggccgacaacaacugcuaccuggcgaccgcccuccugacccugcagcagaucgagcucaaguucaacccgcccgcccugcaggacgccuacuaccgcgcgcgggccggggaggccgccaacuucugcgcccugauccucgcguacugcaacaagacggugggcgagcugggcgacguccgcgagaccauguccuaccuguuccagcacgccaaccucgacagcugcaagcgggugcugaacgucgugugcaagaccugcgggcagcagcagaccacccugaagggcguggaggccgucauguacauggggacgcucuccuacgagcaguucaagaagggcgugcagauccccugcacgugcgggaagcaggccaccaaguaccuggugcagcaggagagccccuucgucaugauguccgcgcccccggcccaguacgagcugaagcacggcaccuucacgugcgccagcgaguacaccggcaacuaccagugcgggcacuacaagcacaucaccuccaaggagacccucuacugcaucgacggcgcccugcugaccaagagcagcgaguacaaggggcccaucaccgacguguucuacaaggagaacuccuacaccaccacgaucaagcccgugaccuacaagcucgacggcgucgugugcaccgagaucgaccccaagcuggacaacuacuacaagaaggacaacagcuacuucaccgagcagccgaucgaccuggugcccaaccagcccuaccccaacgccuccuucgacaacuucaaguucgucugcgacaacaucaaguucgccgacgaccucaaccagcugacgggguacaagaagccggcgagccgcgagcugaaggugaccuucuuccccgaccucaacggcgacguggucgccaucgacuacaagcacuacacccccuccuucaagaagggcgccaagcugcugcacaagcccaucguguggcacgugaacaacgccaccaacaaggcgacguacaagccgaacaccuggugcauccggugccucuggagcaccaagcccgucgagaccuccaacagcuucgacgugcugaaguccgaggacgcccaggggauggacaaccuggccugcgaggaccucaagcccgugagcgaggaggucguggagaaccccacgauccagaaggacgugcuggagugcaacgucaagaccaccgagguggugggcgacaucauccugaagccggccaacaacucccucaagaucaccgaggaggucgggcacacggaccugauggccgcguacguggacaacagcucccugaccaucaagaagcccaacgagcucagccgcgugcugggccugaagacccucgccacccacgggcuggccgccgucaacuccgugcccugggacacgaucgccaacuacgcgaagccguuccuggacaagguggucagcaccaccaccaacaucgugacgcgcugccucaaccgggugugcaccaacuacaugcccuacuucuucacccugcugcuccagcugugcaccuucacgcgcuccaccaacagccggaucaaggccuccaugcccaccaccaucgccaagaacaccgucaagagcgugggcaaguucugccuggaggccagcuucaacuaccucaagucccccaacuucagcaagcugaucaacaucaucaucugguuccugcuccuguccgugugccugggcagccucaucuacuccacggccgcgcuggggguccugaugagcaaccucggcaugccguccuacugcaccggguaccgcgagggcuaccugaacagcaccaacgugaccaucgccacguacugcaccggcuccauccccugcagcgugugccuguccgggcucgacagccuggacaccuaccccucccuggagaccauccagaucacgaucagcuccuucaagugggaccucaccgccuucggccuggucgccgagugguuccuggccuacauccucuucacccgguucuucuacgugcuggggcuggcggccaucaugcagcuguucuucagcuacuucgccgugcacuucaucuccaacagcuggcucauguggcugaucaucaaccugguccagauggcccccaucuccgcgauggugcgcauguacaucuucuucgccagcuucuacuacguguggaaguccuacguccacgugguggacggcugcaacagcagcacgugcaugaugugcuacaagcggaaccgcgccacgcgggucgagugcaccaccaucgugaacgggguccgccgguccuucuacguguacgccaacggcggcaagggguucugcaagcuccacaacuggaacugcgugaacugcgacaccuucugcgccggcagcacguucaucuccgacgaggucgcgcgcgaccugagccugcaguucaagcggccgaucaaccccaccgaccaguccagcuacaucguggacuccgugaccgucaagaacgggagcauccaccucuacuucgacaaggccggccagaagaccuacgagcgccacucccugagccacuucgugaaccuggacaaccuccgggccaacaacacgaaggggucccugcccaucaacgugaucgucuucgacggcaagagcaagugcgaggaguccagcgccaaguccgccagcguguacuacucccagcugaugugccagcccauccuccugcuggaccaggcgcucgugagcgacgucggcgacagcgccgagguggccgugaagauguucgacgccuacgucaacaccuucuccagcaccuucaacgugccgauggagaagcugaagacccugguggccacggcggaggccgagcucgccaagaacgucucccuggacaacgugcugagcaccuucaucuccgccgcgcgccagggguucguggacagcgacgucgagaccaaggacgugguggagugccucaagcugucccaccagagcgacaucgaggucaccggcgacuccugcaacaacuacaugcugacguacaacaagguggagaacaugacgccccgggaccucggggccugcaucgacugcagcgcccgccacaucaacgcccagguggccaagucccacaacaucgcgcugaucuggaacgucaaggacuucaugagccuguccgagcagcuccggaagcagauccgcagcgccgccaagaagaacaaccugcccuucaagcugaccugcgccaccacccgccagguggugaacgucgugaccaccaagaucgcccucaagggcggguga

SEQ ID NO: 28080 - RNA, 5841 nt, Artificial Sequence
  SARS-CoV-2/Wuhan-Hu-1__NC_045512.2/MN908947.2__non-structural protein 3 (NSP3) CDS gc (1-1946)(H343Y_P823L_K928I_N1588S)
auggcccccaccaaggugaccuucggcgacgacaccgucaucgaggugcagggguacaagagcgugaacaucaccuucgagcuggacgagcgcaucgacaagguccucaacgagaagugcuccgccuacaccguggagcugggcaccgaggugaacgaguucgcgugcgucguggccgacgccgugaucaagacgcugcagccggucagcgagcuccugacgccccuggggaucgaccucgacgagugguccauggccaccuacuaccuguucgacgagagcggcgaguucaagcuggccucccacauguacugcagcuucuacccgcccgacgaggacgaggaggagggggacugcgaggaggaggaguucgagcccuccacccaguacgaguacggcacggaggacgacuaccagggcaagccccucgaguucggggcgaccagcgccgcccugcagcccgaggaggagcaggaggaggacuggcuggacgacgacucccagcagaccgugggccagcaggacgggagcgaggacaaccagaccacgaccauccagaccaucguggagguccagccccagcucgagauggagcugaccccgguggugcagacgaucgaggucaacuccuucagcggcuaccugaagcucaccgacaacguguacaucaagaacgccgacaucguggaggaggcgaagaaggucaagcccaccgugguggucaacgccgccaacguguaccugaagcacgggggcggcguggccggggcccugaacaaggcgaccaacaacgccaugcaggucgaguccgacgacuacaucgccacgaacggcccccucaaggucgggggcagcugcgugcuguccggccacaaccuggccaagcacugccuccacgugguggggcccaacgucaacaagggcgaggacauccagcugcucaagagcgccuacgagaacuucaaccagcacgaggugcugcuggcgccgcugcucuccgccgggaucuucggcgccgaccccaucuacagccugcgggugugcgucgacaccgugcgcaccaacguguaccuggccgucuucgacaagaaccucuacgacaagcugguguccagcuuccuggagaugaaguccgagaagcaggucgagcagaagaucgccgagauccccaaggaggaggugaagcccuucaucaccgagagcaagccgagcguggagcagcggaagcaggacgacaagaagaucaaggcgugcguggaggaggucacgaccacccucgaggagaccaaguuccugacggagaaccugcuccuguacaucgacaucaacgggaaccugcaccccgacuccgccacccucgugagcgacaucgacaucaccuuccugaagaaggacgcccccuacaucgugggcgacgucgugcaggagggcgugcugaccgccgucgugauccccacgaagaaggccgggggcaccaccgagaugcucgcgaaggcccugcgcaaggugccgaccgacaacuacaucacgaccuaccccgggcagggccugaacggguacaccgucgaggaggccaagaccgugcucaagaagugcaaguccgccuucuacauccugcccagcaucaucuccaacgagaagcaggagauccugggcaccgugagcuggaaccugcgggagaugcucgcgcacgccgaggagacgcgcaagcugaugcccgucugcguggagaccaaggccaucguguccaccauccagcggaaguacaagggcaucaagauccaggagggggucguggacuacggcgcccgcuucuacuucuacaccagcaagacgaccguggccucccugaucaacacccucaacgaccugaacgagacccuggucacgaugccgcucggguacgugacccacggccugaaccuggaggaggcggcccgguacaugcgcagccucaaggugcccgccaccgucuccgugagcucccccgacgccgugaccgccuacaacggguaccugacgagcuccagcaagacccccgaggagcacuucaucgagaccaucucccuggcgggcagcuacaaggacuggagcuacuccggccagagcacccagcucgggaucgaguuccugaagcggggcgacaaguccgucuacuacacgagcaacccgaccaccuuccaccuggacggggaggugaucaccuucgacaaccucaagacgcugcugucccuccgcgaggugcggaccaucaaggucuucaccaccguggacaacaucaaccugcacacccagguggucgacaugagcaugaccuacggccagcaguucggccccaccuaccuggacggggccgacgugaccaagaucaagccccacaacucccacgagggcaagacguucuacgugcucccgaacgacgacacccugcgcgucgaggccuucgaguacuaccacaccaccgaccugagcuuccuggggcgguacauguccgcccucaaccacacgaagaaguggaaguacccccaggugaacggccugaccagcaucaagugggccgacaacaacugcuaccuggcgaccgcccuccugacccugcagcagaucgagcucaaguucaacccgcccgcccugcaggacgccuacuaccgcgcgcgggccggggaggccgccaacuucugcgcccugauccucgcguacugcaacaagacggugggcgagcugggcgacguccgcgagaccauguccuaccuguuccagcacgccaaccucgacagcugcauccgggugcugaacgucgugugcaagaccugcgggcagcagcagaccacccugaagggcguggaggccgucauguacauggggacgcucuccuacgagcaguucaagaagggcgugcagauccccugcacgugcgggaagcaggccaccaaguaccuggugcagcaggagagccccuucgucaugauguccgcgcccccggcccaguacgagcugaagcacggcaccuucacgugcgccagcgaguacaccggcaacuaccagugcgggcacuacaagcacaucaccuccaaggagacccucuacugcaucgacggcgcccugcugaccaagagcagcgaguacaaggggcccaucaccgacguguucuacaaggagaacuccuacaccaccacgaucaagcccgugaccuacaagcucgacggcgucgugugcaccgagaucgaccccaagcuggacaacuacuacaagaaggacaacagcuacuucaccgagcagccgaucgaccuggugcccaaccagcccuaccccaacgccuccuucgacaacuucaaguucgucugcgacaacaucaaguucgccgacgaccucaaccagcugacgggguacaagaagccggcgagccgcgagcugaaggugaccuucuuccccgaccucaacggcgacguggucgccaucgacuacaagcacuacacccccuccuucaagaagggcgccaagcugcugcacaagcccaucguguggcacgugaacaacgccaccaacaaggcgacguacaagccgaacaccuggugcauccggugccucuggagcaccaagcccgucgagaccuccaacagcuucgacgugcugaaguccgaggacgcccaggggauggacaaccuggccugcgaggaccucaagcccgugagcgaggaggucguggagaaccccacgauccagaaggacgugcuggagugcaacgucaagaccaccgagguggugggcgacaucauccugaagccggccaacaacucccucaagaucaccgaggaggucgggcacacggaccugauggccgcguacguggacaacagcucccugaccaucaagaagcccaacgagcucagccgcgugcugggccugaagacccucgccacccacgggcuggccgccgucaacuccgugcccugggacacgaucgccaacuacgcgaagccguuccugaacaagguggucagcaccaccaccaacaucgugacgcgcugccucaaccgggugugcaccaacuacaugcccuacuucuucacccugcugcuccagcugugcaccuucacgcgcuccaccaacagccggaucaaggccuccaugcccaccaccaucgccaagaacaccgucaagagcgugggcaaguucugccuggaggccagcuucaacuaccucaagucccccaacuucagcaagcugaucaacaucaucaucugguuccugcuccuguccgugugccugggcagccucaucuacuccacggccgcgcuggggguccugaugagcaaccucggcaugccguccuacugcaccggguaccgcgagggcuaccugaacagcaccaacgugaccaucgccacguacugcaccggcuccauccccugcagcgugugccuguccgggcucgacagccuggacaccuaccccucccuggagaccauccagaucacgaucagcuccuucaagugggaccucaccgccuucggccuggucgccgagugguuccuggccuacauccucuucacccgguucuucuacgugcuggggcuggcggccaucaugcagcuguucuucagcuacuucgccgugcacuucaucuccaacagcuggcucauguggcugaucaucaaccugguccagauggcccccaucuccgcgauggugcgcauguacaucuucuucgccagcuucuacuacguguggaaguccuacguccacgugguggacggcugcagcagcagcacgugcaugaugugcuacaagcggaaccgcgccacgcgggucgagugcaccaccaucgugaacgggguccgccgguccuucuacguguacgccaacggcggcaagggguucugcaagcuccacaacuggaacugcgugaacugcgacaccuucugcgccggcagcacguucaucuccgacgaggucgcgcgcgaccugagccugcaguucaagcggccgaucaaccccaccgaccaguccagcuacaucguggacuccgugaccgucaagaacgggagcauccaccucuacuucgacaaggccggccagaagaccuacgagcgccacucccugagccacuucgugaaccuggacaaccuccgggccaacaacacgaaggggucccugcccaucaacgugaucgucuucgacggcaagagcaagugcgaggaguccagcgccaaguccgccagcguguacuacucccagcugaugugccagcccauccuccugcuggaccaggcgcucgugagcgacgucggcgacagcgccgagguggccgugaagauguucgacgccuacgucaacaccuucuccagcaccuucaacgugccgauggagaagcugaagacccugguggccacggcggaggccgagcucgccaagaacgucucccuggacaacgugcugagcaccuucaucuccgccgcgcgccagggguucguggacagcgacgucgagaccaaggacgugguggagugccucaagcugucccaccagagcgacaucgaggucaccggcgacuccugcaacaacuacaugcugacguacaacaagguggagaacaugacgccccgggaccucggggccugcaucgacugcagcgcccgccacaucaacgcccagguggccaagucccacaacaucgcgcugaucuggaacgucaaggacuucaugagccuguccgagcagcuccggaagcagauccgcagcgccgccaagaagaacaaccugcccuucaagcugaccugcgccaccacccgccagguggugaacgucgugaccaccaagaucgcccucaagggcggguga

SEQ ID NO: 28081 - RNA, 5841 nt, Artificial Sequence
  SARS-CoV-2/Wuhan-Hu-1__NC_045512.2/MN908947.2__non-structural protein 3 (NSP3) CDS gc (1-1946)(E379V_K1694N)
auggcccccaccaaggugaccuucggcgacgacaccgucaucgaggugcagggguacaagagcgugaacaucaccuucgagcuggacgagcgcaucgacaagguccucaacgagaagugcuccgccuacaccguggagcugggcaccgaggugaacgaguucgcgugcgucguggccgacgccgugaucaagacgcugcagccggucagcgagcuccugacgccccuggggaucgaccucgacgagugguccauggccaccuacuaccuguucgacgagagcggcgaguucaagcuggccucccacauguacugcagcuucuacccgcccgacgaggacgaggaggagggggacugcgaggaggaggaguucgagcccuccacccaguacgaguacggcacggaggacgacuaccagggcaagccccucgaguucggggcgaccagcgccgcccugcagcccgaggaggagcaggaggaggacuggcuggacgacgacucccagcagaccgugggccagcaggacgggagcgaggacaaccagaccacgaccauccagaccaucguggagguccagccccagcucgagauggagcugaccccgguggugcagacgaucgaggucaacuccuucagcggcuaccugaagcucaccgacaacguguacaucaagaacgccgacaucguggaggaggcgaagaaggucaagcccaccgugguggucaacgccgccaacguguaccugaagcacgggggcggcguggccggggcccugaacaaggcgaccaacaacgccaugcaggucgaguccgacgacuacaucgccacgaacggcccccucaaggucgggggcagcugcgugcuguccggccacaaccuggccaagcacugccuccacgugguggggcccaacgucaacaagggcgaggacauccagcugcucaagagcgccuacgagaacuucaaccagcacgaggugcugcuggcgccgcugcucuccgccgggaucuucggcgccgaccccauccacagccugcgggugugcgucgacaccgugcgcaccaacguguaccuggccgucuucgacaagaaccucuacgacaagcugguguccagcuuccuggagaugaaguccgugaagcaggucgagcagaagaucgccgagauccccaaggaggaggugaagcccuucaucaccgagagcaagccgagcguggagcagcggaagcaggacgacaagaagaucaaggcgugcguggaggaggucacgaccacccucgaggagaccaaguuccugacggagaaccugcuccuguacaucgacaucaacgggaaccugcaccccgacuccgccacccucgugagcgacaucgacaucaccuuccugaagaaggacgcccccuacaucgugggcgacgucgugcaggagggcgugcugaccgccgucgugauccccacgaagaaggccgggggcaccaccgagaugcucgcgaaggcccugcgcaaggugccgaccgacaacuacaucacgaccuaccccgggcagggccugaacggguacaccgucgaggaggccaagaccgugcucaagaagugcaaguccgccuucuacauccugcccagcaucaucuccaacgagaagcaggagauccugggcaccgugagcuggaaccugcgggagaugcucgcgcacgccgaggagacgcgcaagcugaugcccgucugcguggagaccaaggccaucguguccaccauccagcggaaguacaagggcaucaagauccaggagggggucguggacuacggcgcccgcuucuacuucuacaccagcaagacgaccguggccucccugaucaacacccucaacgaccugaacgagacccuggucacgaugccgcucggguacgugacccacggccugaaccuggaggaggcggcccgguacaugcgcagccucaaggugcccgccaccgucuccgugagcucccccgacgccgugaccgccuacaacggguaccugacgagcuccagcaagacccccgaggagcacuucaucgagaccaucucccuggcgggcagcuacaaggacuggagcuacuccggccagagcacccagcucgggaucgaguuccugaagcggggcgacaaguccgucuacuacacgagcaacccgaccaccuuccaccuggacggggaggugaucaccuucgacaaccucaagacgcugcugucccuccgcgaggugcggaccaucaaggucuucaccaccguggacaacaucaaccugcacacccagguggucgacaugagcaugaccuacggccagcaguucggccccaccuaccuggacggggccgacgugaccaagaucaagccccacaacucccacgagggcaagacguucuacgugcucccgaacgacgacacccugcgcgucgaggccuucgaguacuaccacaccaccgaccccagcuuccuggggcgguacauguccgcccucaaccacacgaagaaguggaaguacccccaggugaacggccugaccagcaucaagugggccgacaacaacugcuaccuggcgaccgcccuccugacccugcagcagaucgagcucaaguucaacccgcccgcccugcaggacgccuacuaccgcgcgcgggccggggaggccgccaacuucugcgcccugauccucgcguacugcaacaagacggugggcgagcugggcgacguccgcgagaccauguccuaccuguuccagcacgccaaccucgacagcugcaagcgggugcugaacgucgugugcaagaccugcgggcagcagcagaccacccugaagggcguggaggccgucauguacauggggacgcucuccuacgagcaguucaagaagggcgugcagauccccugcacgugcgggaagcaggccaccaaguaccuggugcagcaggagagccccuucgucaugauguccgcgcccccggcccaguacgagcugaagcacggcaccuucacgugcgccagcgaguacaccggcaacuaccagugcgggcacuacaagcacaucaccuccaaggagacccucuacugcaucgacggcgcccugcugaccaagagcagcgaguacaaggggcccaucaccgacguguucuacaaggagaacuccuacaccaccacgaucaagcccgugaccuacaagcucgacggcgucgugugcaccgagaucgaccccaagcuggacaacuacuacaagaaggacaacagcuacuucaccgagcagccgaucgaccuggugcccaaccagcccuaccccaacgccuccuucgacaacuucaaguucgucugcgacaacaucaaguucgccgacgaccucaaccagcugacgggguacaagaagccggcgagccgcgagcugaaggugaccuucuuccccgaccucaacggcgacguggucgccaucgacuacaagcacuacacccccuccuucaagaagggcgccaagcugcugcacaagcccaucguguggcacgugaacaacgccaccaacaaggcgacguacaagccgaacaccuggugcauccggugccucuggagcaccaagcccgucgagaccuccaacagcuucgacgugcugaaguccgaggacgcccaggggauggacaaccuggccugcgaggaccucaagcccgugagcgaggaggucguggagaaccccacgauccagaaggacgugcuggagugcaacgucaagaccaccgagguggugggcgacaucauccugaagccggccaacaacucccucaagaucaccgaggaggucgggcacacggaccugauggccgcguacguggacaacagcucccugaccaucaagaagcccaacgagcucagccgcgugcugggccugaagacccucgccacccacgggcuggccgccgucaacuccgugcccugggacacgaucgccaacuacgcgaagccguuccugaacaagguggucagcaccaccaccaacaucgugacgcgcugccucaaccgggugugcaccaacuacaugcccuacuucuucacccugcugcuccagcugugcaccuucacgcgcuccaccaacagccggaucaaggccuccaugcccaccaccaucgccaagaacaccgucaagagcgugggcaaguucugccuggaggccagcuucaacuaccucaagucccccaacuucagcaagcugaucaacaucaucaucugguuccugcuccuguccgugugccugggcagccucaucuacuccacggccgcgcuggggguccugaugagcaaccucggcaugccguccuacugcaccggguaccgcgagggcuaccugaacagcaccaacgugaccaucgccacguacugcaccggcuccauccccugcagcgugugccuguccgggcucgacagccuggacaccuaccccucccuggagaccauccagaucacgaucagcuccuucaagugggaccucaccgccuucggccuggucgccgagugguuccuggccuacauccucuucacccgguucuucuacgugcuggggcuggcggccaucaugcagcuguucuucagcuacuucgccgugcacuucaucuccaacagcuggcucauguggcugaucaucaaccugguccagauggcccccaucuccgcgauggugcgcauguacaucuucuucgccagcuucuacuacguguggaaguccuacguccacgugguggacggcugcaacagcagcacgugcaugaugugcuacaagcggaaccgcgccacgcgggucgagugcaccaccaucgugaacgggguccgccgguccuucuacguguacgccaacggcggcaagggguucugcaagcuccacaacuggaacugcgugaacugcgacaccuucugcgccggcagcacguucaucuccgacgaggucgcgcgcgaccugagccugcaguucaagcggccgaucaaccccaccgaccaguccagcuacaucguggacuccgugaccgucaagaacgggagcauccaccucuacuucgacaaggccggccagaacaccuacgagcgccacucccugagccacuucgugaaccuggacaaccuccgggccaacaacacgaaggggucccugcccaucaacgugaucgucuucgacggcaagagcaagugcgaggaguccagcgccaaguccgccagcguguacuacucccagcugaugugccagcccauccuccugcuggaccaggcgcucgugagcgacgucggcgacagcgccgagguggccgugaagauguucgacgccuacgucaacaccuucuccagcaccuucaacgugccgauggagaagcugaagacccugguggccacggcggaggccgagcucgccaagaacgucucccuggacaacgugcugagcaccuucaucuccgccgcgcgccagggguucguggacagcgacgucgagaccaaggacgugguggagugccucaagcugucccaccagagcgacaucgaggucaccggcgacuccugcaacaacuacaugcugacguacaacaagguggagaacaugacgccccgggaccucggggccugcaucgacugcagcgcccgccacaucaacgcccagguggccaagucccacaacaucgcgcugaucuggaacgucaaggacuucaugagccuguccgagcagcuccggaagcagauccgcagcgccgccaagaagaacaaccugcccuucaagcugaccugcgccaccacccgccagguggugaacgucgugaccaccaagaucgcccucaagggcggguga

SEQ ID NO: 28082 - RNA, 5841 nt, Artificial Sequence
  SARS-CoV-2/Wuhan-Hu-1__NC_045512.2/MN908947.2__non-structural protein 3 (NSP3) CDS gc (1-1946)(T429I_P1470S_F1570V)
auggcccccaccaaggugaccuucggcgacgacaccgucaucgaggugcagggguacaagagcgugaacaucaccuucgagcuggacgagcgcaucgacaagguccucaacgagaagugcuccgccuacaccguggagcugggcaccgaggugaacgaguucgcgugcgucguggccgacgccgugaucaagacgcugcagccggucagcgagcuccugacgccccuggggaucgaccucgacgagugguccauggccaccuacuaccuguucgacgagagcggcgaguucaagcuggccucccacauguacugcagcuucuacccgcccgacgaggacgaggaggagggggacugcgaggaggaggaguucgagcccuccacccaguacgaguacggcacggaggacgacuaccagggcaagccccucgaguucggggcgaccagcgccgcccugcagcccgaggaggagcaggaggaggacuggcuggacgacgacucccagcagaccgugggccagcaggacgggagcgaggacaaccagaccacgaccauccagaccaucguggagguccagccccagcucgagauggagcugaccccgguggugcagacgaucgaggucaacuccuucagcggcuaccugaagcucaccgacaacguguacaucaagaacgccgacaucguggaggaggcgaagaaggucaagcccaccgugguggucaacgccgccaacguguaccugaagcacgggggcggcguggccggggcccugaacaaggcgaccaacaacgccaugcaggucgaguccgacgacuacaucgccacgaacggcccccucaaggucgggggcagcugcgugcuguccggccacaaccuggccaagcacugccuccacgugguggggcccaacgucaacaagggcgaggacauccagcugcucaagagcgccuacgagaacuucaaccagcacgaggugcugcuggcgccgcugcucuccgccgggaucuucggcgccgaccccauccacagccugcgggugugcgucgacaccgugcgcaccaacguguaccuggccgucuucgacaagaaccucuacgacaagcugguguccagcuuccuggagaugaaguccgagaagcaggucgagcagaagaucgccgagauccccaaggaggaggugaagcccuucaucaccgagagcaagccgagcguggagcagcggaagcaggacgacaagaagaucaaggcgugcguggaggaggucacgaccacccucgaggagaucaaguuccugacggagaaccugcuccuguacaucgacaucaacgggaaccugcaccccgacuccgccacccucgugagcgacaucgacaucaccuuccugaagaaggacgcccccuacaucgugggcgacgucgugcaggagggcgugcugaccgccgucgugauccccacgaagaaggccgggggcaccaccgagaugcucgcgaaggcccugcgcaaggugccgaccgacaacuacaucacgaccuaccccgggcagggccugaacggguacaccgucgaggaggccaagaccgugcucaagaagugcaaguccgccuucuacauccugcccagcaucaucuccaacgagaagcaggagauccugggcaccgugagcuggaaccugcgggagaugcucgcgcacgccgaggagacgcgcaagcugaugcccgucugcguggagaccaaggccaucguguccaccauccagcggaaguacaagggcaucaagauccaggagggggucguggacuacggcgcccgcuucuacuucuacaccagcaagacgaccguggccucccugaucaacacccucaacgaccugaacgagacccuggucacgaugccgcucggguacgugacccacggccugaaccuggaggaggcggcccgguacaugcgcagccucaaggugcccgccaccgucuccgugagcucccccgacgccgugaccgccuacaacggguaccugacgagcuccagcaagacccccgaggagcacuucaucgagaccaucucccuggcgggcagcuacaaggacuggagcuacuccggccagagcacccagcucgggaucgaguuccugaagcggggcgacaaguccgucuacuacacgagcaacccgaccaccuuccaccuggacggggaggugaucaccuucgacaaccucaagacgcugcugucccuccgcgaggugcggaccaucaaggucuucaccaccguggacaacaucaaccugcacacccagguggucgacaugagcaugaccuacggccagcaguucggccccaccuaccuggacggggccgacgugaccaagaucaagccccacaacucccacgagggcaagacguucuacgugcucccgaacgacgacacccugcgcgucgaggccuucgaguacuaccacaccaccgaccccagcuuccuggggcgguacauguccgcccucaaccacacgaagaaguggaaguacccccaggugaacggccugaccagcaucaagugggccgacaacaacugcuaccuggcgaccgcccuccugacccugcagcagaucgagcucaaguucaacccgcccgcccugcaggacgccuacuaccgcgcgcgggccggggaggccgccaacuucugcgcccugauccucgcguacugcaacaagacggugggcgagcugggcgacguccgcgagaccauguccuaccuguuccagcacgccaaccucgacagcugcaagcgggugcugaacgucgugugcaagaccugcgggcagcagcagaccacccugaagggcguggaggccgucauguacauggggacgcucuccuacgagcaguucaagaagggcgugcagauccccugcacgugcgggaagcaggccaccaaguaccuggugcagcaggagagccccuucgucaugauguccgcgcccccggcccaguacgagcugaagcacggcaccuucacgugcgccagcgaguacaccggcaacuaccagugcgggcacuacaagcacaucaccuccaaggagacccucuacugcaucgacggcgcccugcugaccaagagcagcgaguacaaggggcccaucaccgacguguucuacaaggagaacuccuacaccaccacgaucaagcccgugaccuacaagcucgacggcgucgugugcaccgagaucgaccccaagcuggacaacuacuacaagaaggacaacagcuacuucaccgagcagccgaucgaccuggugcccaaccagcccuaccccaacgccuccuucgacaacuucaaguucgucugcgacaacaucaaguucgccgacgaccucaaccagcugacgggguacaagaagccggcgagccgcgagcugaaggugaccuucuuccccgaccucaacggcgacguggucgccaucgacuacaagcacuacacccccuccuucaagaagggcgccaagcugcugcacaagcccaucguguggcacgugaacaacgccaccaacaaggcgacguacaagccgaacaccuggugcauccggugccucuggagcaccaagcccgucgagaccuccaacagcuucgacgugcugaaguccgaggacgcccaggggauggacaaccuggccugcgaggaccucaagcccgugagcgaggaggucguggagaaccccacgauccagaaggacgugcuggagugcaacgucaagaccaccgagguggugggcgacaucauccugaagccggccaacaacucccucaagaucaccgaggaggucgggcacacggaccugauggccgcguacguggacaacagcucccugaccaucaagaagcccaacgagcucagccgcgugcugggccugaagacccucgccacccacgggcuggccgccgucaacuccgugcccugggacacgaucgccaacuacgcgaagccguuccugaacaagguggucagcaccaccaccaacaucgugacgcgcugccucaaccgggugugcaccaacuacaugcccuacuucuucacccugcugcuccagcugugcaccuucacgcgcuccaccaacagccggaucaaggccuccaugcccaccaccaucgccaagaacaccgucaagagcgugggcaaguucugccuggaggccagcuucaacuaccucaagucccccaacuucagcaagcugaucaacaucaucaucugguuccugcuccuguccgugugccugggcagccucaucuacuccacggccgcgcuggggguccugaugagcaaccucggcaugccguccuacugcaccggguaccgcgagggcuaccugaacagcaccaacgugaccaucgccacguacugcaccggcuccaucagcugcagcgugugccuguccgggcucgacagccuggacaccuaccccucccuggagaccauccagaucacgaucagcuccuucaagugggaccucaccgccuucggccuggucgccgagugguuccuggccuacauccucuucacccgguucuucuacgugcuggggcuggcggccaucaugcagcuguucuucagcuacuucgccgugcacuucaucuccaacagcuggcucauguggcugaucaucaaccugguccagauggcccccaucuccgcgauggugcgcauguacaucuucguggccagcuucuacuacguguggaaguccuacguccacgugguggacggcugcaacagcagcacgugcaugaugugcuacaagcggaaccgcgccacgcgggucgagugcaccaccaucgugaacgggguccgccgguccuucuacguguacgccaacggcggcaagggguucugcaagcuccacaacuggaacugcgugaacugcgacaccuucugcgccggcagcacguucaucuccgacgaggucgcgcgcgaccugagccugcaguucaagcggccgaucaaccccaccgaccaguccagcuacaucguggacuccgugaccgucaagaacgggagcauccaccucuacuucgacaaggccggccagaagaccuacgagcgccacucccugagccacuucgugaaccuggacaaccuccgggccaacaacacgaaggggucccugcccaucaacgugaucgucuucgacggcaagagcaagugcgaggaguccagcgccaaguccgccagcguguacuacucccagcugaugugccagcccauccuccugcuggaccaggcgcucgugagcgacgucggcgacagcgccgagguggccgugaagauguucgacgccuacgucaacaccuucuccagcaccuucaacgugccgauggagaagcugaagacccugguggccacggcggaggccgagcucgccaagaacgucucccuggacaacgugcugagcaccuucaucuccgccgcgcgccagggguucguggacagcgacgucgagaccaaggacgugguggagugccucaagcugucccaccagagcgacaucgaggucaccggcgacuccugcaacaacuacaugcugacguacaacaagguggagaacaugacgccccgggaccucggggccugcaucgacugcagcgcccgccacaucaacgcccagguggccaagucccacaacaucgcgcugaucuggaacgucaaggacuucaugagccuguccgagcagcuccggaagcagauccgcagcgccgccaagaagaacaaccugcccuucaagcugaccugcgccaccacccgccagguggugaacgucgugaccaccaagaucgcccucaagggcggguga

SEQ ID NO: 28083 - RNA, 5841 nt, Artificial Sequence
  SARS-CoV-2/Wuhan-Hu-1__NC_045512.2/MN908947.2__non-structural protein 3 (NSP3) CDS gc (1-1946)(D737G_S1808F)
auggcccccaccaaggugaccuucggcgacgacaccgucaucgaggugcagggguacaagagcgugaacaucaccuucgagcuggacgagcgcaucgacaagguccucaacgagaagugcuccgccuacaccguggagcugggcaccgaggugaacgaguucgcgugcgucguggccgacgccgugaucaagacgcugcagccggucagcgagcuccugacgccccuggggaucgaccucgacgagugguccauggccaccuacuaccuguucgacgagagcggcgaguucaagcuggccucccacauguacugcagcuucuacccgcccgacgaggacgaggaggagggggacugcgaggaggaggaguucgagcccuccacccaguacgaguacggcacggaggacgacuaccagggcaagccccucgaguucggggcgaccagcgccgcccugcagcccgaggaggagcaggaggaggacuggcuggacgacgacucccagcagaccgugggccagcaggacgggagcgaggacaaccagaccacgaccauccagaccaucguggagguccagccccagcucgagauggagcugaccccgguggugcagacgaucgaggucaacuccuucagcggcuaccugaagcucaccgacaacguguacaucaagaacgccgacaucguggaggaggcgaagaaggucaagcccaccgugguggucaacgccgccaacguguaccugaagcacgggggcggcguggccggggcccugaacaaggcgaccaacaacgccaugcaggucgaguccgacgacuacaucgccacgaacggcccccucaaggucgggggcagcugcgugcuguccggccacaaccuggccaagcacugccuccacgugguggggcccaacgucaacaagggcgaggacauccagcugcucaagagcgccuacgagaacuucaaccagcacgaggugcugcuggcgccgcugcucuccgccgggaucuucggcgccgaccccauccacagccugcgggugugcgucgacaccgugcgcaccaacguguaccuggccgucuucgacaagaaccucuacgacaagcugguguccagcuuccuggagaugaaguccgagaagcaggucgagcagaagaucgccgagauccccaaggaggaggugaagcccuucaucaccgagagcaagccgagcguggagcagcggaagcaggacgacaagaagaucaaggcgugcguggaggaggucacgaccacccucgaggagaccaaguuccugacggagaaccugcuccuguacaucgacaucaacgggaaccugcaccccgacuccgccacccucgugagcgacaucgacaucaccuuccugaagaaggacgcccccuacaucgugggcgacgucgugcaggagggcgugcugaccgccgucgugauccccacgaagaaggccgggggcaccaccgagaugcucgcgaaggcccugcgcaaggugccgaccgacaacuacaucacgaccuaccccgggcagggccugaacggguacaccgucgaggaggccaagaccgugcucaagaagugcaaguccgccuucuacauccugcccagcaucaucuccaacgagaagcaggagauccugggcaccgugagcuggaaccugcgggagaugcucgcgcacgccgaggagacgcgcaagcugaugcccgucugcguggagaccaaggccaucguguccaccauccagcggaaguacaagggcaucaagauccaggagggggucguggacuacggcgcccgcuucuacuucuacaccagcaagacgaccguggccucccugaucaacacccucaacgaccugaacgagacccuggucacgaugccgcucggguacgugacccacggccugaaccuggaggaggcggcccgguacaugcgcagccucaaggugcccgccaccgucuccgugagcucccccgacgccgugaccgccuacaacggguaccugacgagcuccagcaagacccccgaggagcacuucaucgagaccaucucccuggcgggcagcuacaaggacuggagcuacuccggccagagcacccagcucgggaucgaguuccugaagcggggcgacaaguccgucuacuacacgagcaacccgaccaccuuccaccuggacggggaggugaucaccuucggcaaccucaagacgcugcugucccuccgcgaggugcggaccaucaaggucuucaccaccguggacaacaucaaccugcacacccagguggucgacaugagcaugaccuacggccagcaguucggccccaccuaccuggacggggccgacgugaccaagaucaagccccacaacucccacgagggcaagacguucuacgugcucccgaacgacgacacccugcgcgucgaggccuucgaguacuaccacaccaccgaccccagcuuccuggggcgguacauguccgcccucaaccacacgaagaaguggaaguacccccaggugaacggccugaccagcaucaagugggccgacaacaacugcuaccuggcgaccgcccuccugacccugcagcagaucgagcucaaguucaacccgcccgcccugcaggacgccuacuaccgcgcgcgggccggggaggccgccaacuucugcgcccugauccucgcguacugcaacaagacggugggcgagcugggcgacguccgcgagaccauguccuaccuguuccagcacgccaaccucgacagcugcaagcgggugcugaacgucgugugcaagaccugcgggcagcagcagaccacccugaagggcguggaggccgucauguacauggggacgcucuccuacgagcaguucaagaagggcgugcagauccccugcacgugcgggaagcaggccaccaaguaccuggugcagcaggagagccccuucgucaugauguccgcgcccccggcccaguacgagcugaagcacggcaccuucacgugcgccagcgaguacaccggcaacuaccagugcgggcacuacaagcacaucaccuccaaggagacccucuacugcaucgacggcgcccugcugaccaagagcagcgaguacaaggggcccaucaccgacguguucuacaaggagaacuccuacaccaccacgaucaagcccgugaccuacaagcucgacggcgucgugugcaccgagaucgaccccaagcuggacaacuacuacaagaaggacaacagcuacuucaccgagcagccgaucgaccuggugcccaaccagcccuaccccaacgccuccuucgacaacuucaaguucgucugcgacaacaucaaguucgccgacgaccucaaccagcugacgggguacaagaagccggcgagccgcgagcugaaggugaccuucuuccccgaccucaacggcgacguggucgccaucgacuacaagcacuacacccccuccuucaagaagggcgccaagcugcugcacaagcccaucguguggcacgugaacaacgccaccaacaaggcgacguacaagccgaacaccuggugcauccggugccucuggagcaccaagcccgucgagaccuccaacagcuucgacgugcugaaguccgaggacgcccaggggauggacaaccuggccugcgaggaccucaagcccgugagcgaggaggucguggagaaccccacgauccagaaggacgugcuggagugcaacgucaagaccaccgagguggugggcgacaucauccugaagccggccaacaacucccucaagaucaccgaggaggucgggcacacggaccugauggccgcguacguggacaacagcucccugaccaucaagaagcccaacgagcucagccgcgugcugggccugaagacccucgccacccacgggcuggccgccgucaacuccgugcccugggacacgaucgccaacuacgcgaagccguuccugaacaagguggucagcaccaccaccaacaucgugacgcgcugccucaaccgggugugcaccaacuacaugcccuacuucuucacccugcugcuccagcugugcaccuucacgcgcuccaccaacagccggaucaaggccuccaugcccaccaccaucgccaagaacaccgucaagagcgugggcaaguucugccuggaggccagcuucaacuaccucaagucccccaacuucagcaagcugaucaacaucaucaucugguuccugcuccuguccgugugccugggcagccucaucuacuccacggccgcgcuggggguccugaugagcaaccucggcaugccguccuacugcaccggguaccgcgagggcuaccugaacagcaccaacgugaccaucgccacguacugcaccggcuccauccccugcagcgugugccuguccgggcucgacagccuggacaccuaccccucccuggagaccauccagaucacgaucagcuccuucaagugggaccucaccgccuucggccuggucgccgagugguuccuggccuacauccucuucacccgguucuucuacgugcuggggcuggcggccaucaugcagcuguucuucagcuacuucgccgugcacuucaucuccaacagcuggcucauguggcugaucaucaaccugguccagauggcccccaucuccgcgauggugcgcauguacaucuucuucgccagcuucuacuacguguggaaguccuacguccacgugguggacggcugcaacagcagcacgugcaugaugugcuacaagcggaaccgcgccacgcgggucgagugcaccaccaucgugaacgggguccgccgguccuucuacguguacgccaacggcggcaagggguucugcaagcuccacaacuggaacugcgugaacugcgacaccuucugcgccggcagcacguucaucuccgacgaggucgcgcgcgaccugagccugcaguucaagcggccgaucaaccccaccgaccaguccagcuacaucguggacuccgugaccgucaagaacgggagcauccaccucuacuucgacaaggccggccagaagaccuacgagcgccacucccugagccacuucgugaaccuggacaaccuccgggccaacaacacgaaggggucccugcccaucaacgugaucgucuucgacggcaagagcaagugcgaggaguccagcgccaaguccgccagcguguacuacucccagcugaugugccagcccauccuccugcuggaccaggcgcucgugagcgacgucggcgacagcgccgagguggccgugaagauguucgacgccuacgucaacaccuucuccagcaccuucaacgugccgauggagaagcugaagacccugguggccacggcggaggccgagcucgccaagaacgucuuccuggacaacgugcugagcaccuucaucuccgccgcgcgccagggguucguggacagcgacgucgagaccaaggacgugguggagugccucaagcugucccaccagagcgacaucgaggucaccggcgacuccugcaacaacuacaugcugacguacaacaagguggagaacaugacgccccgggaccucggggccugcaucgacugcagcgcccgccacaucaacgcccagguggccaagucccacaacaucgcgcugaucuggaacgucaaggacuucaugagccuguccgagcagcuccggaagcagauccgcagcgccgccaagaagaacaaccugcccuucaagcugaccugcgccaccacccgccagguggugaacgucgugaccaccaagaucgcccucaagggcggguga

SEQ ID NO: 28084 - RNA, 5841 nt, Artificial Sequence
  SARS-CoV-2/Wuhan-Hu-1__NC_045512.2/MN908947.2__non-structural protein 3 (NSP3) CDS gc (1-1946)(T750I)
auggcccccaccaaggugaccuucggcgacgacaccgucaucgaggugcagggguacaagagcgugaacaucaccuucgagcuggacgagcgcaucgacaagguccucaacgagaagugcuccgccuacaccguggagcugggcaccgaggugaacgaguucgcgugcgucguggccgacgccgugaucaagacgcugcagccggucagcgagcuccugacgccccuggggaucgaccucgacgagugguccauggccaccuacuaccuguucgacgagagcggcgaguucaagcuggccucccacauguacugcagcuucuacccgcccgacgaggacgaggaggagggggacugcgaggaggaggaguucgagcccuccacccaguacgaguacggcacggaggacgacuaccagggcaagccccucgaguucggggcgaccagcgccgcccugcagcccgaggaggagcaggaggaggacuggcuggacgacgacucccagcagaccgugggccagcaggacgggagcgaggacaaccagaccacgaccauccagaccaucguggagguccagccccagcucgagauggagcugaccccgguggugcagacgaucgaggucaacuccuucagcggcuaccugaagcucaccgacaacguguacaucaagaacgccgacaucguggaggaggcgaagaaggucaagcccaccgugguggucaacgccgccaacguguaccugaagcacgggggcggcguggccggggcccugaacaaggcgaccaacaacgccaugcaggucgaguccgacgacuacaucgccacgaacggcccccucaaggucgggggcagcugcgugcuguccggccacaaccuggccaagcacugccuccacgugguggggcccaacgucaacaagggcgaggacauccagcugcucaagagcgccuacgagaacuucaaccagcacgaggugcugcuggcgccgcugcucuccgccgggaucuucggcgccgaccccauccacagccugcgggugugcgucgacaccgugcgcaccaacguguaccuggccgucuucgacaagaaccucuacgacaagcugguguccagcuuccuggagaugaaguccgagaagcaggucgagcagaagaucgccgagauccccaaggaggaggugaagcccuucaucaccgagagcaagccgagcguggagcagcggaagcaggacgacaagaagaucaaggcgugcguggaggaggucacgaccacccucgaggagaccaaguuccugacggagaaccugcuccuguacaucgacaucaacgggaaccugcaccccgacuccgccacccucgugagcgacaucgacaucaccuuccugaagaaggacgcccccuacaucgugggcgacgucgugcaggagggcgugcugaccgccgucgugauccccacgaagaaggccgggggcaccaccgagaugcucgcgaaggcccugcgcaaggugccgaccgacaacuacaucacgaccuaccccgggcagggccugaacggguacaccgucgaggaggccaagaccgugcucaagaagugcaaguccgccuucuacauccugcccagcaucaucuccaacgagaagcaggagauccugggcaccgugagcuggaaccugcgggagaugcucgcgcacgccgaggagacgcgcaagcugaugcccgucugcguggagaccaaggccaucguguccaccauccagcggaaguacaagggcaucaagauccaggagggggucguggacuacggcgcccgcuucuacuucuacaccagcaagacgaccguggccucccugaucaacacccucaacgaccugaacgagacccuggucacgaugccgcucggguacgugacccacggccugaaccuggaggaggcggcccgguacaugcgcagccucaaggugcccgccaccgucuccgugagcucccccgacgccgugaccgccuacaacggguaccugacgagcuccagcaagacccccgaggagcacuucaucgagaccaucucccuggcgggcagcuacaaggacuggagcuacuccggccagagcacccagcucgggaucgaguuccugaagcggggcgacaaguccgucuacuacacgagcaacccgaccaccuuccaccuggacggggaggugaucaccuucgacaaccucaagacgcugcugucccuccgcgaggugcggaucaucaaggucuucaccaccguggacaacaucaaccugcacacccagguggucgacaugagcaugaccuacggccagcaguucggccccaccuaccuggacggggccgacgugaccaagaucaagccccacaacucccacgagggcaagacguucuacgugcucccgaacgacgacacccugcgcgucgaggccuucgaguacuaccacaccaccgaccccagcuuccuggggcgguacauguccgcccucaaccacacgaagaaguggaaguacccccaggugaacggccugaccagcaucaagugggccgacaacaacugcuaccuggcgaccgcccuccugacccugcagcagaucgagcucaaguucaacccgcccgcccugcaggacgccuacuaccgcgcgcgggccggggaggccgccaacuucugcgcccugauccucgcguacugcaacaagacggugggcgagcugggcgacguccgcgagaccauguccuaccuguuccagcacgccaaccucgacagcugcaagcgggugcugaacgucgugugcaagaccugcgggcagcagcagaccacccugaagggcguggaggccgucauguacauggggacgcucuccuacgagcaguucaagaagggcgugcagauccccugcacgugcgggaagcaggccaccaaguaccuggugcagcaggagagccccuucgucaugauguccgcgcccccggcccaguacgagcugaagcacggcaccuucacgugcgccagcgaguacaccggcaacuaccagugcgggcacuacaagcacaucaccuccaaggagacccucuacugcaucgacggcgcccugcugaccaagagcagcgaguacaaggggcccaucaccgacguguucuacaaggagaacuccuacaccaccacgaucaagcccgugaccuacaagcucgacggcgucgugugcaccgagaucgaccccaagcuggacaacuacuacaagaaggacaacagcuacuucaccgagcagccgaucgaccuggugcccaaccagcccuaccccaacgccuccuucgacaacuucaaguucgucugcgacaacaucaaguucgccgacgaccucaaccagcugacgggguacaagaagccggcgagccgcgagcugaaggugaccuucuuccccgaccucaacggcgacguggucgccaucgacuacaagcacuacacccccuccuucaagaagggcgccaagcugcugcacaagcccaucguguggcacgugaacaacgccaccaacaaggcgacguacaagccgaacaccuggugcauccggugccucuggagcaccaagcccgucgagaccuccaacagcuucgacgugcugaaguccgaggacgcccaggggauggacaaccuggccugcgaggaccucaagcccgugagcgaggaggucguggagaaccccacgauccagaaggacgugcuggagugcaacgucaagaccaccgagguggugggcgacaucauccugaagccggccaacaacucccucaagaucaccgaggaggucgggcacacggaccugauggccgcguacguggacaacagcucccugaccaucaagaagcccaacgagcucagccgcgugcugggccugaagacccucgccacccacgggcuggccgccgucaacuccgugcccugggacacgaucgccaacuacgcgaagccguuccugaacaagguggucagcaccaccaccaacaucgugacgcgcugccucaaccgggugugcaccaacuacaugcccuacuucuucacccugcugcuccagcugugcaccuucacgcgcuccaccaacagccggaucaaggccuccaugcccaccaccaucgccaagaacaccgucaagagcgugggcaaguucugccuggaggccagcuucaacuaccucaagucccccaacuucagcaagcugaucaacaucaucaucugguuccugcuccuguccgugugccugggcagccucaucuacuccacggccgcgcuggggguccugaugagcaaccucggcaugccguccuacugcaccggguaccgcgagggcuaccugaacagcaccaacgugaccaucgccacguacugcaccggcuccauccccugcagcgugugccuguccgggcucgacagccuggacaccuaccccucccuggagaccauccagaucacgaucagcuccuucaagugggaccucaccgccuucggccuggucgccgagugguuccuggccuacauccucuucacccgguucuucuacgugcuggggcuggcggccaucaugcagcuguucuucagcuacuucgccgugcacuucaucuccaacagcuggcucauguggcugaucaucaaccugguccagauggcccccaucuccgcgauggugcgcauguacaucuucuucgccagcuucuacuacguguggaaguccuacguccacgugguggacggcugcaacagcagcacgugcaugaugugcuacaagcggaaccgcgccacgcgggucgagugcaccaccaucgugaacgggguccgccgguccuucuacguguacgccaacggcggcaagggguucugcaagcuccacaacuggaacugcgugaacugcgacaccuucugcgccggcagcacguucaucuccgacgaggucgcgcgcgaccugagccugcaguucaagcggccgaucaaccccaccgaccaguccagcuacaucguggacuccgugaccgucaagaacgggagcauccaccucuacuucgacaaggccggccagaagaccuacgagcgccacucccugagccacuucgugaaccuggacaaccuccgggccaacaacacgaaggggucccugcccaucaacgugaucgucuucgacggcaagagcaagugcgaggaguccagcgccaaguccgccagcguguacuacucccagcugaugugccagcccauccuccugcuggaccaggcgcucgugagcgacgucggcgacagcgccgagguggccgugaagauguucgacgccuacgucaacaccuucuccagcaccuucaacgugccgauggagaagcugaagacccugguggccacggcggaggccgagcucgccaagaacgucucccuggacaacgugcugagcaccuucaucuccgccgcgcgccagggguucguggacagcgacgucgagaccaaggacgugguggagugccucaagcugucccaccagagcgacaucgaggucaccggcgacuccugcaacaacuacaugcugacguacaacaagguggagaacaugacgccccgggaccucggggccugcaucgacugcagcgcccgccacaucaacgcccagguggccaagucccacaacaucgcgcugaucuggaacgucaaggacuucaugagccuguccgagcagcuccggaagcagauccgcagcgccgccaagaagaacaaccugcccuucaagcugaccugcgccaccacccgccagguggugaacgucgugaccaccaagaucgcccucaagggcggguga

SEQ ID NO: 28085 - RNA, 5841 nt, Artificial Sequence
  SARS-CoV-2/Wuhan-Hu-1__NC_045512.2/MN908947.2__non-structural protein 3 (NSP3) CDS gc (1-1946)(T1190I)
auggcccccaccaaggugaccuucggcgacgacaccgucaucgaggugcagggguacaagagcgugaacaucaccuucgagcuggacgagcgcaucgacaagguccucaacgagaagugcuccgccuacaccguggagcugggcaccgaggugaacgaguucgcgugcgucguggccgacgccgugaucaagacgcugcagccggucagcgagcuccugacgccccuggggaucgaccucgacgagugguccauggccaccuacuaccuguucgacgagagcggcgaguucaagcuggccucccacauguacugcagcuucuacccgcccgacgaggacgaggaggagggggacugcgaggaggaggaguucgagcccuccacccaguacgaguacggcacggaggacgacuaccagggcaagccccucgaguucggggcgaccagcgccgcccugcagcccgaggaggagcaggaggaggacuggcuggacgacgacucccagcagaccgugggccagcaggacgggagcgaggacaaccagaccacgaccauccagaccaucguggagguccagccccagcucgagauggagcugaccccgguggugcagacgaucgaggucaacuccuucagcggcuaccugaagcucaccgacaacguguacaucaagaacgccgacaucguggaggaggcgaagaaggucaagcccaccgugguggucaacgccgccaacguguaccugaagcacgggggcggcguggccggggcccugaacaaggcgaccaacaacgccaugcaggucgaguccgacgacuacaucgccacgaacggcccccucaaggucgggggcagcugcgugcuguccggccacaaccuggccaagcacugccuccacgugguggggcccaacgucaacaagggcgaggacauccagcugcucaagagcgccuacgagaacuucaaccagcacgaggugcugcuggcgccgcugcucuccgccgggaucuucggcgccgaccccauccacagccugcgggugugcgucgacaccgugcgcaccaacguguaccuggccgucuucgacaagaaccucuacgacaagcugguguccagcuuccuggagaugaaguccgagaagcaggucgagcagaagaucgccgagauccccaaggaggaggugaagcccuucaucaccgagagcaagccgagcguggagcagcggaagcaggacgacaagaagaucaaggcgugcguggaggaggucacgaccacccucgaggagaccaaguuccugacggagaaccugcuccuguacaucgacaucaacgggaaccugcaccccgacuccgccacccucgugagcgacaucgacaucaccuuccugaagaaggacgcccccuacaucgugggcgacgucgugcaggagggcgugcugaccgccgucgugauccccacgaagaaggccgggggcaccaccgagaugcucgcgaaggcccugcgcaaggugccgaccgacaacuacaucacgaccuaccccgggcagggccugaacggguacaccgucgaggaggccaagaccgugcucaagaagugcaaguccgccuucuacauccugcccagcaucaucuccaacgagaagcaggagauccugggcaccgugagcuggaaccugcgggagaugcucgcgcacgccgaggagacgcgcaagcugaugcccgucugcguggagaccaaggccaucguguccaccauccagcggaaguacaagggcaucaagauccaggagggggucguggacuacggcgcccgcuucuacuucuacaccagcaagacgaccguggccucccugaucaacacccucaacgaccugaacgagacccuggucacgaugccgcucggguacgugacccacggccugaaccuggaggaggcggcccgguacaugcgcagccucaaggugcccgccaccgucuccgugagcucccccgacgccgugaccgccuacaacggguaccugacgagcuccagcaagacccccgaggagcacuucaucgagaccaucucccuggcgggcagcuacaaggacuggagcuacuccggccagagcacccagcucgggaucgaguuccugaagcggggcgacaaguccgucuacuacacgagcaacccgaccaccuuccaccuggacggggaggugaucaccuucgacaaccucaagacgcugcugucccuccgcgaggugcggaccaucaaggucuucaccaccguggacaacaucaaccugcacacccagguggucgacaugagcaugaccuacggccagcaguucggccccaccuaccuggacggggccgacgugaccaagaucaagccccacaacucccacgagggcaagacguucuacgugcucccgaacgacgacacccugcgcgucgaggccuucgaguacuaccacaccaccgaccccagcuuccuggggcgguacauguccgcccucaaccacacgaagaaguggaaguacccccaggugaacggccugaccagcaucaagugggccgacaacaacugcuaccuggcgaccgcccuccugacccugcagcagaucgagcucaaguucaacccgcccgcccugcaggacgccuacuaccgcgcgcgggccggggaggccgccaacuucugcgcccugauccucgcguacugcaacaagacggugggcgagcugggcgacguccgcgagaccauguccuaccuguuccagcacgccaaccucgacagcugcaagcgggugcugaacgucgugugcaagaccugcgggcagcagcagaccacccugaagggcguggaggccgucauguacauggggacgcucuccuacgagcaguucaagaagggcgugcagauccccugcacgugcgggaagcaggccaccaaguaccuggugcagcaggagagccccuucgucaugauguccgcgcccccggcccaguacgagcugaagcacggcaccuucacgugcgccagcgaguacaccggcaacuaccagugcgggcacuacaagcacaucaccuccaaggagacccucuacugcaucgacggcgcccugcugaccaagagcagcgaguacaaggggcccaucaccgacguguucuacaaggagaacuccuacaccaccacgaucaagcccgugaccuacaagcucgacggcgucgugugcaccgagaucgaccccaagcuggacaacuacuacaagaaggacaacagcuacuucaccgagcagccgaucgaccuggugcccaaccagcccuaccccaacgccuccuucgacaacuucaaguucgucugcgacaacaucaaguucgccgacgaccucaaccagcugacgggguacaagaagccggcgagccgcgagcugaaggugaccuucuuccccgaccucaacggcgacguggucgccaucgacuacaagcacuacacccccuccuucaagaagggcgccaagcugcugcacaagcccaucguguggcacgugaacaacgccaccaacaaggcgacguacaagccgaacaucuggugcauccggugccucuggagcaccaagcccgucgagaccuccaacagcuucgacgugcugaaguccgaggacgcccaggggauggacaaccuggccugcgaggaccucaagcccgugagcgaggaggucguggagaaccccacgauccagaaggacgugcuggagugcaacgucaagaccaccgagguggugggcgacaucauccugaagccggccaacaacucccucaagaucaccgaggaggucgggcacacggaccugauggccgcguacguggacaacagcucccugaccaucaagaagcccaacgagcucagccgcgugcugggccugaagacccucgccacccacgggcuggccgccgucaacuccgugcccugggacacgaucgccaacuacgcgaagccguuccugaacaagguggucagcaccaccaccaacaucgugacgcgcugccucaaccgggugugcaccaacuacaugcccuacuucuucacccugcugcuccagcugugcaccuucacgcgcuccaccaacagccggaucaaggccuccaugcccaccaccaucgccaagaacaccgucaagagcgugggcaaguucugccuggaggccagcuucaacuaccucaagucccccaacuucagcaagcugaucaacaucaucaucugguuccugcuccuguccgugugccugggcagccucaucuacuccacggccgcgcuggggguccugaugagcaaccucggcaugccguccuacugcaccggguaccgcgagggcuaccugaacagcaccaacgugaccaucgccacguacugcaccggcuccauccccugcagcgugugccuguccgggcucgacagccuggacaccuaccccucccuggagaccauccagaucacgaucagcuccuucaagugggaccucaccgccuucggccuggucgccgagugguuccuggccuacauccucuucacccgguucuucuacgugcuggggcuggcggccaucaugcagcuguucuucagcuacuucgccgugcacuucaucuccaacagcuggcucauguggcugaucaucaaccugguccagauggcccccaucuccgcgauggugcgcauguacaucuucuucgccagcuucuacuacguguggaaguccuacguccacgugguggacggcugcaacagcagcacgugcaugaugugcuacaagcggaaccgcgccacgcgggucgagugcaccaccaucgugaacgggguccgccgguccuucuacguguacgccaacggcggcaagggguucugcaagcuccacaacuggaacugcgugaacugcgacaccuucugcgccggcagcacguucaucuccgacgaggucgcgcgcgaccugagccugcaguucaagcggccgaucaaccccaccgaccaguccagcuacaucguggacuccgugaccgucaagaacgggagcauccaccucuacuucgacaaggccggccagaagaccuacgagcgccacucccugagccacuucgugaaccuggacaaccuccgggccaacaacacgaaggggucccugcccaucaacgugaucgucuucgacggcaagagcaagugcgaggaguccagcgccaaguccgccagcguguacuacucccagcugaugugccagcccauccuccugcuggaccaggcgcucgugagcgacgucggcgacagcgccgagguggccgugaagauguucgacgccuacgucaacaccuucuccagcaccuucaacgugccgauggagaagcugaagacccugguggccacggcggaggccgagcucgccaagaacgucucccuggacaacgugcugagcaccuucaucuccgccgcgcgccagggguucguggacagcgacgucgagaccaaggacgugguggagugccucaagcugucccaccagagcgacaucgaggucaccggcgacuccugcaacaacuacaugcugacguacaacaagguggagaacaugacgccccgggaccucggggccugcaucgacugcagcgcccgccacaucaacgcccagguggccaagucccacaacaucgcgcugaucuggaacgucaaggacuucaugagccuguccgagcagcuccggaagcagauccgcagcgccgccaagaagaacaaccugcccuucaagcugaccugcgccaccacccgccagguggugaacgucgugaccaccaagaucgcccucaagggcggguga

SEQ ID NO: 28086 - RNA, 5841 nt, Artificial Sequence
  SARS-CoV-2/Wuhan-Hu-1__NC_045512.2/MN908947.2__non-structural protein 3 (NSP3) CDS gc (1-1946)(A1527V_T1831I)
auggcccccaccaaggugaccuucggcgacgacaccgucaucgaggugcagggguacaagagcgugaacaucaccuucgagcuggacgagcgcaucgacaagguccucaacgagaagugcuccgccuacaccguggagcugggcaccgaggugaacgaguucgcgugcgucguggccgacgccgugaucaagacgcugcagccggucagcgagcuccugacgccccuggggaucgaccucgacgagugguccauggccaccuacuaccuguucgacgagagcggcgaguucaagcuggccucccacauguacugcagcuucuacccgcccgacgaggacgaggaggagggggacugcgaggaggaggaguucgagcccuccacccaguacgaguacggcacggaggacgacuaccagggcaagccccucgaguucggggcgaccagcgccgcccugcagcccgaggaggagcaggaggaggacuggcuggacgacgacucccagcagaccgugggccagcaggacgggagcgaggacaaccagaccacgaccauccagaccaucguggagguccagccccagcucgagauggagcugaccccgguggugcagacgaucgaggucaacuccuucagcggcuaccugaagcucaccgacaacguguacaucaagaacgccgacaucguggaggaggcgaagaaggucaagcccaccgugguggucaacgccgccaacguguaccugaagcacgggggcggcguggccggggcccugaacaaggcgaccaacaacgccaugcaggucgaguccgacgacuacaucgccacgaacggcccccucaaggucgggggcagcugcgugcuguccggccacaaccuggccaagcacugccuccacgugguggggcccaacgucaacaagggcgaggacauccagcugcucaagagcgccuacgagaacuucaaccagcacgaggugcugcuggcgccgcugcucuccgccgggaucuucggcgccgaccccauccacagccugcgggugugcgucgacaccgugcgcaccaacguguaccuggccgucuucgacaagaaccucuacgacaagcugguguccagcuuccuggagaugaaguccgagaagcaggucgagcagaagaucgccgagauccccaaggaggaggugaagcccuucaucaccgagagcaagccgagcguggagcagcggaagcaggacgacaagaagaucaaggcgugcguggaggaggucacgaccacccucgaggagaccaaguuccugacggagaaccugcuccuguacaucgacaucaacgggaaccugcaccccgacuccgccacccucgugagcgacaucgacaucaccuuccugaagaaggacgcccccuacaucgugggcgacgucgugcaggagggcgugcugaccgccgucgugauccccacgaagaaggccgggggcaccaccgagaugcucgcgaaggcccugcgcaaggugccgaccgacaacuacaucacgaccuaccccgggcagggccugaacggguacaccgucgaggaggccaagaccgugcucaagaagugcaaguccgccuucuacauccugcccagcaucaucuccaacgagaagcaggagauccugggcaccgugagcuggaaccugcgggagaugcucgcgcacgccgaggagacgcgcaagcugaugcccgucugcguggagaccaaggccaucguguccaccauccagcggaaguacaagggcaucaagauccaggagggggucguggacuacggcgcccgcuucuacuucuacaccagcaagacgaccguggccucccugaucaacacccucaacgaccugaacgagacccuggucacgaugccgcucggguacgugacccacggccugaaccuggaggaggcggcccgguacaugcgcagccucaaggugcccgccaccgucuccgugagcucccccgacgccgugaccgccuacaacggguaccugacgagcuccagcaagacccccgaggagcacuucaucgagaccaucucccuggcgggcagcuacaaggacuggagcuacuccggccagagcacccagcucgggaucgaguuccugaagcggggcgacaaguccgucuacuacacgagcaacccgaccaccuuccaccuggacggggaggugaucaccuucgacaaccucaagacgcugcugucccuccgcgaggugcggaccaucaaggucuucaccaccguggacaacaucaaccugcacacccagguggucgacaugagcaugaccuacggccagcaguucggccccaccuaccuggacggggccgacgugaccaagaucaagccccacaacucccacgagggcaagacguucuacgugcucccgaacgacgacacccugcgcgucgaggccuucgaguacuaccacaccaccgaccccagcuuccuggggcgguacauguccgcccucaaccacacgaagaaguggaaguacccccaggugaacggccugaccagcaucaagugggccgacaacaacugcuaccuggcgaccgcccuccugacccugcagcagaucgagcucaaguucaacccgcccgcccugcaggacgccuacuaccgcgcgcgggccggggaggccgccaacuucugcgcccugauccucgcguacugcaacaagacggugggcgagcugggcgacguccgcgagaccauguccuaccuguuccagcacgccaaccucgacagcugcaagcgggugcugaacgucgugugcaagaccugcgggcagcagcagaccacccugaagggcguggaggccgucauguacauggggacgcucuccuacgagcaguucaagaagggcgugcagauccccugcacgugcgggaagcaggccaccaaguaccuggugcagcaggagagccccuucgucaugauguccgcgcccccggcccaguacgagcugaagcacggcaccuucacgugcgccagcgaguacaccggcaacuaccagugcgggcacuacaagcacaucaccuccaaggagacccucuacugcaucgacggcgcccugcugaccaagagcagcgaguacaaggggcccaucaccgacguguucuacaaggagaacuccuacaccaccacgaucaagcccgugaccuacaagcucgacggcgucgugugcaccgagaucgaccccaagcuggacaacuacuacaagaaggacaacagcuacuucaccgagcagccgaucgaccuggugcccaaccagcccuaccccaacgccuccuucgacaacuucaaguucgucugcgacaacaucaaguucgccgacgaccucaaccagcugacgggguacaagaagccggcgagccgcgagcugaaggugaccuucuuccccgaccucaacggcgacguggucgccaucgacuacaagcacuacacccccuccuucaagaagggcgccaagcugcugcacaagcccaucguguggcacgugaacaacgccaccaacaaggcgacguacaagccgaacaccuggugcauccggugccucuggagcaccaagcccgucgagaccuccaacagcuucgacgugcugaaguccgaggacgcccaggggauggacaaccuggccugcgaggaccucaagcccgugagcgaggaggucguggagaaccccacgauccagaaggacgugcuggagugcaacgucaagaccaccgagguggugggcgacaucauccugaagccggccaacaacucccucaagaucaccgaggaggucgggcacacggaccugauggccgcguacguggacaacagcucccugaccaucaagaagcccaacgagcucagccgcgugcugggccugaagacccucgccacccacgggcuggccgccgucaacuccgugcccugggacacgaucgccaacuacgcgaagccguuccugaacaagguggucagcaccaccaccaacaucgugacgcgcugccucaaccgggugugcaccaacuacaugcccuacuucuucacccugcugcuccagcugugcaccuucacgcgcuccaccaacagccggaucaaggccuccaugcccaccaccaucgccaagaacaccgucaagagcgugggcaaguucugccuggaggccagcuucaacuaccucaagucccccaacuucagcaagcugaucaacaucaucaucugguuccugcuccuguccgugugccugggcagccucaucuacuccacggccgcgcuggggguccugaugagcaaccucggcaugccguccuacugcaccggguaccgcgagggcuaccugaacagcaccaacgugaccaucgccacguacugcaccggcuccauccccugcagcgugugccuguccgggcucgacagccuggacaccuaccccucccuggagaccauccagaucacgaucagcuccuucaagugggaccucaccgccuucggccuggucgccgagugguuccuggccuacauccucuucacccgguucuucuacgugcuggggcugguggccaucaugcagcuguucuucagcuacuucgccgugcacuucaucuccaacagcuggcucauguggcugaucaucaaccugguccagauggcccccaucuccgcgauggugcgcauguacaucuucuucgccagcuucuacuacguguggaaguccuacguccacgugguggacggcugcaacagcagcacgugcaugaugugcuacaagcggaaccgcgccacgcgggucgagugcaccaccaucgugaacgggguccgccgguccuucuacguguacgccaacggcggcaagggguucugcaagcuccacaacuggaacugcgugaacugcgacaccuucugcgccggcagcacguucaucuccgacgaggucgcgcgcgaccugagccugcaguucaagcggccgaucaaccccaccgaccaguccagcuacaucguggacuccgugaccgucaagaacgggagcauccaccucuacuucgacaaggccggccagaagaccuacgagcgccacucccugagccacuucgugaaccuggacaaccuccgggccaacaacacgaaggggucccugcccaucaacgugaucgucuucgacggcaagagcaagugcgaggaguccagcgccaaguccgccagcguguacuacucccagcugaugugccagcccauccuccugcuggaccaggcgcucgugagcgacgucggcgacagcgccgagguggccgugaagauguucgacgccuacgucaacaccuucuccagcaccuucaacgugccgauggagaagcugaagacccugguggccacggcggaggccgagcucgccaagaacgucucccuggacaacgugcugagcaccuucaucuccgccgcgcgccagggguucguggacagcgacgucgagaucaaggacgugguggagugccucaagcugucccaccagagcgacaucgaggucaccggcgacuccugcaacaacuacaugcugacguacaacaagguggagaacaugacgccccgggaccucggggccugcaucgacugcagcgcccgccacaucaacgcccagguggccaagucccacaacaucgcgcugaucuggaacgucaaggacuucaugagccuguccgagcagcuccggaagcagauccgcagcgccgccaagaagaacaaccugcccuucaagcugaccugcgccaccacccgccagguggugaacgucgugaccaccaagaucgcccucaagggcggguga

SEQ ID NO: 28087 - RNA, 5841 nt, Artificial Sequence
  SARS-CoV-2/Wuhan-Hu-1__NC_045512.2/MN908947.2__non-structural protein 3 (NSP3) CDS gc (1-1946)(A86V_A656V_I1022V_E1847D)
auggcccccaccaaggugaccuucggcgacgacaccgucaucgaggugcagggguacaagagcgugaacaucaccuucgagcuggacgagcgcaucgacaagguccucaacgagaagugcuccgccuacaccguggagcugggcaccgaggugaacgaguucgcgugcgucguggccgacgccgugaucaagacgcugcagccggucagcgagcuccugacgccccuggggaucgaccucgacgagugguccauggugaccuacuaccuguucgacgagagcggcgaguucaagcuggccucccacauguacugcagcuucuacccgcccgacgaggacgaggaggagggggacugcgaggaggaggaguucgagcccuccacccaguacgaguacggcacggaggacgacuaccagggcaagccccucgaguucggggcgaccagcgccgcccugcagcccgaggaggagcaggaggaggacuggcuggacgacgacucccagcagaccgugggccagcaggacgggagcgaggacaaccagaccacgaccauccagaccaucguggagguccagccccagcucgagauggagcugaccccgguggugcagacgaucgaggucaacuccuucagcggcuaccugaagcucaccgacaacguguacaucaagaacgccgacaucguggaggaggcgaagaaggucaagcccaccgugguggucaacgccgccaacguguaccugaagcacgggggcggcguggccggggcccugaacaaggcgaccaacaacgccaugcaggucgaguccgacgacuacaucgccacgaacggcccccucaaggucgggggcagcugcgugcuguccggccacaaccuggccaagcacugccuccacgugguggggcccaacgucaacaagggcgaggacauccagcugcucaagagcgccuacgagaacuucaaccagcacgaggugcugcuggcgccgcugcucuccgccgggaucuucggcgccgaccccauccacagccugcgggugugcgucgacaccgugcgcaccaacguguaccuggccgucuucgacaagaaccucuacgacaagcugguguccagcuuccuggagaugaaguccgagaagcaggucgagcagaagaucgccgagauccccaaggaggaggugaagcccuucaucaccgagagcaagccgagcguggagcagcggaagcaggacgacaagaagaucaaggcgugcguggaggaggucacgaccacccucgaggagaccaaguuccugacggagaaccugcuccuguacaucgacaucaacgggaaccugcaccccgacuccgccacccucgugagcgacaucgacaucaccuuccugaagaaggacgcccccuacaucgugggcgacgucgugcaggagggcgugcugaccgccgucgugauccccacgaagaaggccgggggcaccaccgagaugcucgcgaaggcccugcgcaaggugccgaccgacaacuacaucacgaccuaccccgggcagggccugaacggguacaccgucgaggaggccaagaccgugcucaagaagugcaaguccgccuucuacauccugcccagcaucaucuccaacgagaagcaggagauccugggcaccgugagcuggaaccugcgggagaugcucgcgcacgccgaggagacgcgcaagcugaugcccgucugcguggagaccaaggccaucguguccaccauccagcggaaguacaagggcaucaagauccaggagggggucguggacuacggcgcccgcuucuacuucuacaccagcaagacgaccguggccucccugaucaacacccucaacgaccugaacgagacccuggucacgaugccgcucggguacgugacccacggccugaaccuggaggaggcggcccgguacaugcgcagccucaaggugcccgugaccgucuccgugagcucccccgacgccgugaccgccuacaacggguaccugacgagcuccagcaagacccccgaggagcacuucaucgagaccaucucccuggcgggcagcuacaaggacuggagcuacuccggccagagcacccagcucgggaucgaguuccugaagcggggcgacaaguccgucuacuacacgagcaacccgaccaccuuccaccuggacggggaggugaucaccuucgacaaccucaagacgcugcugucccuccgcgaggugcggaccaucaaggucuucaccaccguggacaacaucaaccugcacacccagguggucgacaugagcaugaccuacggccagcaguucggccccaccuaccuggacggggccgacgugaccaagaucaagccccacaacucccacgagggcaagacguucuacgugcucccgaacgacgacacccugcgcgucgaggccuucgaguacuaccacaccaccgaccccagcuuccuggggcgguacauguccgcccucaaccacacgaagaaguggaaguacccccaggugaacggccugaccagcaucaagugggccgacaacaacugcuaccuggcgaccgcccuccugacccugcagcagaucgagcucaaguucaacccgcccgcccugcaggacgccuacuaccgcgcgcgggccggggaggccgccaacuucugcgcccugauccucgcguacugcaacaagacggugggcgagcugggcgacguccgcgagaccauguccuaccuguuccagcacgccaaccucgacagcugcaagcgggugcugaacgucgugugcaagaccugcgggcagcagcagaccacccugaagggcguggaggccgucauguacauggggacgcucuccuacgagcaguucaagaagggcgugcagauccccugcacgugcgggaagcaggccaccaaguaccuggugcagcaggagagccccuucgucaugauguccgcgcccccggcccaguacgagcugaagcacggcaccuucacgugcgccagcgaguacaccggcaacuaccagugcgggcacuacaagcacgugaccuccaaggagacccucuacugcaucgacggcgcccugcugaccaagagcagcgaguacaaggggcccaucaccgacguguucuacaaggagaacuccuacaccaccacgaucaagcccgugaccuacaagcucgacggcgucgugugcaccgagaucgaccccaagcuggacaacuacuacaagaaggacaacagcuacuucaccgagcagccgaucgaccuggugcccaaccagcccuaccccaacgccuccuucgacaacuucaaguucgucugcgacaacaucaaguucgccgacgaccucaaccagcugacgggguacaagaagccggcgagccgcgagcugaaggugaccuucuuccccgaccucaacggcgacguggucgccaucgacuacaagcacuacacccccuccuucaagaagggcgccaagcugcugcacaagcccaucguguggcacgugaacaacgccaccaacaaggcgacguacaagccgaacaccuggugcauccggugccucuggagcaccaagcccgucgagaccuccaacagcuucgacgugcugaaguccgaggacgcccaggggauggacaaccuggccugcgaggaccucaagcccgugagcgaggaggucguggagaaccccacgauccagaaggacgugcuggagugcaacgucaagaccaccgagguggugggcgacaucauccugaagccggccaacaacucccucaagaucaccgaggaggucgggcacacggaccugauggccgcguacguggacaacagcucccugaccaucaagaagcccaacgagcucagccgcgugcugggccugaagacccucgccacccacgggcuggccgccgucaacuccgugcccugggacacgaucgccaacuacgcgaagccguuccugaacaagguggucagcaccaccaccaacaucgugacgcgcugccucaaccgggugugcaccaacuacaugcccuacuucuucacccugcugcuccagcugugcaccuucacgcgcuccaccaacagccggaucaaggccuccaugcccaccaccaucgccaagaacaccgucaagagcgugggcaaguucugccuggaggccagcuucaacuaccucaagucccccaacuucagcaagcugaucaacaucaucaucugguuccugcuccuguccgugugccugggcagccucaucuacuccacggccgcgcuggggguccugaugagcaaccucggcaugccguccuacugcaccggguaccgcgagggcuaccugaacagcaccaacgugaccaucgccacguacugcaccggcuccauccccugcagcgugugccuguccgggcucgacagccuggacaccuaccccucccuggagaccauccagaucacgaucagcuccuucaagugggaccucaccgccuucggccuggucgccgagugguuccuggccuacauccucuucacccgguucuucuacgugcuggggcuggcggccaucaugcagcuguucuucagcuacuucgccgugcacuucaucuccaacagcuggcucauguggcugaucaucaaccugguccagauggcccccaucuccgcgauggugcgcauguacaucuucuucgccagcuucuacuacguguggaaguccuacguccacgugguggacggcugcaacagcagcacgugcaugaugugcuacaagcggaaccgcgccacgcgggucgagugcaccaccaucgugaacgggguccgccgguccuucuacguguacgccaacggcggcaagggguucugcaagcuccacaacuggaacugcgugaacugcgacaccuucugcgccggcagcacguucaucuccgacgaggucgcgcgcgaccugagccugcaguucaagcggccgaucaaccccaccgaccaguccagcuacaucguggacuccgugaccgucaagaacgggagcauccaccucuacuucgacaaggccggccagaagaccuacgagcgccacucccugagccacuucgugaaccuggacaaccuccgggccaacaacacgaaggggucccugcccaucaacgugaucgucuucgacggcaagagcaagugcgaggaguccagcgccaaguccgccagcguguacuacucccagcugaugugccagcccauccuccugcuggaccaggcgcucgugagcgacgucggcgacagcgccgagguggccgugaagauguucgacgccuacgucaacaccuucuccagcaccuucaacgugccgauggagaagcugaagacccugguggccacggcggaggccgagcucgccaagaacgucucccuggacaacgugcugagcaccuucaucuccgccgcgcgccagggguucguggacagcgacgucgagaccaaggacgugguggagugccucaagcugucccaccagagcgacaucgacgucaccggcgacuccugcaacaacuacaugcugacguacaacaagguggagaacaugacgccccgggaccucggggccugcaucgacugcagcgcccgccacaucaacgcccagguggccaagucccacaacaucgcgcugaucuggaacgucaaggacuucaugagccuguccgagcagcuccggaagcagauccgcagcgccgccaagaagaacaaccugcccuucaagcugaccugcgccaccacccgccagguggugaacgucgugaccaccaagaucgcccucaagggcggguga

SEQ ID NO: 28088 - RNA, 5841 nt, Artificial Sequence
  SARS-CoV-2/Wuhan-Hu-1__NC_045512.2/MN908947.2__non-structural protein 3 (NSP3) CDS gc (1-1946)(D136N_E379V_K1694N)
auggcccccaccaaggugaccuucggcgacgacaccgucaucgaggugcagggguacaagagcgugaacaucaccuucgagcuggacgagcgcaucgacaagguccucaacgagaagugcuccgccuacaccguggagcugggcaccgaggugaacgaguucgcgugcgucguggccgacgccgugaucaagacgcugcagccggucagcgagcuccugacgccccuggggaucgaccucgacgagugguccauggccaccuacuaccuguucgacgagagcggcgaguucaagcuggccucccacauguacugcagcuucuacccgcccgacgaggacgaggaggagggggacugcgaggaggaggaguucgagcccuccacccaguacgaguacggcacggagaacgacuaccagggcaagccccucgaguucggggcgaccagcgccgcccugcagcccgaggaggagcaggaggaggacuggcuggacgacgacucccagcagaccgugggccagcaggacgggagcgaggacaaccagaccacgaccauccagaccaucguggagguccagccccagcucgagauggagcugaccccgguggugcagacgaucgaggucaacuccuucagcggcuaccugaagcucaccgacaacguguacaucaagaacgccgacaucguggaggaggcgaagaaggucaagcccaccgugguggucaacgccgccaacguguaccugaagcacgggggcggcguggccggggcccugaacaaggcgaccaacaacgccaugcaggucgaguccgacgacuacaucgccacgaacggcccccucaaggucgggggcagcugcgugcuguccggccacaaccuggccaagcacugccuccacgugguggggcccaacgucaacaagggcgaggacauccagcugcucaagagcgccuacgagaacuucaaccagcacgaggugcugcuggcgccgcugcucuccgccgggaucuucggcgccgaccccauccacagccugcgggugugcgucgacaccgugcgcaccaacguguaccuggccgucuucgacaagaaccucuacgacaagcugguguccagcuuccuggagaugaaguccgugaagcaggucgagcagaagaucgccgagauccccaaggaggaggugaagcccuucaucaccgagagcaagccgagcguggagcagcggaagcaggacgacaagaagaucaaggcgugcguggaggaggucacgaccacccucgaggagaccaaguuccugacggagaaccugcuccuguacaucgacaucaacgggaaccugcaccccgacuccgccacccucgugagcgacaucgacaucaccuuccugaagaaggacgcccccuacaucgugggcgacgucgugcaggagggcgugcugaccgccgucgugauccccacgaagaaggccgggggcaccaccgagaugcucgcgaaggcccugcgcaaggugccgaccgacaacuacaucacgaccuaccccgggcagggccugaacggguacaccgucgaggaggccaagaccgugcucaagaagugcaaguccgccuucuacauccugcccagcaucaucuccaacgagaagcaggagauccugggcaccgugagcuggaaccugcgggagaugcucgcgcacgccgaggagacgcgcaagcugaugcccgucugcguggagaccaaggccaucguguccaccauccagcggaaguacaagggcaucaagauccaggagggggucguggacuacggcgcccgcuucuacuucuacaccagcaagacgaccguggccucccugaucaacacccucaacgaccugaacgagacccuggucacgaugccgcucggguacgugacccacggccugaaccuggaggaggcggcccgguacaugcgcagccucaaggugcccgccaccgucuccgugagcucccccgacgccgugaccgccuacaacggguaccugacgagcuccagcaagacccccgaggagcacuucaucgagaccaucucccuggcgggcagcuacaaggacuggagcuacuccggccagagcacccagcucgggaucgaguuccugaagcggggcgacaaguccgucuacuacacgagcaacccgaccaccuuccaccuggacggggaggugaucaccuucgacaaccucaagacgcugcugucccuccgcgaggugcggaccaucaaggucuucaccaccguggacaacaucaaccugcacacccagguggucgacaugagcaugaccuacggccagcaguucggccccaccuaccuggacggggccgacgugaccaagaucaagccccacaacucccacgagggcaagacguucuacgugcucccgaacgacgacacccugcgcgucgaggccuucgaguacuaccacaccaccgaccccagcuuccuggggcgguacauguccgcccucaaccacacgaagaaguggaaguacccccaggugaacggccugaccagcaucaagugggccgacaacaacugcuaccuggcgaccgcccuccugacccugcagcagaucgagcucaaguucaacccgcccgcccugcaggacgccuacuaccgcgcgcgggccggggaggccgccaacuucugcgcccugauccucgcguacugcaacaagacggugggcgagcugggcgacguccgcgagaccauguccuaccuguuccagcacgccaaccucgacagcugcaagcgggugcugaacgucgugugcaagaccugcgggcagcagcagaccacccugaagggcguggaggccgucauguacauggggacgcucuccuacgagcaguucaagaagggcgugcagauccccugcacgugcgggaagcaggccaccaaguaccuggugcagcaggagagccccuucgucaugauguccgcgcccccggcccaguacgagcugaagcacggcaccuucacgugcgccagcgaguacaccggcaacuaccagugcgggcacuacaagcacaucaccuccaaggagacccucuacugcaucgacggcgcccugcugaccaagagcagcgaguacaaggggcccaucaccgacguguucuacaaggagaacuccuacaccaccacgaucaagcccgugaccuacaagcucgacggcgucgugugcaccgagaucgaccccaagcuggacaacuacuacaagaaggacaacagcuacuucaccgagcagccgaucgaccuggugcccaaccagcccuaccccaacgccuccuucgacaacuucaaguucgucugcgacaacaucaaguucgccgacgaccucaaccagcugacgggguacaagaagccggcgagccgcgagcugaaggugaccuucuuccccgaccucaacggcgacguggucgccaucgacuacaagcacuacacccccuccuucaagaagggcgccaagcugcugcacaagcccaucguguggcacgugaacaacgccaccaacaaggcgacguacaagccgaacaccuggugcauccggugccucuggagcaccaagcccgucgagaccuccaacagcuucgacgugcugaaguccgaggacgcccaggggauggacaaccuggccugcgaggaccucaagcccgugagcgaggaggucguggagaaccccacgauccagaaggacgugcuggagugcaacgucaagaccaccgagguggugggcgacaucauccugaagccggccaacaacucccucaagaucaccgaggaggucgggcacacggaccugauggccgcguacguggacaacagcucccugaccaucaagaagcccaacgagcucagccgcgugcugggccugaagacccucgccacccacgggcuggccgccgucaacuccgugcccugggacacgaucgccaacuacgcgaagccguuccugaacaagguggucagcaccaccaccaacaucgugacgcgcugccucaaccgggugugcaccaacuacaugcccuacuucuucacccugcugcuccagcugugcaccuucacgcgcuccaccaacagccggaucaaggccuccaugcccaccaccaucgccaagaacaccgucaagagcgugggcaaguucugccuggaggccagcuucaacuaccucaagucccccaacuucagcaagcugaucaacaucaucaucugguuccugcuccuguccgugugccugggcagccucaucuacuccacggccgcgcuggggguccugaugagcaaccucggcaugccguccuacugcaccggguaccgcgagggcuaccugaacagcaccaacgugaccaucgccacguacugcaccggcuccauccccugcagcgugugccuguccgggcucgacagccuggacaccuaccccucccuggagaccauccagaucacgaucagcuccuucaagugggaccucaccgccuucggccuggucgccgagugguuccuggccuacauccucuucacccgguucuucuacgugcuggggcuggcggccaucaugcagcuguucuucagcuacuucgccgugcacuucaucuccaacagcuggcucauguggcugaucaucaaccugguccagauggcccccaucuccgcgauggugcgcauguacaucuucuucgccagcuucuacuacguguggaaguccuacguccacgugguggacggcugcaacagcagcacgugcaugaugugcuacaagcggaaccgcgccacgcgggucgagugcaccaccaucgugaacgggguccgccgguccuucuacguguacgccaacggcggcaagggguucugcaagcuccacaacuggaacugcgugaacugcgacaccuucugcgccggcagcacguucaucuccgacgaggucgcgcgcgaccugagccugcaguucaagcggccgaucaaccccaccgaccaguccagcuacaucguggacuccgugaccgucaagaacgggagcauccaccucuacuucgacaaggccggccagaacaccuacgagcgccacucccugagccacuucgugaaccuggacaaccuccgggccaacaacacgaaggggucccugcccaucaacgugaucgucuucgacggcaagagcaagugcgaggaguccagcgccaaguccgccagcguguacuacucccagcugaugugccagcccauccuccugcuggaccaggcgcucgugagcgacgucggcgacagcgccgagguggccgugaagauguucgacgccuacgucaacaccuucuccagcaccuucaacgugccgauggagaagcugaagacccugguggccacggcggaggccgagcucgccaagaacgucucccuggacaacgugcugagcaccuucaucuccgccgcgcgccagggguucguggacagcgacgucgagaccaaggacgugguggagugccucaagcugucccaccagagcgacaucgaggucaccggcgacuccugcaacaacuacaugcugacguacaacaagguggagaacaugacgccccgggaccucggggccugcaucgacugcagcgcccgccacaucaacgcccagguggccaagucccacaacaucgcgcugaucuggaacgucaaggacuucaugagccuguccgagcagcuccggaagcagauccgcagcgccgccaagaagaacaaccugcccuucaagcugaccugcgccaccacccgccagguggugaacgucgugaccaccaagaucgcccucaagggcggguga

SEQ ID NO: 28089 - RNA, 5841 nt, Artificial Sequence
  SARS-CoV-2/Wuhan-Hu-1__NC_045512.2/MN908947.2__non-structural protein 3 (NSP3) CDS gc (1-1946)(A862S_G1129S)
auggcccccaccaaggugaccuucggcgacgacaccgucaucgaggugcagggguacaagagcgugaacaucaccuucgagcuggacgagcgcaucgacaagguccucaacgagaagugcuccgccuacaccguggagcugggcaccgaggugaacgaguucgcgugcgucguggccgacgccgugaucaagacgcugcagccggucagcgagcuccugacgccccuggggaucgaccucgacgagugguccauggccaccuacuaccuguucgacgagagcggcgaguucaagcuggccucccacauguacugcagcuucuacccgcccgacgaggacgaggaggagggggacugcgaggaggaggaguucgagcccuccacccaguacgaguacggcacggaggacgacuaccagggcaagccccucgaguucggggcgaccagcgccgcccugcagcccgaggaggagcaggaggaggacuggcuggacgacgacucccagcagaccgugggccagcaggacgggagcgaggacaaccagaccacgaccauccagaccaucguggagguccagccccagcucgagauggagcugaccccgguggugcagacgaucgaggucaacuccuucagcggcuaccugaagcucaccgacaacguguacaucaagaacgccgacaucguggaggaggcgaagaaggucaagcccaccgugguggucaacgccgccaacguguaccugaagcacgggggcggcguggccggggcccugaacaaggcgaccaacaacgccaugcaggucgaguccgacgacuacaucgccacgaacggcccccucaaggucgggggcagcugcgugcuguccggccacaaccuggccaagcacugccuccacgugguggggcccaacgucaacaagggcgaggacauccagcugcucaagagcgccuacgagaacuucaaccagcacgaggugcugcuggcgccgcugcucuccgccgggaucuucggcgccgaccccauccacagccugcgggugugcgucgacaccgugcgcaccaacguguaccuggccgucuucgacaagaaccucuacgacaagcugguguccagcuuccuggagaugaaguccgagaagcaggucgagcagaagaucgccgagauccccaaggaggaggugaagcccuucaucaccgagagcaagccgagcguggagcagcggaagcaggacgacaagaagaucaaggcgugcguggaggaggucacgaccacccucgaggagaccaaguuccugacggagaaccugcuccuguacaucgacaucaacgggaaccugcaccccgacuccgccacccucgugagcgacaucgacaucaccuuccugaagaaggacgcccccuacaucgugggcgacgucgugcaggagggcgugcugaccgccgucgugauccccacgaagaaggccgggggcaccaccgagaugcucgcgaaggcccugcgcaaggugccgaccgacaacuacaucacgaccuaccccgggcagggccugaacggguacaccgucgaggaggccaagaccgugcucaagaagugcaaguccgccuucuacauccugcccagcaucaucuccaacgagaagcaggagauccugggcaccgugagcuggaaccugcgggagaugcucgcgcacgccgaggagacgcgcaagcugaugcccgucugcguggagaccaaggccaucguguccaccauccagcggaaguacaagggcaucaagauccaggagggggucguggacuacggcgcccgcuucuacuucuacaccagcaagacgaccguggccucccugaucaacacccucaacgaccugaacgagacccuggucacgaugccgcucggguacgugacccacggccugaaccuggaggaggcggcccgguacaugcgcagccucaaggugcccgccaccgucuccgugagcucccccgacgccgugaccgccuacaacggguaccugacgagcuccagcaagacccccgaggagcacuucaucgagaccaucucccuggcgggcagcuacaaggacuggagcuacuccggccagagcacccagcucgggaucgaguuccugaagcggggcgacaaguccgucuacuacacgagcaacccgaccaccuuccaccuggacggggaggugaucaccuucgacaaccucaagacgcugcugucccuccgcgaggugcggaccaucaaggucuucaccaccguggacaacaucaaccugcacacccagguggucgacaugagcaugaccuacggccagcaguucggccccaccuaccuggacggggccgacgugaccaagaucaagccccacaacucccacgagggcaagacguucuacgugcucccgaacgacgacacccugcgcgucgaggccuucgaguacuaccacaccaccgaccccagcuuccuggggcgguacauguccgcccucaaccacacgaagaaguggaaguacccccaggugaacggccugaccagcaucaagugggccgacaacaacugcuaccuggcgaccagccuccugacccugcagcagaucgagcucaaguucaacccgcccgcccugcaggacgccuacuaccgcgcgcgggccggggaggccgccaacuucugcgcccugauccucgcguacugcaacaagacggugggcgagcugggcgacguccgcgagaccauguccuaccuguuccagcacgccaaccucgacagcugcaagcgggugcugaacgucgugugcaagaccugcgggcagcagcagaccacccugaagggcguggaggccgucauguacauggggacgcucuccuacgagcaguucaagaagggcgugcagauccccugcacgugcgggaagcaggccaccaaguaccuggugcagcaggagagccccuucgucaugauguccgcgcccccggcccaguacgagcugaagcacggcaccuucacgugcgccagcgaguacaccggcaacuaccagugcgggcacuacaagcacaucaccuccaaggagacccucuacugcaucgacggcgcccugcugaccaagagcagcgaguacaaggggcccaucaccgacguguucuacaaggagaacuccuacaccaccacgaucaagcccgugaccuacaagcucgacggcgucgugugcaccgagaucgaccccaagcuggacaacuacuacaagaaggacaacagcuacuucaccgagcagccgaucgaccuggugcccaaccagcccuaccccaacgccuccuucgacaacuucaaguucgucugcgacaacaucaaguucgccgacgaccucaaccagcugacgagcuacaagaagccggcgagccgcgagcugaaggugaccuucuuccccgaccucaacggcgacguggucgccaucgacuacaagcacuacacccccuccuucaagaagggcgccaagcugcugcacaagcccaucguguggcacgugaacaacgccaccaacaaggcgacguacaagccgaacaccuggugcauccggugccucuggagcaccaagcccgucgagaccuccaacagcuucgacgugcugaaguccgaggacgcccaggggauggacaaccuggccugcgaggaccucaagcccgugagcgaggaggucguggagaaccccacgauccagaaggacgugcuggagugcaacgucaagaccaccgagguggugggcgacaucauccugaagccggccaacaacucccucaagaucaccgaggaggucgggcacacggaccugauggccgcguacguggacaacagcucccugaccaucaagaagcccaacgagcucagccgcgugcugggccugaagacccucgccacccacgggcuggccgccgucaacuccgugcccugggacacgaucgccaacuacgcgaagccguuccugaacaagguggucagcaccaccaccaacaucgugacgcgcugccucaaccgggugugcaccaacuacaugcccuacuucuucacccugcugcuccagcugugcaccuucacgcgcuccaccaacagccggaucaaggccuccaugcccaccaccaucgccaagaacaccgucaagagcgugggcaaguucugccuggaggccagcuucaacuaccucaagucccccaacuucagcaagcugaucaacaucaucaucugguuccugcuccuguccgugugccugggcagccucaucuacuccacggccgcgcuggggguccugaugagcaaccucggcaugccguccuacugcaccggguaccgcgagggcuaccugaacagcaccaacgugaccaucgccacguacugcaccggcuccauccccugcagcgugugccuguccgggcucgacagccuggacaccuaccccucccuggagaccauccagaucacgaucagcuccuucaagugggaccucaccgccuucggccuggucgccgagugguuccuggccuacauccucuucacccgguucuucuacgugcuggggcuggcggccaucaugcagcuguucuucagcuacuucgccgugcacuucaucuccaacagcuggcucauguggcugaucaucaaccugguccagauggcccccaucuccgcgauggugcgcauguacaucuucuucgccagcuucuacuacguguggaaguccuacguccacgugguggacggcugcaacagcagcacgugcaugaugugcuacaagcggaaccgcgccacgcgggucgagugcaccaccaucgugaacgggguccgccgguccuucuacguguacgccaacggcggcaagggguucugcaagcuccacaacuggaacugcgugaacugcgacaccuucugcgccggcagcacguucaucuccgacgaggucgcgcgcgaccugagccugcaguucaagcggccgaucaaccccaccgaccaguccagcuacaucguggacuccgugaccgucaagaacgggagcauccaccucuacuucgacaaggccggccagaagaccuacgagcgccacucccugagccacuucgugaaccuggacaaccuccgggccaacaacacgaaggggucccugcccaucaacgugaucgucuucgacggcaagagcaagugcgaggaguccagcgccaaguccgccagcguguacuacucccagcugaugugccagcccauccuccugcuggaccaggcgcucgugagcgacgucggcgacagcgccgagguggccgugaagauguucgacgccuacgucaacaccuucuccagcaccuucaacgugccgauggagaagcugaagacccugguggccacggcggaggccgagcucgccaagaacgucucccuggacaacgugcugagcaccuucaucuccgccgcgcgccagggguucguggacagcgacgucgagaccaaggacgugguggagugccucaagcugucccaccagagcgacaucgaggucaccggcgacuccugcaacaacuacaugcugacguacaacaagguggagaacaugacgccccgggaccucggggccugcaucgacugcagcgcccgccacaucaacgcccagguggccaagucccacaacaucgcgcugaucuggaacgucaaggacuucaugagccuguccgagcagcuccggaagcagauccgcagcgccgccaagaagaacaaccugcccuucaagcugaccugcgccaccacccgccagguggugaacgucgugaccaccaagaucgcccucaagggcggguga

SEQ ID NO: 28090 - RNA, 5841 nt, Artificial Sequence
  SARS-CoV-2/Wuhan-Hu-1__NC_045512.2/MN908947.2__non-structural protein 3 (NSP3) CDS gc (1-1946)(T1190I_K1772R)
auggcccccaccaaggugaccuucggcgacgacaccgucaucgaggugcagggguacaagagcgugaacaucaccuucgagcuggacgagcgcaucgacaagguccucaacgagaagugcuccgccuacaccguggagcugggcaccgaggugaacgaguucgcgugcgucguggccgacgccgugaucaagacgcugcagccggucagcgagcuccugacgccccuggggaucgaccucgacgagugguccauggccaccuacuaccuguucgacgagagcggcgaguucaagcuggccucccacauguacugcagcuucuacccgcccgacgaggacgaggaggagggggacugcgaggaggaggaguucgagcccuccacccaguacgaguacggcacggaggacgacuaccagggcaagccccucgaguucggggcgaccagcgccgcccugcagcccgaggaggagcaggaggaggacuggcuggacgacgacucccagcagaccgugggccagcaggacgggagcgaggacaaccagaccacgaccauccagaccaucguggagguccagccccagcucgagauggagcugaccccgguggugcagacgaucgaggucaacuccuucagcggcuaccugaagcucaccgacaacguguacaucaagaacgccgacaucguggaggaggcgaagaaggucaagcccaccgugguggucaacgccgccaacguguaccugaagcacgggggcggcguggccggggcccugaacaaggcgaccaacaacgccaugcaggucgaguccgacgacuacaucgccacgaacggcccccucaaggucgggggcagcugcgugcuguccggccacaaccuggccaagcacugccuccacgugguggggcccaacgucaacaagggcgaggacauccagcugcucaagagcgccuacgagaacuucaaccagcacgaggugcugcuggcgccgcugcucuccgccgggaucuucggcgccgaccccauccacagccugcgggugugcgucgacaccgugcgcaccaacguguaccuggccgucuucgacaagaaccucuacgacaagcugguguccagcuuccuggagaugaaguccgagaagcaggucgagcagaagaucgccgagauccccaaggaggaggugaagcccuucaucaccgagagcaagccgagcguggagcagcggaagcaggacgacaagaagaucaaggcgugcguggaggaggucacgaccacccucgaggagaccaaguuccugacggagaaccugcuccuguacaucgacaucaacgggaaccugcaccccgacuccgccacccucgugagcgacaucgacaucaccuuccugaagaaggacgcccccuacaucgugggcgacgucgugcaggagggcgugcugaccgccgucgugauccccacgaagaaggccgggggcaccaccgagaugcucgcgaaggcccugcgcaaggugccgaccgacaacuacaucacgaccuaccccgggcagggccugaacggguacaccgucgaggaggccaagaccgugcucaagaagugcaaguccgccuucuacauccugcccagcaucaucuccaacgagaagcaggagauccugggcaccgugagcuggaaccugcgggagaugcucgcgcacgccgaggagacgcgcaagcugaugcccgucugcguggagaccaaggccaucguguccaccauccagcggaaguacaagggcaucaagauccaggagggggucguggacuacggcgcccgcuucuacuucuacaccagcaagacgaccguggccucccugaucaacacccucaacgaccugaacgagacccuggucacgaugccgcucggguacgugacccacggccugaaccuggaggaggcggcccgguacaugcgcagccucaaggugcccgccaccgucuccgugagcucccccgacgccgugaccgccuacaacggguaccugacgagcuccagcaagacccccgaggagcacuucaucgagaccaucucccuggcgggcagcuacaaggacuggagcuacuccggccagagcacccagcucgggaucgaguuccugaagcggggcgacaaguccgucuacuacacgagcaacccgaccaccuuccaccuggacggggaggugaucaccuucgacaaccucaagacgcugcugucccuccgcgaggugcggaccaucaaggucuucaccaccguggacaacaucaaccugcacacccagguggucgacaugagcaugaccuacggccagcaguucggccccaccuaccuggacggggccgacgugaccaagaucaagccccacaacucccacgagggcaagacguucuacgugcucccgaacgacgacacccugcgcgucgaggccuucgaguacuaccacaccaccgaccccagcuuccuggggcgguacauguccgcccucaaccacacgaagaaguggaaguacccccaggugaacggccugaccagcaucaagugggccgacaacaacugcuaccuggcgaccgcccuccugacccugcagcagaucgagcucaaguucaacccgcccgcccugcaggacgccuacuaccgcgcgcgggccggggaggccgccaacuucugcgcccugauccucgcguacugcaacaagacggugggcgagcugggcgacguccgcgagaccauguccuaccuguuccagcacgccaaccucgacagcugcaagcgggugcugaacgucgugugcaagaccugcgggcagcagcagaccacccugaagggcguggaggccgucauguacauggggacgcucuccuacgagcaguucaagaagggcgugcagauccccugcacgugcgggaagcaggccaccaaguaccuggugcagcaggagagccccuucgucaugauguccgcgcccccggcccaguacgagcugaagcacggcaccuucacgugcgccagcgaguacaccggcaacuaccagugcgggcacuacaagcacaucaccuccaaggagacccucuacugcaucgacggcgcccugcugaccaagagcagcgaguacaaggggcccaucaccgacguguucuacaaggagaacuccuacaccaccacgaucaagcccgugaccuacaagcucgacggcgucgugugcaccgagaucgaccccaagcuggacaacuacuacaagaaggacaacagcuacuucaccgagcagccgaucgaccuggugcccaaccagcccuaccccaacgccuccuucgacaacuucaaguucgucugcgacaacaucaaguucgccgacgaccucaaccagcugacgggguacaagaagccggcgagccgcgagcugaaggugaccuucuuccccgaccucaacggcgacguggucgccaucgacuacaagcacuacacccccuccuucaagaagggcgccaagcugcugcacaagcccaucguguggcacgugaacaacgccaccaacaaggcgacguacaagccgaacaucuggugcauccggugccucuggagcaccaagcccgucgagaccuccaacagcuucgacgugcugaaguccgaggacgcccaggggauggacaaccuggccugcgaggaccucaagcccgugagcgaggaggucguggagaaccccacgauccagaaggacgugcuggagugcaacgucaagaccaccgagguggugggcgacaucauccugaagccggccaacaacucccucaagaucaccgaggaggucgggcacacggaccugauggccgcguacguggacaacagcucccugaccaucaagaagcccaacgagcucagccgcgugcugggccugaagacccucgccacccacgggcuggccgccgucaacuccgugcccugggacacgaucgccaacuacgcgaagccguuccugaacaagguggucagcaccaccaccaacaucgugacgcgcugccucaaccgggugugcaccaacuacaugcccuacuucuucacccugcugcuccagcugugcaccuucacgcgcuccaccaacagccggaucaaggccuccaugcccaccaccaucgccaagaacaccgucaagagcgugggcaaguucugccuggaggccagcuucaacuaccucaagucccccaacuucagcaagcugaucaacaucaucaucugguuccugcuccuguccgugugccugggcagccucaucuacuccacggccgcgcuggggguccugaugagcaaccucggcaugccguccuacugcaccggguaccgcgagggcuaccugaacagcaccaacgugaccaucgccacguacugcaccggcuccauccccugcagcgugugccuguccgggcucgacagccuggacaccuaccccucccuggagaccauccagaucacgaucagcuccuucaagugggaccucaccgccuucggccuggucgccgagugguuccuggccuacauccucuucacccgguucuucuacgugcuggggcuggcggccaucaugcagcuguucuucagcuacuucgccgugcacuucaucuccaacagcuggcucauguggcugaucaucaaccugguccagauggcccccaucuccgcgauggugcgcauguacaucuucuucgccagcuucuacuacguguggaaguccuacguccacgugguggacggcugcaacagcagcacgugcaugaugugcuacaagcggaaccgcgccacgcgggucgagugcaccaccaucgugaacgggguccgccgguccuucuacguguacgccaacggcggcaagggguucugcaagcuccacaacuggaacugcgugaacugcgacaccuucugcgccggcagcacguucaucuccgacgaggucgcgcgcgaccugagccugcaguucaagcggccgaucaaccccaccgaccaguccagcuacaucguggacuccgugaccgucaagaacgggagcauccaccucuacuucgacaaggccggccagaagaccuacgagcgccacucccugagccacuucgugaaccuggacaaccuccgggccaacaacacgaaggggucccugcccaucaacgugaucgucuucgacggcaagagcaagugcgaggaguccagcgccaaguccgccagcguguacuacucccagcugaugugccagcccauccuccugcuggaccaggcgcucgugagcgacgucggcgacagcgccgagguggccgugcgcauguucgacgccuacgucaacaccuucuccagcaccuucaacgugccgauggagaagcugaagacccugguggccacggcggaggccgagcucgccaagaacgucucccuggacaacgugcugagcaccuucaucuccgccgcgcgccagggguucguggacagcgacgucgagaccaaggacgugguggagugccucaagcugucccaccagagcgacaucgaggucaccggcgacuccugcaacaacuacaugcugacguacaacaagguggagaacaugacgccccgggaccucggggccugcaucgacugcagcgcccgccacaucaacgcccagguggccaagucccacaacaucgcgcugaucuggaacgucaaggacuucaugagccuguccgagcagcuccggaagcagauccgcagcgccgccaagaagaacaaccugcccuucaagcugaccugcgccaccacccgccagguggugaacgucgugaccaccaagaucgcccucaagggcggguga

SEQ ID NO: 28091 - RNA, 1506 nt, Artificial Sequence
  SARS-CoV-2/Wuhan-Hu-1__NC_045512.2/MN908947.2/EPI_ISL_402128__non -structural protein 4 (NSP4) CDS gc (1-501)(V168L_T493I)
augaagaucgugaacaacuggcugaagcagcucaucaaggucacccugguguuccuguucguggccgccaucuucuaccucaucacccccguccacgugaugagcaagcacacggacuucuccagcgagaucaucggcuacaaggcgaucgacgggggcgugacccgcgacaucgccuccaccgacacgugcuucgccaacaagcacgccgacuucgacaccugguucagccagcggggcggcuccuacaccaacgacaaggccugcccccugaucgcggccgucaucacccgcgaggugggguucgugguccccggccugcccggcaccauccuccggacgaccaacggggacuuccugcacuuccugccccgcguguucagcgccgugggcaacaucugcuacaccccguccaagcucaucgaguacaccgacuucgccacgagcgcgugcguccuggccgccgagugcaccaucuucaaggacgccuccgggaagccccugcccuacugcuacgacaccaacgugcuggagggcagcgucgccuacgagucccuccggcccgacacccgcuacgugcugauggacgggagcaucauccaguucccgaacacguaccuggagggcuccgugcgggucgugaccaccuucgacagcgaguacugccgccacgggaccugcgagcgguccgaggcgggggugugcgucagcacguccggccgcugggugcucaacaacgacuacuaccggagccugcccgggguguucugcggcgucgacgccgugaaccugcucaccaacauguucacgccccugauccagcccaucggcgcccuggacaucuccgccagcaucgucgccgggggcaucguggcgaucguggugaccugccucgccuacuacuucaugcgcuuccggcgcgccuucggggaguacagccacgucguggccuucaacacccugcuguuccucauguccuucaccguccugugccugaccccgguguacagcuuccuccccggcguguacuccgucaucuaccuguaccugaccuucuaccucacgaacgacgugagcuuccuggcccacauccaguggauggugauguucacgccccugguccccuucuggaucaccaucgcguacaucaucugcaucuccaccaagcacuucuacugguucuucagcaacuaccucaagcggcgcgugguguucaacggggucuccuucagcaccuucgaggaggccgcccugugcaccuuccugcucaacaaggagauguaccugaagcugcgguccgacgugcuccugccgcugacccaguacaaccgcuaccucgcccuguacaacaaguacaaguacuucagcggcgccauggacaccacguccuaccgggaggcggccugcugccaccuggccaaggcccucaacgacuucagcaacuccggcagcgacgugcuguaccagccgccccagaucuccaucaccagcgcgguccugcaguga

SEQ ID NO: 28092 - RNA, 1506 nt, Artificial Sequence
  SARS-CoV-2/Wuhan-Hu-1__NC_045512.2/MN908947.2/EPI_ISL_402128__non -structural protein 4 (NSP4) CDS gc (1-501)(F18L)
augaagaucgugaacaacuggcugaagcagcucaucaaggucacccuggugcugcuguucguggccgccaucuucuaccucaucacccccguccacgugaugagcaagcacacggacuucuccagcgagaucaucggcuacaaggcgaucgacgggggcgugacccgcgacaucgccuccaccgacacgugcuucgccaacaagcacgccgacuucgacaccugguucagccagcggggcggcuccuacaccaacgacaaggccugcccccugaucgcggccgucaucacccgcgaggugggguucgugguccccggccugcccggcaccauccuccggacgaccaacggggacuuccugcacuuccugccccgcguguucagcgccgugggcaacaucugcuacaccccguccaagcucaucgaguacaccgacuucgccacgagcgcgugcguccuggccgccgagugcaccaucuucaaggacgccuccgggaagcccgugcccuacugcuacgacaccaacgugcuggagggcagcgucgccuacgagucccuccggcccgacacccgcuacgugcugauggacgggagcaucauccaguucccgaacacguaccuggagggcuccgugcgggucgugaccaccuucgacagcgaguacugccgccacgggaccugcgagcgguccgaggcgggggugugcgucagcacguccggccgcugggugcucaacaacgacuacuaccggagccugcccgggguguucugcggcgucgacgccgugaaccugcucaccaacauguucacgccccugauccagcccaucggcgcccuggacaucuccgccagcaucgucgccgggggcaucguggcgaucguggugaccugccucgccuacuacuucaugcgcuuccggcgcgccuucggggaguacagccacgucguggccuucaacacccugcuguuccucauguccuucaccguccugugccugaccccgguguacagcuuccuccccggcguguacuccgucaucuaccuguaccugaccuucuaccucacgaacgacgugagcuuccuggcccacauccaguggauggugauguucacgccccugguccccuucuggaucaccaucgcguacaucaucugcaucuccaccaagcacuucuacugguucuucagcaacuaccucaagcggcgcgugguguucaacggggucuccuucagcaccuucgaggaggccgcccugugcaccuuccugcucaacaaggagauguaccugaagcugcgguccgacgugcuccugccgcugacccaguacaaccgcuaccucgcccuguacaacaaguacaaguacuucagcggcgccauggacaccacguccuaccgggaggcggccugcugccaccuggccaaggcccucaacgacuucagcaacuccggcagcgacgugcuguaccagccgccccagaccuccaucaccagcgcgguccugcaguga

SEQ ID NO: 28093 - RNA, 1506 nt, Artificial Sequence
  SARS-CoV-2/Wuhan-Hu-1__NC_045512.2/MN908947.2/EPI_ISL_402128__non -structural protein 4 (NSP4) CDS gc (1-501)(I24T_G179S_S185N_A447V)
augaagaucgugaacaacuggcugaagcagcucaucaaggucacccugguguuccuguucguggccgccaccuucuaccucaucacccccguccacgugaugagcaagcacacggacuucuccagcgagaucaucggcuacaaggcgaucgacgggggcgugacccgcgacaucgccuccaccgacacgugcuucgccaacaagcacgccgacuucgacaccugguucagccagcggggcggcuccuacaccaacgacaaggccugcccccugaucgcggccgucaucacccgcgaggugggguucgugguccccggccugcccggcaccauccuccggacgaccaacggggacuuccugcacuuccugccccgcguguucagcgccgugggcaacaucugcuacaccccguccaagcucaucgaguacaccgacuucgccacgagcgcgugcguccuggccgccgagugcaccaucuucaaggacgccuccgggaagcccgugcccuacugcuacgacaccaacgugcuggagagcagcgucgccuacgagaaccuccggcccgacacccgcuacgugcugauggacgggagcaucauccaguucccgaacacguaccuggagggcuccgugcgggucgugaccaccuucgacagcgaguacugccgccacgggaccugcgagcgguccgaggcgggggugugcgucagcacguccggccgcugggugcucaacaacgacuacuaccggagccugcccgggguguucugcggcgucgacgccgugaaccugcucaccaacauguucacgccccugauccagcccaucggcgcccuggacaucuccgccagcaucgucgccgggggcaucguggcgaucguggugaccugccucgccuacuacuucaugcgcuuccggcgcgccuucggggaguacagccacgucguggccuucaacacccugcuguuccucauguccuucaccguccugugccugaccccgguguacagcuuccuccccggcguguacuccgucaucuaccuguaccugaccuucuaccucacgaacgacgugagcuuccuggcccacauccaguggauggugauguucacgccccugguccccuucuggaucaccaucgcguacaucaucugcaucuccaccaagcacuucuacugguucuucagcaacuaccucaagcggcgcgugguguucaacggggucuccuucagcaccuucgaggaggccgcccugugcaccuuccugcucaacaaggagauguaccugaagcugcgguccgacgugcuccugccgcugacccaguacaaccgcuaccucgugcuguacaacaaguacaaguacuucagcggcgccauggacaccacguccuaccgggaggcggccugcugccaccuggccaaggcccucaacgacuucagcaacuccggcagcgacgugcuguaccagccgccccagaccuccaucaccagcgcgguccugcaguga

SEQ ID NO: 28094 - RNA, 1506 nt, Artificial Sequence
  SARS-CoV-2/Wuhan-Hu-1__NC_045512.2/MN908947.2/EPI_ISL_402128__non -structural protein 4 (NSP4) CDS gc (1-501)(V168L_A447V_T493I)
augaagaucgugaacaacuggcugaagcagcucaucaaggucacccugguguuccuguucguggccgccaucuucuaccucaucacccccguccacgugaugagcaagcacacggacuucuccagcgagaucaucggcuacaaggcgaucgacgggggcgugacccgcgacaucgccuccaccgacacgugcuucgccaacaagcacgccgacuucgacaccugguucagccagcggggcggcuccuacaccaacgacaaggccugcccccugaucgcggccgucaucacccgcgaggugggguucgugguccccggccugcccggcaccauccuccggacgaccaacggggacuuccugcacuuccugccccgcguguucagcgccgugggcaacaucugcuacaccccguccaagcucaucgaguacaccgacuucgccacgagcgcgugcguccuggccgccgagugcaccaucuucaaggacgccuccgggaagccccugcccuacugcuacgacaccaacgugcuggagggcagcgucgccuacgagucccuccggcccgacacccgcuacgugcugauggacgggagcaucauccaguucccgaacacguaccuggagggcuccgugcgggucgugaccaccuucgacagcgaguacugccgccacgggaccugcgagcgguccgaggcgggggugugcgucagcacguccggccgcugggugcucaacaacgacuacuaccggagccugcccgggguguucugcggcgucgacgccgugaaccugcucaccaacauguucacgccccugauccagcccaucggcgcccuggacaucuccgccagcaucgucgccgggggcaucguggcgaucguggugaccugccucgccuacuacuucaugcgcuuccggcgcgccuucggggaguacagccacgucguggccuucaacacccugcuguuccucauguccuucaccguccugugccugaccccgguguacagcuuccuccccggcguguacuccgucaucuaccuguaccugaccuucuaccucacgaacgacgugagcuuccuggcccacauccaguggauggugauguucacgccccugguccccuucuggaucaccaucgcguacaucaucugcaucuccaccaagcacuucuacugguucuucagcaacuaccucaagcggcgcgugguguucaacggggucuccuucagcaccuucgaggaggccgcccugugcaccuuccugcucaacaaggagauguaccugaagcugcgguccgacgugcuccugccgcugacccaguacaaccgcuaccucgugcuguacaacaaguacaaguacuucagcggcgccauggacaccacguccuaccgggaggcggccugcugccaccuggccaaggcccucaacgacuucagcaacuccggcagcgacgugcuguaccagccgccccagaucuccaucaccagcgcgguccugcaguga

SEQ ID NO: 28095 - RNA, 1506 nt, Artificial Sequence
  SARS-CoV-2/Wuhan-Hu-1__NC_045512.2/MN908947.2/EPI_ISL_402128__non -structural protein 4 (NSP4) CDS gc (1-501)(Y206H_L265F_T296I_A473S)
augaagaucgugaacaacuggcugaagcagcucaucaaggucacccugguguuccuguucguggccgccaucuucuaccucaucacccccguccacgugaugagcaagcacacggacuucuccagcgagaucaucggcuacaaggcgaucgacgggggcgugacccgcgacaucgccuccaccgacacgugcuucgccaacaagcacgccgacuucgacaccugguucagccagcggggcggcuccuacaccaacgacaaggccugcccccugaucgcggccgucaucacccgcgaggugggguucgugguccccggccugcccggcaccauccuccggacgaccaacggggacuuccugcacuuccugccccgcguguucagcgccgugggcaacaucugcuacaccccguccaagcucaucgaguacaccgacuucgccacgagcgcgugcguccuggccgccgagugcaccaucuucaaggacgccuccgggaagcccgugcccuacugcuacgacaccaacgugcuggagggcagcgucgccuacgagucccuccggcccgacacccgcuacgugcugauggacgggagcaucauccaguucccgaacacgcaccuggagggcuccgugcgggucgugaccaccuucgacagcgaguacugccgccacgggaccugcgagcgguccgaggcgggggugugcgucagcacguccggccgcugggugcucaacaacgacuacuaccggagccugcccgggguguucugcggcgucgacgccgugaaccuguucaccaacauguucacgccccugauccagcccaucggcgcccuggacaucuccgccagcaucgucgccgggggcaucguggcgaucguggugaucugccucgccuacuacuucaugcgcuuccggcgcgccuucggggaguacagccacgucguggccuucaacacccugcuguuccucauguccuucaccguccugugccugaccccgguguacagcuuccuccccggcguguacuccgucaucuaccuguaccugaccuucuaccucacgaacgacgugagcuuccuggcccacauccaguggauggugauguucacgccccugguccccuucuggaucaccaucgcguacaucaucugcaucuccaccaagcacuucuacugguucuucagcaacuaccucaagcggcgcgugguguucaacggggucuccuucagcaccuucgaggaggccgcccugugcaccuuccugcucaacaaggagauguaccugaagcugcgguccgacgugcuccugccgcugacccaguacaaccgcuaccucgcccuguacaacaaguacaaguacuucagcggcgccauggacaccacguccuaccgggaggcggccugcugccaccugagcaaggcccucaacgacuucagcaacuccggcagcgacgugcuguaccagccgccccagaccuccaucaccagcgcgguccugcaguga

SEQ ID NO: 28096 - RNA, 1506 nt, Artificial Sequence
  SARS-CoV-2/Wuhan-Hu-1__NC_045512.2/MN908947.2/EPI_ISL_402128__non -structural protein 4 (NSP4) CDS gc (1-501)(T174I_A447V)
augaagaucgugaacaacuggcugaagcagcucaucaaggucacccugguguuccuguucguggccgccaucuucuaccucaucacccccguccacgugaugagcaagcacacggacuucuccagcgagaucaucggcuacaaggcgaucgacgggggcgugacccgcgacaucgccuccaccgacacgugcuucgccaacaagcacgccgacuucgacaccugguucagccagcggggcggcuccuacaccaacgacaaggccugcccccugaucgcggccgucaucacccgcgaggugggguucgugguccccggccugcccggcaccauccuccggacgaccaacggggacuuccugcacuuccugccccgcguguucagcgccgugggcaacaucugcuacaccccguccaagcucaucgaguacaccgacuucgccacgagcgcgugcguccuggccgccgagugcaccaucuucaaggacgccuccgggaagcccgugcccuacugcuacgacaucaacgugcuggagggcagcgucgccuacgagucccuccggcccgacacccgcuacgugcugauggacgggagcaucauccaguucccgaacacguaccuggagggcuccgugcgggucgugaccaccuucgacagcgaguacugccgccacgggaccugcgagcgguccgaggcgggggugugcgucagcacguccggccgcugggugcucaacaacgacuacuaccggagccugcccgggguguucugcggcgucgacgccgugaaccugcucaccaacauguucacgccccugauccagcccaucggcgcccuggacaucuccgccagcaucgucgccgggggcaucguggcgaucguggugaccugccucgccuacuacuucaugcgcuuccggcgcgccuucggggaguacagccacgucguggccuucaacacccugcuguuccucauguccuucaccguccugugccugaccccgguguacagcuuccuccccggcguguacuccgucaucuaccuguaccugaccuucuaccucacgaacgacgugagcuuccuggcccacauccaguggauggugauguucacgccccugguccccuucuggaucaccaucgcguacaucaucugcaucuccaccaagcacuucuacugguucuucagcaacuaccucaagcggcgcgugguguucaacggggucuccuucagcaccuucgaggaggccgcccugugcaccuuccugcucaacaaggagauguaccugaagcugcgguccgacgugcuccugccgcugacccaguacaaccgcuaccucgugcuguacaacaaguacaaguacuucagcggcgccauggacaccacguccuaccgggaggcggccugcugccaccuggccaaggcccucaacgacuucagcaacuccggcagcgacgugcuguaccagccgccccagaccuccaucaccagcgcgguccugcaguga

SEQ ID NO: 28097 - RNA, 1506 nt, Artificial Sequence
  SARS-CoV-2/Wuhan-Hu-1__NC_045512.2/MN908947.2/EPI_ISL_402128__non -structural protein 4 (NSP4) CDS gc (1-501)(T190I_T493I)
augaagaucgugaacaacuggcugaagcagcucaucaaggucacccugguguuccuguucguggccgccaucuucuaccucaucacccccguccacgugaugagcaagcacacggacuucuccagcgagaucaucggcuacaaggcgaucgacgggggcgugacccgcgacaucgccuccaccgacacgugcuucgccaacaagcacgccgacuucgacaccugguucagccagcggggcggcuccuacaccaacgacaaggccugcccccugaucgcggccgucaucacccgcgaggugggguucgugguccccggccugcccggcaccauccuccggacgaccaacggggacuuccugcacuuccugccccgcguguucagcgccgugggcaacaucugcuacaccccguccaagcucaucgaguacaccgacuucgccacgagcgcgugcguccuggccgccgagugcaccaucuucaaggacgccuccgggaagcccgugcccuacugcuacgacaccaacgugcuggagggcagcgucgccuacgagucccuccggcccgacauccgcuacgugcugauggacgggagcaucauccaguucccgaacacguaccuggagggcuccgugcgggucgugaccaccuucgacagcgaguacugccgccacgggaccugcgagcgguccgaggcgggggugugcgucagcacguccggccgcugggugcucaacaacgacuacuaccggagccugcccgggguguucugcggcgucgacgccgugaaccugcucaccaacauguucacgccccugauccagcccaucggcgcccuggacaucuccgccagcaucgucgccgggggcaucguggcgaucguggugaccugccucgccuacuacuucaugcgcuuccggcgcgccuucggggaguacagccacgucguggccuucaacacccugcuguuccucauguccuucaccguccugugccugaccccgguguacagcuuccuccccggcguguacuccgucaucuaccuguaccugaccuucuaccucacgaacgacgugagcuuccuggcccacauccaguggauggugauguucacgccccugguccccuucuggaucaccaucgcguacaucaucugcaucuccaccaagcacuucuacugguucuucagcaacuaccucaagcggcgcgugguguucaacggggucuccuucagcaccuucgaggaggccgcccugugcaccuuccugcucaacaaggagauguaccugaagcugcgguccgacgugcuccugccgcugacccaguacaaccgcuaccucgcccuguacaacaaguacaaguacuucagcggcgccauggacaccacguccuaccgggaggcggccugcugccaccuggccaaggcccucaacgacuucagcaacuccggcagcgacgugcuguaccagccgccccagaucuccaucaccagcgcgguccugcaguga

SEQ ID NO: 28098 - RNA, 1506 nt, Artificial Sequence
  SARS-CoV-2/Wuhan-Hu-1__NC_045512.2/MN908947.2/EPI_ISL_402128__non -structural protein 4 (NSP4) CDS gc (1-501)(D218N_L439P)
augaagaucgugaacaacuggcugaagcagcucaucaaggucacccugguguuccuguucguggccgccaucuucuaccucaucacccccguccacgugaugagcaagcacacggacuucuccagcgagaucaucggcuacaaggcgaucgacgggggcgugacccgcgacaucgccuccaccgacacgugcuucgccaacaagcacgccgacuucgacaccugguucagccagcggggcggcuccuacaccaacgacaaggccugcccccugaucgcggccgucaucacccgcgaggugggguucgugguccccggccugcccggcaccauccuccggacgaccaacggggacuuccugcacuuccugccccgcguguucagcgccgugggcaacaucugcuacaccccguccaagcucaucgaguacaccgacuucgccacgagcgcgugcguccuggccgccgagugcaccaucuucaaggacgccuccgggaagcccgugcccuacugcuacgacaccaacgugcuggagggcagcgucgccuacgagucccuccggcccgacacccgcuacgugcugauggacgggagcaucauccaguucccgaacacguaccuggagggcuccgugcgggucgugaccaccuucaacagcgaguacugccgccacgggaccugcgagcgguccgaggcgggggugugcgucagcacguccggccgcugggugcucaacaacgacuacuaccggagccugcccgggguguucugcggcgucgacgccgugaaccugcucaccaacauguucacgccccugauccagcccaucggcgcccuggacaucuccgccagcaucgucgccgggggcaucguggcgaucguggugaccugccucgccuacuacuucaugcgcuuccggcgcgccuucggggaguacagccacgucguggccuucaacacccugcuguuccucauguccuucaccguccugugccugaccccgguguacagcuuccuccccggcguguacuccgucaucuaccuguaccugaccuucuaccucacgaacgacgugagcuuccuggcccacauccaguggauggugauguucacgccccugguccccuucuggaucaccaucgcguacaucaucugcaucuccaccaagcacuucuacugguucuucagcaacuaccucaagcggcgcgugguguucaacggggucuccuucagcaccuucgaggaggccgcccugugcaccuuccugcucaacaaggagauguaccugaagcugcgguccgacgugcuccugccgcccacccaguacaaccgcuaccucgcccuguacaacaaguacaaguacuucagcggcgccauggacaccacguccuaccgggaggcggccugcugccaccuggccaaggcccucaacgacuucagcaacuccggcagcgacgugcuguaccagccgccccagaccuccaucaccagcgcgguccugcaguga

SEQ ID NO: 28099 - RNA, 1506 nt, Artificial Sequence
  SARS-CoV-2/Wuhan-Hu-1__NC_045512.2/MN908947.2/EPI_ISL_402128__non -structural protein 4 (NSP4) CDS gc (1-501)(D218N_D460N)
augaagaucgugaacaacuggcugaagcagcucaucaaggucacccugguguuccuguucguggccgccaucuucuaccucaucacccccguccacgugaugagcaagcacacggacuucuccagcgagaucaucggcuacaaggcgaucgacgggggcgugacccgcgacaucgccuccaccgacacgugcuucgccaacaagcacgccgacuucgacaccugguucagccagcggggcggcuccuacaccaacgacaaggccugcccccugaucgcggccgucaucacccgcgaggugggguucgugguccccggccugcccggcaccauccuccggacgaccaacggggacuuccugcacuuccugccccgcguguucagcgccgugggcaacaucugcuacaccccguccaagcucaucgaguacaccgacuucgccacgagcgcgugcguccuggccgccgagugcaccaucuucaaggacgccuccgggaagcccgugcccuacugcuacgacaccaacgugcuggagggcagcgucgccuacgagucccuccggcccgacacccgcuacgugcugauggacgggagcaucauccaguucccgaacacguaccuggagggcuccgugcgggucgugaccaccuucaacagcgaguacugccgccacgggaccugcgagcgguccgaggcgggggugugcgucagcacguccggccgcugggugcucaacaacgacuacuaccggagccugcccgggguguucugcggcgucgacgccgugaaccugcucaccaacauguucacgccccugauccagcccaucggcgcccuggacaucuccgccagcaucgucgccgggggcaucguggcgaucguggugaccugccucgccuacuacuucaugcgcuuccggcgcgccuucggggaguacagccacgucguggccuucaacacccugcuguuccucauguccuucaccguccugugccugaccccgguguacagcuuccuccccggcguguacuccgucaucuaccuguaccugaccuucuaccucacgaacgacgugagcuuccuggcccacauccaguggauggugauguucacgccccugguccccuucuggaucaccaucgcguacaucaucugcaucuccaccaagcacuucuacugguucuucagcaacuaccucaagcggcgcgugguguucaacggggucuccuucagcaccuucgaggaggccgcccugugcaccuuccugcucaacaaggagauguaccugaagcugcgguccgacgugcuccugccgcugacccaguacaaccgcuaccucgcccuguacaacaaguacaaguacuucagcggcgccaugaacaccacguccuaccgggaggcggccugcugccaccuggccaaggcccucaacgacuucagcaacuccggcagcgacgugcuguaccagccgccccagaccuccaucaccagcgcgguccugcaguga

SEQ ID NO: 28100 - RNA, 1506 nt, Artificial Sequence
  SARS-CoV-2/Wuhan-Hu-1__NC_045512.2/MN908947.2/EPI_ISL_402128__non -structural protein 4 (NSP4) CDS gc (1-501)(S396T)
augaagaucgugaacaacuggcugaagcagcucaucaaggucacccugguguuccuguucguggccgccaucuucuaccucaucacccccguccacgugaugagcaagcacacggacuucuccagcgagaucaucggcuacaaggcgaucgacgggggcgugacccgcgacaucgccuccaccgacacgugcuucgccaacaagcacgccgacuucgacaccugguucagccagcggggcggcuccuacaccaacgacaaggccugcccccugaucgcggccgucaucacccgcgaggugggguucgugguccccggccugcccggcaccauccuccggacgaccaacggggacuuccugcacuuccugccccgcguguucagcgccgugggcaacaucugcuacaccccguccaagcucaucgaguacaccgacuucgccacgagcgcgugcguccuggccgccgagugcaccaucuucaaggacgccuccgggaagcccgugcccuacugcuacgacaccaacgugcuggagggcagcgucgccuacgagucccuccggcccgacacccgcuacgugcugauggacgggagcaucauccaguucccgaacacguaccuggagggcuccgugcgggucgugaccaccuucgacagcgaguacugccgccacgggaccugcgagcgguccgaggcgggggugugcgucagcacguccggccgcugggugcucaacaacgacuacuaccggagccugcccgggguguucugcggcgucgacgccgugaaccugcucaccaacauguucacgccccugauccagcccaucggcgcccuggacaucuccgccagcaucgucgccgggggcaucguggcgaucguggugaccugccucgccuacuacuucaugcgcuuccggcgcgccuucggggaguacagccacgucguggccuucaacacccugcuguuccucauguccuucaccguccugugccugaccccgguguacagcuuccuccccggcguguacuccgucaucuaccuguaccugaccuucuaccucacgaacgacgugagcuuccuggcccacauccaguggauggugauguucacgccccugguccccuucuggaucaccaucgcguacaucaucugcaucuccaccaagcacuucuacugguucuucaccaacuaccucaagcggcgcgugguguucaacggggucuccuucagcaccuucgaggaggccgcccugugcaccuuccugcucaacaaggagauguaccugaagcugcgguccgacgugcuccugccgcugacccaguacaaccgcuaccucgcccuguacaacaaguacaaguacuucagcggcgccauggacaccacguccuaccgggaggcggccugcugccaccuggccaaggcccucaacgacuucagcaacuccggcagcgacgugcuguaccagccgccccagaccuccaucaccagcgcgguccugcaguga

SEQ ID NO: 28101 - RNA, 1506 nt, Artificial Sequence
  SARS-CoV-2/Wuhan-Hu-1__NC_045512.2/MN908947.2/EPI_ISL_402128__non -structural protein 4 (NSP4) CDS gc (1-501)(L439P)
augaagaucgugaacaacuggcugaagcagcucaucaaggucacccugguguuccuguucguggccgccaucuucuaccucaucacccccguccacgugaugagcaagcacacggacuucuccagcgagaucaucggcuacaaggcgaucgacgggggcgugacccgcgacaucgccuccaccgacacgugcuucgccaacaagcacgccgacuucgacaccugguucagccagcggggcggcuccuacaccaacgacaaggccugcccccugaucgcggccgucaucacccgcgaggugggguucgugguccccggccugcccggcaccauccuccggacgaccaacggggacuuccugcacuuccugccccgcguguucagcgccgugggcaacaucugcuacaccccguccaagcucaucgaguacaccgacuucgccacgagcgcgugcguccuggccgccgagugcaccaucuucaaggacgccuccgggaagcccgugcccuacugcuacgacaccaacgugcuggagggcagcgucgccuacgagucccuccggcccgacacccgcuacgugcugauggacgggagcaucauccaguucccgaacacguaccuggagggcuccgugcgggucgugaccaccuucgacagcgaguacugccgccacgggaccugcgagcgguccgaggcgggggugugcgucagcacguccggccgcugggugcucaacaacgacuacuaccggagccugcccgggguguucugcggcgucgacgccgugaaccugcucaccaacauguucacgccccugauccagcccaucggcgcccuggacaucuccgccagcaucgucgccgggggcaucguggcgaucguggugaccugccucgccuacuacuucaugcgcuuccggcgcgccuucggggaguacagccacgucguggccuucaacacccugcuguuccucauguccuucaccguccugugccugaccccgguguacagcuuccuccccggcguguacuccgucaucuaccuguaccugaccuucuaccucacgaacgacgugagcuuccuggcccacauccaguggauggugauguucacgccccugguccccuucuggaucaccaucgcguacaucaucugcaucuccaccaagcacuucuacugguucuucagcaacuaccucaagcggcgcgugguguucaacggggucuccuucagcaccuucgaggaggccgcccugugcaccuuccugcucaacaaggagauguaccugaagcugcgguccgacgugcuccugccgcccacccaguacaaccgcuaccucgcccuguacaacaaguacaaguacuucagcggcgccauggacaccacguccuaccgggaggcggccugcugccaccuggccaaggcccucaacgacuucagcaacuccggcagcgacgugcuguaccagccgccccagaccuccaucaccagcgcgguccugcaguga

SEQ ID NO: 28102 - RNA, 1506 nt, Artificial Sequence
  SARS-CoV-2/Wuhan-Hu-1__NC_045512.2/MN908947.2/EPI_ISL_402128__non -structural protein 4 (NSP4) CDS gc (1-501)(A447V)
augaagaucgugaacaacuggcugaagcagcucaucaaggucacccugguguuccuguucguggccgccaucuucuaccucaucacccccguccacgugaugagcaagcacacggacuucuccagcgagaucaucggcuacaaggcgaucgacgggggcgugacccgcgacaucgccuccaccgacacgugcuucgccaacaagcacgccgacuucgacaccugguucagccagcggggcggcuccuacaccaacgacaaggccugcccccugaucgcggccgucaucacccgcgaggugggguucgugguccccggccugcccggcaccauccuccggacgaccaacggggacuuccugcacuuccugccccgcguguucagcgccgugggcaacaucugcuacaccccguccaagcucaucgaguacaccgacuucgccacgagcgcgugcguccuggccgccgagugcaccaucuucaaggacgccuccgggaagcccgugcccuacugcuacgacaccaacgugcuggagggcagcgucgccuacgagucccuccggcccgacacccgcuacgugcugauggacgggagcaucauccaguucccgaacacguaccuggagggcuccgugcgggucgugaccaccuucgacagcgaguacugccgccacgggaccugcgagcgguccgaggcgggggugugcgucagcacguccggccgcugggugcucaacaacgacuacuaccggagccugcccgggguguucugcggcgucgacgccgugaaccugcucaccaacauguucacgccccugauccagcccaucggcgcccuggacaucuccgccagcaucgucgccgggggcaucguggcgaucguggugaccugccucgccuacuacuucaugcgcuuccggcgcgccuucggggaguacagccacgucguggccuucaacacccugcuguuccucauguccuucaccguccugugccugaccccgguguacagcuuccuccccggcguguacuccgucaucuaccuguaccugaccuucuaccucacgaacgacgugagcuuccuggcccacauccaguggauggugauguucacgccccugguccccuucuggaucaccaucgcguacaucaucugcaucuccaccaagcacuucuacugguucuucagcaacuaccucaagcggcgcgugguguucaacggggucuccuucagcaccuucgaggaggccgcccugugcaccuuccugcucaacaaggagauguaccugaagcugcgguccgacgugcuccugccgcugacccaguacaaccgcuaccucgugcuguacaacaaguacaaguacuucagcggcgccauggacaccacguccuaccgggaggcggccugcugccaccuggccaaggcccucaacgacuucagcaacuccggcagcgacgugcuguaccagccgccccagaccuccaucaccagcgcgguccugcaguga

SEQ ID NO: 28103 - RNA, 1506 nt, Artificial Sequence
  SARS-CoV-2/Wuhan-Hu-1__NC_045512.2/MN908947.2/EPI_ISL_402128__non -structural protein 4 (NSP4) CDS gc (1-501)(L439P_T493I)
augaagaucgugaacaacuggcugaagcagcucaucaaggucacccugguguuccuguucguggccgccaucuucuaccucaucacccccguccacgugaugagcaagcacacggacuucuccagcgagaucaucggcuacaaggcgaucgacgggggcgugacccgcgacaucgccuccaccgacacgugcuucgccaacaagcacgccgacuucgacaccugguucagccagcggggcggcuccuacaccaacgacaaggccugcccccugaucgcggccgucaucacccgcgaggugggguucgugguccccggccugcccggcaccauccuccggacgaccaacggggacuuccugcacuuccugccccgcguguucagcgccgugggcaacaucugcuacaccccguccaagcucaucgaguacaccgacuucgccacgagcgcgugcguccuggccgccgagugcaccaucuucaaggacgccuccgggaagcccgugcccuacugcuacgacaccaacgugcuggagggcagcgucgccuacgagucccuccggcccgacacccgcuacgugcugauggacgggagcaucauccaguucccgaacacguaccuggagggcuccgugcgggucgugaccaccuucgacagcgaguacugccgccacgggaccugcgagcgguccgaggcgggggugugcgucagcacguccggccgcugggugcucaacaacgacuacuaccggagccugcccgggguguucugcggcgucgacgccgugaaccugcucaccaacauguucacgccccugauccagcccaucggcgcccuggacaucuccgccagcaucgucgccgggggcaucguggcgaucguggugaccugccucgccuacuacuucaugcgcuuccggcgcgccuucggggaguacagccacgucguggccuucaacacccugcuguuccucauguccuucaccguccugugccugaccccgguguacagcuuccuccccggcguguacuccgucaucuaccuguaccugaccuucuaccucacgaacgacgugagcuuccuggcccacauccaguggauggugauguucacgccccugguccccuucuggaucaccaucgcguacaucaucugcaucuccaccaagcacuucuacugguucuucagcaacuaccucaagcggcgcgugguguucaacggggucuccuucagcaccuucgaggaggccgcccugugcaccuuccugcucaacaaggagauguaccugaagcugcgguccgacgugcuccugccgcccacccaguacaaccgcuaccucgcccuguacaacaaguacaaguacuucagcggcgccauggacaccacguccuaccgggaggcggccugcugccaccuggccaaggcccucaacgacuucagcaacuccggcagcgacgugcuguaccagccgccccagaucuccaucaccagcgcgguccugcaguga

SEQ ID NO: 28104 - RNA, 1506 nt, Artificial Sequence
  SARS-CoV-2/Wuhan-Hu-1__NC_045512.2/MN908947.2/EPI_ISL_402128__non -structural protein 4 (NSP4) CDS gc (1-501)(T115I_S396T)
augaagaucgugaacaacuggcugaagcagcucaucaaggucacccugguguuccuguucguggccgccaucuucuaccucaucacccccguccacgugaugagcaagcacacggacuucuccagcgagaucaucggcuacaaggcgaucgacgggggcgugacccgcgacaucgccuccaccgacacgugcuucgccaacaagcacgccgacuucgacaccugguucagccagcggggcggcuccuacaccaacgacaaggccugcccccugaucgcggccgucaucacccgcgaggugggguucgugguccccggccugcccggcaccauccuccggacgaucaacggggacuuccugcacuuccugccccgcguguucagcgccgugggcaacaucugcuacaccccguccaagcucaucgaguacaccgacuucgccacgagcgcgugcguccuggccgccgagugcaccaucuucaaggacgccuccgggaagcccgugcccuacugcuacgacaccaacgugcuggagggcagcgucgccuacgagucccuccggcccgacacccgcuacgugcugauggacgggagcaucauccaguucccgaacacguaccuggagggcuccgugcgggucgugaccaccuucgacagcgaguacugccgccacgggaccugcgagcgguccgaggcgggggugugcgucagcacguccggccgcugggugcucaacaacgacuacuaccggagccugcccgggguguucugcggcgucgacgccgugaaccugcucaccaacauguucacgccccugauccagcccaucggcgcccuggacaucuccgccagcaucgucgccgggggcaucguggcgaucguggugaccugccucgccuacuacuucaugcgcuuccggcgcgccuucggggaguacagccacgucguggccuucaacacccugcuguuccucauguccuucaccguccugugccugaccccgguguacagcuuccuccccggcguguacuccgucaucuaccuguaccugaccuucuaccucacgaacgacgugagcuuccuggcccacauccaguggauggugauguucacgccccugguccccuucuggaucaccaucgcguacaucaucugcaucuccaccaagcacuucuacugguucuucaccaacuaccucaagcggcgcgugguguucaacggggucuccuucagcaccuucgaggaggccgcccugugcaccuuccugcucaacaaggagauguaccugaagcugcgguccgacgugcuccugccgcugacccaguacaaccgcuaccucgcccuguacaacaaguacaaguacuucagcggcgccauggacaccacguccuaccgggaggcggccugcugccaccuggccaaggcccucaacgacuucagcaacuccggcagcgacgugcuguaccagccgccccagaccuccaucaccagcgcgguccugcaguga

SEQ ID NO: 28105 - RNA, 1506 nt, Artificial Sequence
  SARS-CoV-2/Wuhan-Hu-1__NC_045512.2/MN908947.2/EPI_ISL_402128__non -structural protein 4 (NSP4) CDS gc (1-501)(K400E_L439P_A447V)
augaagaucgugaacaacuggcugaagcagcucaucaaggucacccugguguuccuguucguggccgccaucuucuaccucaucacccccguccacgugaugagcaagcacacggacuucuccagcgagaucaucggcuacaaggcgaucgacgggggcgugacccgcgacaucgccuccaccgacacgugcuucgccaacaagcacgccgacuucgacaccugguucagccagcggggcggcuccuacaccaacgacaaggccugcccccugaucgcggccgucaucacccgcgaggugggguucgugguccccggccugcccggcaccauccuccggacgaccaacggggacuuccugcacuuccugccccgcguguucagcgccgugggcaacaucugcuacaccccguccaagcucaucgaguacaccgacuucgccacgagcgcgugcguccuggccgccgagugcaccaucuucaaggacgccuccgggaagcccgugcccuacugcuacgacaccaacgugcuggagggcagcgucgccuacgagucccuccggcccgacacccgcuacgugcugauggacgggagcaucauccaguucccgaacacguaccuggagggcuccgugcgggucgugaccaccuucgacagcgaguacugccgccacgggaccugcgagcgguccgaggcgggggugugcgucagcacguccggccgcugggugcucaacaacgacuacuaccggagccugcccgggguguucugcggcgucgacgccgugaaccugcucaccaacauguucacgccccugauccagcccaucggcgcccuggacaucuccgccagcaucgucgccgggggcaucguggcgaucguggugaccugccucgccuacuacuucaugcgcuuccggcgcgccuucggggaguacagccacgucguggccuucaacacccugcuguuccucauguccuucaccguccugugccugaccccgguguacagcuuccuccccggcguguacuccgucaucuaccuguaccugaccuucuaccucacgaacgacgugagcuuccuggcccacauccaguggauggugauguucacgccccugguccccuucuggaucaccaucgcguacaucaucugcaucuccaccaagcacuucuacugguucuucagcaacuaccucgagcggcgcgugguguucaacggggucuccuucagcaccuucgaggaggccgcccugugcaccuuccugcucaacaaggagauguaccugaagcugcgguccgacgugcuccugccgcccacccaguacaaccgcuaccucgugcuguacaacaaguacaaguacuucagcggcgccauggacaccacguccuaccgggaggcggccugcugccaccuggccaaggcccucaacgacuucagcaacuccggcagcgacgugcuguaccagccgccccagaccuccaucaccagcgcgguccugcaguga

SEQ ID NO: 28106 - RNA, 1506 nt, Artificial Sequence
  SARS-CoV-2/Wuhan-Hu-1__NC_045512.2/MN908947.2/EPI_ISL_402128__non -structural protein 4 (NSP4) CDS gc (1-501)(L448F)
augaagaucgugaacaacuggcugaagcagcucaucaaggucacccugguguuccuguucguggccgccaucuucuaccucaucacccccguccacgugaugagcaagcacacggacuucuccagcgagaucaucggcuacaaggcgaucgacgggggcgugacccgcgacaucgccuccaccgacacgugcuucgccaacaagcacgccgacuucgacaccugguucagccagcggggcggcuccuacaccaacgacaaggccugcccccugaucgcggccgucaucacccgcgaggugggguucgugguccccggccugcccggcaccauccuccggacgaccaacggggacuuccugcacuuccugccccgcguguucagcgccgugggcaacaucugcuacaccccguccaagcucaucgaguacaccgacuucgccacgagcgcgugcguccuggccgccgagugcaccaucuucaaggacgccuccgggaagcccgugcccuacugcuacgacaccaacgugcuggagggcagcgucgccuacgagucccuccggcccgacacccgcuacgugcugauggacgggagcaucauccaguucccgaacacguaccuggagggcuccgugcgggucgugaccaccuucgacagcgaguacugccgccacgggaccugcgagcgguccgaggcgggggugugcgucagcacguccggccgcugggugcucaacaacgacuacuaccggagccugcccgggguguucugcggcgucgacgccgugaaccugcucaccaacauguucacgccccugauccagcccaucggcgcccuggacaucuccgccagcaucgucgccgggggcaucguggcgaucguggugaccugccucgccuacuacuucaugcgcuuccggcgcgccuucggggaguacagccacgucguggccuucaacacccugcuguuccucauguccuucaccguccugugccugaccccgguguacagcuuccuccccggcguguacuccgucaucuaccuguaccugaccuucuaccucacgaacgacgugagcuuccuggcccacauccaguggauggugauguucacgccccugguccccuucuggaucaccaucgcguacaucaucugcaucuccaccaagcacuucuacugguucuucagcaacuaccucaagcggcgcgugguguucaacggggucuccuucagcaccuucgaggaggccgcccugugcaccuuccugcucaacaaggagauguaccugaagcugcgguccgacgugcuccugccgcugacccaguacaaccgcuaccucgccuucuacaacaaguacaaguacuucagcggcgccauggacaccacguccuaccgggaggcggccugcugccaccuggccaaggcccucaacgacuucagcaacuccggcagcgacgugcuguaccagccgccccagaccuccaucaccagcgcgguccugcaguga

SEQ ID NO: 28107 - RNA, 876 nt, Artificial Sequence
  SARS-CoV-2/Wuhan-Hu-1__NC_045512.2/MN908947.2/EPI_ISL_402128__non -structural protein 6 (NSP6) CDS gc (1-291)(T78A_V150A_I163V_T182I)
augagcgccgugaagcgcaccaucaagggcacccaccacuggcugcuccugacgauccugaccucccuccugguccuggugcagagcacccaguggucccucuucuucuuccuguacgagaacgccuuccugcccuucgcgauggggaucaucgccaugagcgccuucgccaugauguucgugaagcacaagcacgccuuccucugccuguuccugcucccgucccuggcggccgucgccuacuucaacaugguguacaugcccgccagcugggugaugcggaucaugacguggcuggacauggucgacaccucccucagcggcuucaagcugaaggacugcgugauguacgccuccgcggugguccugcucauccugaugaccgcccgcaccguguacgacgacggggcccggcgcguguggacgcugaugaacguccucacccuggccuacaagguguacuacggcaacgcccuggaccaggccgugagcaugugggcgcucaucaucuccgucaccagcaacuacuccgggguggugaccaucgucauguuccuggcccggggcaucguguucaugugcguggaguacugccccaucuucuucaucaccggcaacacccugcagugcaucaugcucgucuacugcuuccugggguacuucugcacgugcuacuucggccuguucugccuccugaaccgcuacuuccggcugacccucgggguguacgacuaccuggugagcacccaggaguuccgcuacaugaacucccagggccugcugcccccgaagaacagcaucgacgccuucaagcucaacaucaagcugcucggggucggcggcaagcccugcaucaagguggccaccguccaguga

SEQ ID NO: 28108 - RNA, 867 nt, Artificial Sequence
  SARS-CoV-2/Wuhan-Hu-1__NC_045512.2/MN908947.2/EPI_ISL_402128__non -structural protein 6 (NSP6) CDS gc (1-291)(S107del_G108del_F109del)
augagcgccgugaagcgcaccaucaagggcacccaccacuggcugcuccugacgauccugaccucccuccugguccuggugcagagcacccaguggucccucuucuucuuccuguacgagaacgccuuccugcccuucgcgauggggaucaucgccaugagcgccuucgccaugauguucgugaagcacaagcacgccuuccucugccuguuccugcucccgucccuggcgaccgucgccuacuucaacaugguguacaugcccgccagcugggugaugcggaucaugacguggcuggacauggucgacaccucccucaagcugaaggacugcgugauguacgccuccgcggugguccugcucauccugaugaccgcccgcaccguguacgacgacggggcccggcgcguguggacgcugaugaacguccucacccugguguacaagguguacuacggcaacgcccuggaccaggccaucagcaugugggcgcucaucaucuccgucaccagcaacuacuccgggguggugaccacggucauguuccuggcccggggcaucguguucaugugcguggaguacugccccaucuucuucaucaccggcaacacccugcagugcaucaugcucgucuacugcuuccugggguacuucugcacgugcuacuucggccuguucugccuccugaaccgcuacuuccggcugacccucgggguguacgacuaccuggugagcacccaggaguuccgcuacaugaacucccagggccugcugcccccgaagaacagcaucgacgccuucaagcucaacaucaagcugcucggggucggcggcaagcccugcaucaagguggccaccguccaguga

SEQ ID NO: 28109 - RNA, 867 nt, Artificial Sequence
  SARS-CoV-2/Wuhan-Hu-1__NC_045512.2/MN908947.2/EPI_ISL_402128__non -structural protein 6 (NSP6) CDS gc (1-291)(S107del_G108del_F109del_M165T)
augagcgccgugaagcgcaccaucaagggcacccaccacuggcugcuccugacgauccugaccucccuccugguccuggugcagagcacccaguggucccucuucuucuuccuguacgagaacgccuuccugcccuucgcgauggggaucaucgccaugagcgccuucgccaugauguucgugaagcacaagcacgccuuccucugccuguuccugcucccgucccuggcgaccgucgccuacuucaacaugguguacaugcccgccagcugggugaugcggaucaugacguggcuggacauggucgacaccucccucaagcugaaggacugcgugauguacgccuccgcggugguccugcucauccugaugaccgcccgcaccguguacgacgacggggcccggcgcguguggacgcugaugaacguccucacccugguguacaagguguacuacggcaacgcccuggaccaggccaucagcaccugggcgcucaucaucuccgucaccagcaacuacuccgggguggugaccacggucauguuccuggcccggggcaucguguucaugugcguggaguacugccccaucuucuucaucaccggcaacacccugcagugcaucaugcucgucuacugcuuccugggguacuucugcacgugcuacuucggccuguucugccuccugaaccgcuacuuccggcugacccucgggguguacgacuaccuggugagcacccaggaguuccgcuacaugaacucccagggccugcugcccccgaagaacagcaucgacgccuucaagcucaacaucaagcugcucggggucggcggcaagcccugcaucaagguggccaccguccaguga

SEQ ID NO: 28110 - RNA, 876 nt, Artificial Sequence
  SARS-CoV-2/Wuhan-Hu-1__NC_045512.2/MN908947.2/EPI_ISL_402128__non -structural protein 6 (NSP6) CDS gc (1-291)(V27G_L38F_F221L_C222F)
augagcgccgugaagcgcaccaucaagggcacccaccacuggcugcuccugacgauccugaccucccuccugguccugggccagagcacccaguggucccucuucuucuucuucuacgagaacgccuuccugcccuucgcgauggggaucaucgccaugagcgccuucgccaugauguucgugaagcacaagcacgccuuccucugccuguuccugcucccgucccuggcgaccgucgccuacuucaacaugguguacaugcccgccagcugggugaugcggaucaugacguggcuggacauggucgacaccucccucagcggcuucaagcugaaggacugcgugauguacgccuccgcggugguccugcucauccugaugaccgcccgcaccguguacgacgacggggcccggcgcguguggacgcugaugaacguccucacccugguguacaagguguacuacggcaacgcccuggaccaggccaucagcaugugggcgcucaucaucuccgucaccagcaacuacuccgggguggugaccacggucauguuccuggcccggggcaucguguucaugugcguggaguacugccccaucuucuucaucaccggcaacacccugcagugcaucaugcucgucuacugcuuccugggguaccuguucacgugcuacuucggccuguucugccuccugaaccgcuacuuccggcugacccucgggguguacgacuaccuggugagcacccaggaguuccgcuacaugaacucccagggccugcugcccccgaagaacagcaucgacgccuucaagcucaacaucaagcugcucggggucggcggcaagcccugcaucaagguggccaccguccaguga

SEQ ID NO: 28111 - RNA, 876 nt, Artificial Sequence
  SARS-CoV-2/Wuhan-Hu-1__NC_045512.2/MN908947.2/EPI_ISL_402128__non -structural protein 6 (NSP6) CDS gc (1-291)(L38F_L126F)
augagcgccgugaagcgcaccaucaagggcacccaccacuggcugcuccugacgauccugaccucccuccugguccuggugcagagcacccaguggucccucuucuucuucuucuacgagaacgccuuccugcccuucgcgauggggaucaucgccaugagcgccuucgccaugauguucgugaagcacaagcacgccuuccucugccuguuccugcucccgucccuggcgaccgucgccuacuucaacaugguguacaugcccgccagcugggugaugcggaucaugacguggcuggacauggucgacaccucccucagcggcuucaagcugaaggacugcgugauguacgccuccgcggugguccugcucaucuucaugaccgcccgcaccguguacgacgacggggcccggcgcguguggacgcugaugaacguccucacccugguguacaagguguacuacggcaacgcccuggaccaggccaucagcaugugggcgcucaucaucuccgucaccagcaacuacuccgggguggugaccacggucauguuccuggcccggggcaucguguucaugugcguggaguacugccccaucuucuucaucaccggcaacacccugcagugcaucaugcucgucuacugcuuccugggguacuucugcacgugcuacuucggccuguucugccuccugaaccgcuacuuccggcugacccucgggguguacgacuaccuggugagcacccaggaguuccgcuacaugaacucccagggccugcugcccccgaagaacagcaucgacgccuucaagcucaacaucaagcugcucggggucggcggcaagcccugcaucaagguggccaccguccaguga

SEQ ID NO: 28112 - RNA, 867 nt, Artificial Sequence
  SARS-CoV-2/Wuhan-Hu-1__NC_045512.2/MN908947.2/EPI_ISL_402128__non -structural protein 6 (NSP6) CDS gc (1-291)(S107del_G108del_F109del_L126F)
augagcgccgugaagcgcaccaucaagggcacccaccacuggcugcuccugacgauccugaccucccuccugguccuggugcagagcacccaguggucccucuucuucuuccuguacgagaacgccuuccugcccuucgcgauggggaucaucgccaugagcgccuucgccaugauguucgugaagcacaagcacgccuuccucugccuguuccugcucccgucccuggcgaccgucgccuacuucaacaugguguacaugcccgccagcugggugaugcggaucaugacguggcuggacauggucgacaccucccucaagcugaaggacugcgugauguacgccuccgcggugguccugcucaucuucaugaccgcccgcaccguguacgacgacggggcccggcgcguguggacgcugaugaacguccucacccugguguacaagguguacuacggcaacgcccuggaccaggccaucagcaugugggcgcucaucaucuccgucaccagcaacuacuccgggguggugaccacggucauguuccuggcccggggcaucguguucaugugcguggaguacugccccaucuucuucaucaccggcaacacccugcagugcaucaugcucgucuacugcuuccugggguacuucugcacgugcuacuucggccuguucugccuccugaaccgcuacuuccggcugacccucgggguguacgacuaccuggugagcacccaggaguuccgcuacaugaacucccagggccugcugcccccgaagaacagcaucgacgccuucaagcucaacaucaagcugcucggggucggcggcaagcccugcaucaagguggccaccguccaguga

SEQ ID NO: 28113 - RNA, 867 nt, Artificial Sequence
  SARS-CoV-2/Wuhan-Hu-1__NC_045512.2/MN908947.2/EPI_ISL_402128__non -structural protein 6 (NSP6) CDS gc (1-291)(S107del_G108del_F109del_V279I)
augagcgccgugaagcgcaccaucaagggcacccaccacuggcugcuccugacgauccugaccucccuccugguccuggugcagagcacccaguggucccucuucuucuuccuguacgagaacgccuuccugcccuucgcgauggggaucaucgccaugagcgccuucgccaugauguucgugaagcacaagcacgccuuccucugccuguuccugcucccgucccuggcgaccgucgccuacuucaacaugguguacaugcccgccagcugggugaugcggaucaugacguggcuggacauggucgacaccucccucaagcugaaggacugcgugauguacgccuccgcggugguccugcucauccugaugaccgcccgcaccguguacgacgacggggcccggcgcguguggacgcugaugaacguccucacccugguguacaagguguacuacggcaacgcccuggaccaggccaucagcaugugggcgcucaucaucuccgucaccagcaacuacuccgggguggugaccacggucauguuccuggcccggggcaucguguucaugugcguggaguacugccccaucuucuucaucaccggcaacacccugcagugcaucaugcucgucuacugcuuccugggguacuucugcacgugcuacuucggccuguucugccuccugaaccgcuacuuccggcugacccucgggguguacgacuaccuggugagcacccaggaguuccgcuacaugaacucccagggccugcugcccccgaagaacagcaucgacgccuucaagcucaacaucaagcugcucgggaucggcggcaagcccugcaucaagguggccaccguccaguga

SEQ ID NO: 28114 - RNA, 828 nt, Artificial Sequence
  SARS-CoV-2/Wuhan-Hu-1__NC_045512.2/MN908947.2/EPI_ISL_402128__ORF 3a protein (ORF3a) CDS gc (1-275)(Q57H_S171L)
auggaccuguucaugcgcaucuucaccaucggcaccgugacgcucaagcagggggagaucaaggacgccacccccagcgacuucguccgggccaccgcgaccaucccgauccaggccucccugcccuucggcuggcugaucguggggguggcccuccuggccgucuuccacagcgccuccaagaucaucacgcugaagaagcgcuggcagcucgcgcugagcaagggcgugcacuucgugugcaaccugcuccugcuguucgucaccguguacucccaccuccugcugguggccgccgggcucgaggcccccuuccuguaccuguacgcgcucgucuacuuccugcagagcaucaacuucgugcggaucaucaugcgccuguggcucugcuggaagugccgguccaagaacccccugcuguacgacgccaacuacuuccucugcuggcacaccaacugcuacgacuacugcaucccguacaacagcgugaccuccagcaucgucaucacgcugggcgacggcaccaccagccccaucuccgagcacgacuaccagaucgggggcuacaccgagaagugggagagcggggugaaggacugcgugguccugcacuccuacuucacgagcgacuacuaccagcuguacuccacccagcucagcaccgacaccggcguggagcacgugacguucuucaucuacaacaagaucgucgacgagcccgaggagcacgugcagauccacaccaucgacggguccagcggcguggucaaccccgugauggagccgaucuacgacgagcccaccaccacgaccagcgugccccuguga

SEQ ID NO: 28115 - RNA, 828 nt, Artificial Sequence
  SARS-CoV-2/Wuhan-Hu-1__NC_045512.2/MN908947.2/EPI_ISL_402128__ORF 3a protein (ORF3a) CDS gc (1-275)(D155Y_S253P)
auggaccuguucaugcgcaucuucaccaucggcaccgugacgcucaagcagggggagaucaaggacgccacccccagcgacuucguccgggccaccgcgaccaucccgauccaggccucccugcccuucggcuggcugaucguggggguggcccuccuggccgucuuccagagcgccuccaagaucaucacgcugaagaagcgcuggcagcucgcgcugagcaagggcgugcacuucgugugcaaccugcuccugcuguucgucaccguguacucccaccuccugcugguggccgccgggcucgaggcccccuuccuguaccuguacgcgcucgucuacuuccugcagagcaucaacuucgugcggaucaucaugcgccuguggcucugcuggaagugccgguccaagaacccccugcuguacgacgccaacuacuuccucugcuggcacaccaacugcuacuacuacugcaucccguacaacagcgugaccuccagcaucgucaucacguccggcgacggcaccaccagccccaucuccgagcacgacuaccagaucgggggcuacaccgagaagugggagagcggggugaaggacugcgugguccugcacuccuacuucacgagcgacuacuaccagcuguacuccacccagcucagcaccgacaccggcguggagcacgugacguucuucaucuacaacaagaucgucgacgagcccgaggagcacgugcagauccacaccaucgacgggucccccggcguggucaaccccgugauggagccgaucuacgacgagcccaccaccacgaccagcgugccccuguga

SEQ ID NO: 28116 - RNA, 828 nt, Artificial Sequence
  SARS-CoV-2/Wuhan-Hu-1__NC_045512.2/MN908947.2/EPI_ISL_402128__ORF 3a protein (ORF3a) CDS gc (1-275)(S253P)
auggaccuguucaugcgcaucuucaccaucggcaccgugacgcucaagcagggggagaucaaggacgccacccccagcgacuucguccgggccaccgcgaccaucccgauccaggccucccugcccuucggcuggcugaucguggggguggcccuccuggccgucuuccagagcgccuccaagaucaucacgcugaagaagcgcuggcagcucgcgcugagcaagggcgugcacuucgugugcaaccugcuccugcuguucgucaccguguacucccaccuccugcugguggccgccgggcucgaggcccccuuccuguaccuguacgcgcucgucuacuuccugcagagcaucaacuucgugcggaucaucaugcgccuguggcucugcuggaagugccgguccaagaacccccugcuguacgacgccaacuacuuccucugcuggcacaccaacugcuacgacuacugcaucccguacaacagcgugaccuccagcaucgucaucacguccggcgacggcaccaccagccccaucuccgagcacgacuaccagaucgggggcuacaccgagaagugggagagcggggugaaggacugcgugguccugcacuccuacuucacgagcgacuacuaccagcuguacuccacccagcucagcaccgacaccggcguggagcacgugacguucuucaucuacaacaagaucgucgacgagcccgaggagcacgugcagauccacaccaucgacgggucccccggcguggucaaccccgugauggagccgaucuacgacgagcccaccaccacgaccagcgugccccuguga

SEQ ID NO: 28117 - RNA, 828 nt, Artificial Sequence
  SARS-CoV-2/Wuhan-Hu-1__NC_045512.2/MN908947.2/EPI_ISL_402128__ORF 3a protein (ORF3a) CDS gc (1-275)(L15F_W131C_T151I)
auggaccuguucaugcgcaucuucaccaucggcaccgugacguucaagcagggggagaucaaggacgccacccccagcgacuucguccgggccaccgcgaccaucccgauccaggccucccugcccuucggcuggcugaucguggggguggcccuccuggccgucuuccagagcgccuccaagaucaucacgcugaagaagcgcuggcagcucgcgcugagcaagggcgugcacuucgugugcaaccugcuccugcuguucgucaccguguacucccaccuccugcugguggccgccgggcucgaggcccccuuccuguaccuguacgcgcucgucuacuuccugcagagcaucaacuucgugcggaucaucaugcgccuguggcucugcugcaagugccgguccaagaacccccugcuguacgacgccaacuacuuccucugcuggcacaucaacugcuacgacuacugcaucccguacaacagcgugaccuccagcaucgucaucacguccggcgacggcaccaccagccccaucuccgagcacgacuaccagaucgggggcuacaccgagaagugggagagcggggugaaggacugcgugguccugcacuccuacuucacgagcgacuacuaccagcuguacuccacccagcucagcaccgacaccggcguggagcacgugacguucuucaucuacaacaagaucgucgacgagcccgaggagcacgugcagauccacaccaucgacggguccagcggcguggucaaccccgugauggagccgaucuacgacgagcccaccaccacgaccagcgugccccuguga

SEQ ID NO: 28118 - RNA, 828 nt, Artificial Sequence
  SARS-CoV-2/Wuhan-Hu-1__NC_045512.2/MN908947.2/EPI_ISL_402128__ORF 3a protein (ORF3a) CDS gc (1-275)(P42L_Q57H)
auggaccuguucaugcgcaucuucaccaucggcaccgugacgcucaagcagggggagaucaaggacgccacccccagcgacuucguccgggccaccgcgaccaucccgauccaggccucccugcuguucggcuggcugaucguggggguggcccuccuggccgucuuccacagcgccuccaagaucaucacgcugaagaagcgcuggcagcucgcgcugagcaagggcgugcacuucgugugcaaccugcuccugcuguucgucaccguguacucccaccuccugcugguggccgccgggcucgaggcccccuuccuguaccuguacgcgcucgucuacuuccugcagagcaucaacuucgugcggaucaucaugcgccuguggcucugcuggaagugccgguccaagaacccccugcuguacgacgccaacuacuuccucugcuggcacaccaacugcuacgacuacugcaucccguacaacagcgugaccuccagcaucgucaucacguccggcgacggcaccaccagccccaucuccgagcacgacuaccagaucgggggcuacaccgagaagugggagagcggggugaaggacugcgugguccugcacuccuacuucacgagcgacuacuaccagcuguacuccacccagcucagcaccgacaccggcguggagcacgugacguucuucaucuacaacaagaucgucgacgagcccgaggagcacgugcagauccacaccaucgacggguccagcggcguggucaaccccgugauggagccgaucuacgacgagcccaccaccacgaccagcgugccccuguga

SEQ ID NO: 28119 - RNA, 825 nt, Artificial Sequence
  SARS-CoV-2/Wuhan-Hu-1__NC_045512.2/MN908947.2/EPI_ISL_402128__ORF 3a protein (ORF3a) CDS gc (1-275)(Q57H_N257del)
auggaccuguucaugcgcaucuucaccaucggcaccgugacgcucaagcagggggagaucaaggacgccacccccagcgacuucguccgggccaccgcgaccaucccgauccaggccucccugcccuucggcuggcugaucguggggguggcccuccuggccgucuuccacagcgccuccaagaucaucacgcugaagaagcgcuggcagcucgcgcugagcaagggcgugcacuucgugugcaaccugcuccugcuguucgucaccguguacucccaccuccugcugguggccgccgggcucgaggcccccuuccuguaccuguacgcgcucgucuacuuccugcagagcaucaacuucgugcggaucaucaugcgccuguggcucugcuggaagugccgguccaagaacccccugcuguacgacgccaacuacuuccucugcuggcacaccaacugcuacgacuacugcaucccguacaacagcgugaccuccagcaucgucaucacguccggcgacggcaccaccagccccaucuccgagcacgacuaccagaucgggggcuacaccgagaagugggagagcggggugaaggacugcgugguccugcacuccuacuucacgagcgacuacuaccagcuguacuccacccagcucagcaccgacaccggcguggagcacgugacguucuucaucuacaacaagaucgucgacgagcccgaggagcacgugcagauccacaccaucgacggguccagcggcgugguccccgugauggagccgaucuacgacgagcccaccaccacgaccagcgugccccuguga

SEQ ID NO: 28120 - RNA, 825 nt, Artificial Sequence
  SARS-CoV-2/Wuhan-Hu-1__NC_045512.2/MN908947.2/EPI_ISL_402128__ORF 3a protein (ORF3a) CDS gc (1-275)(N257del)
auggaccuguucaugcgcaucuucaccaucggcaccgugacgcucaagcagggggagaucaaggacgccacccccagcgacuucguccgggccaccgcgaccaucccgauccaggccucccugcccuucggcuggcugaucguggggguggcccuccuggccgucuuccagagcgccuccaagaucaucacgcugaagaagcgcuggcagcucgcgcugagcaagggcgugcacuucgugugcaaccugcuccugcuguucgucaccguguacucccaccuccugcugguggccgccgggcucgaggcccccuuccuguaccuguacgcgcucgucuacuuccugcagagcaucaacuucgugcggaucaucaugcgccuguggcucugcuggaagugccgguccaagaacccccugcuguacgacgccaacuacuuccucugcuggcacaccaacugcuacgacuacugcaucccguacaacagcgugaccuccagcaucgucaucacguccggcgacggcaccaccagccccaucuccgagcacgacuaccagaucgggggcuacaccgagaagugggagagcggggugaaggacugcgugguccugcacuccuacuucacgagcgacuacuaccagcuguacuccacccagcucagcaccgacaccggcguggagcacgugacguucuucaucuacaacaagaucgucgacgagcccgaggagcacgugcagauccacaccaucgacggguccagcggcgugguccccgugauggagccgaucuacgacgagcccaccaccacgaccagcgugccccuguga

SEQ ID NO: 28121 - RNA, 828 nt, Artificial Sequence
  SARS-CoV-2/Wuhan-Hu-1__NC_045512.2/MN908947.2/EPI_ISL_402128__ORF 3a protein (ORF3a) CDS gc (1-275)(P42L_Q57H_P104L)
auggaccuguucaugcgcaucuucaccaucggcaccgugacgcucaagcagggggagaucaaggacgccacccccagcgacuucguccgggccaccgcgaccaucccgauccaggccucccugcuguucggcuggcugaucguggggguggcccuccuggccgucuuccacagcgccuccaagaucaucacgcugaagaagcgcuggcagcucgcgcugagcaagggcgugcacuucgugugcaaccugcuccugcuguucgucaccguguacucccaccuccugcugguggccgccgggcucgaggcccuguuccuguaccuguacgcgcucgucuacuuccugcagagcaucaacuucgugcggaucaucaugcgccuguggcucugcuggaagugccgguccaagaacccccugcuguacgacgccaacuacuuccucugcuggcacaccaacugcuacgacuacugcaucccguacaacagcgugaccuccagcaucgucaucacguccggcgacggcaccaccagccccaucuccgagcacgacuaccagaucgggggcuacaccgagaagugggagagcggggugaaggacugcgugguccugcacuccuacuucacgagcgacuacuaccagcuguacuccacccagcucagcaccgacaccggcguggagcacgugacguucuucaucuacaacaagaucgucgacgagcccgaggagcacgugcagauccacaccaucgacggguccagcggcguggucaaccccgugauggagccgaucuacgacgagcccaccaccacgaccagcgugccccuguga

SEQ ID NO: 28122 - RNA, 366 nt, Artificial Sequence
  SARS-CoV-2/Wuhan-Hu-1__NC_045512.2/MN908947.2/EPI_ISL_402128__ORF 8 protein (ORF8) CDS gc (1-121)(R52I_Y73C)
augaaguuccugguguuccucggcaucaucaccaccgucgccgccuuccaccaggagugcagccugcaguccugcacgcagcaccagcccuacgugguggacgacccgugccccauccacuucuacagcaagugguacauccgcgucggggccaucaaguccgcgccccugaucgagcucugcguggacgaggccggcagcaagucccccauccagugcaucgacaucgggaacuacaccgugagcugccugccguucaccaucaacugccaggagcccaagcugggcucccucgucgugcgcugcagcuucuacgaggacuuccuggaguaccacgacgugcgggucgugcuggacuucaucuga

SEQ ID NO: 28123 - RNA, 366 nt, Artificial Sequence
  SARS-CoV-2/Wuhan-Hu-1__NC_045512.2/MN908947.2/EPI_ISL_402128__ORF 8 protein (ORF8) CDS gc (1-121)(E92K)
augaaguuccugguguuccucggcaucaucaccaccgucgccgccuuccaccaggagugcagccugcaguccugcacgcagcaccagcccuacgugguggacgacccgugccccauccacuucuacagcaagugguacauccgcgucggggcccggaaguccgcgccccugaucgagcucugcguggacgaggccggcagcaagucccccauccaguacaucgacaucgggaacuacaccgugagcugccugccguucaccaucaacugccagaagcccaagcugggcucccucgucgugcgcugcagcuucuacgaggacuuccuggaguaccacgacgugcgggucgugcuggacuucaucuga

SEQ ID NO: 28124 - RNA, 360 nt, Artificial Sequence
  SARS-CoV-2/Wuhan-Hu-1__NC_045512.2/MN908947.2/EPI_ISL_402128__ORF 8 protein (ORF8) CDS gc (1-121)(D119I_F120del_I121del)
augaaguuccugguguuccucggcaucaucaccaccgucgccgccuuccaccaggagugcagccugcaguccugcacgcagcaccagcccuacgugguggacgacccgugccccauccacuucuacagcaagugguacauccgcgucggggcccggaaguccgcgccccugaucgagcucugcguggacgaggccggcagcaagucccccauccaguacaucgacaucgggaacuacaccgugagcugccugccguucaccaucaacugccaggagcccaagcugggcucccucgucgugcgcugcagcuucuacgaggacuuccuggaguaccacgacgugcgggucgugcugaucuga

SEQ ID NO: 28125 - RNA, 366 nt, Artificial Sequence
  SARS-CoV-2/Wuhan-Hu-1__NC_045512.2/MN908947.2/EPI_ISL_402128__ORF 8 protein (ORF8) CDS gc (1-121)(K44R_F120V_I121L)
augaaguuccugguguuccucggcaucaucaccaccgucgccgccuuccaccaggagugcagccugcaguccugcacgcagcaccagcccuacgugguggacgacccgugccccauccacuucuacagccgcugguacauccgcgucggggcccggaaguccgcgccccugaucgagcucugcguggacgaggccggcagcaagucccccauccaguacaucgacaucgggaacuacaccgugagcugccugccguucaccaucaacugccaggagcccaagcugggcucccucgucgugcgcugcagcuucuacgaggacuuccuggaguaccacgacgugcgggucgugcuggacgugcuguga

SEQ ID NO: 28126 - RNA, 366 nt, Artificial Sequence
  SARS-CoV-2/Wuhan-Hu-1__NC_045512.2/MN908947.2/EPI_ISL_402128__ORF 8 protein (ORF8) CDS gc (1-121)(K2Q)
augcaguuccugguguuccucggcaucaucaccaccgucgccgccuuccaccaggagugcagccugcaguccugcacgcagcaccagcccuacgugguggacgacccgugccccauccacuucuacagcaagugguacauccgcgucggggcccggaaguccgcgccccugaucgagcucugcguggacgaggccggcagcaagucccccauccaguacaucgacaucgggaacuacaccgugagcugccugccguucaccaucaacugccaggagcccaagcugggcucccucgucgugcgcugcagcuucuacgaggacuuccuggaguaccacgacgugcgggucgugcuggacuucaucuga

SEQ ID NO: 28127 - RNA, 366 nt, Artificial Sequence
  SARS-CoV-2/Wuhan-Hu-1__NC_045512.2/MN908947.2/EPI_ISL_402128__ORF 8 protein (ORF8) CDS gc (1-121)(T11I)
augaaguuccugguguuccucggcaucaucaucaccgucgccgccuuccaccaggagugcagccugcaguccugcacgcagcaccagcccuacgugguggacgacccgugccccauccacuucuacagcaagugguacauccgcgucggggcccggaaguccgcgccccugaucgagcucugcguggacgaggccggcagcaagucccccauccaguacaucgacaucgggaacuacaccgugagcugccugccguucaccaucaacugccaggagcccaagcugggcucccucgucgugcgcugcagcuucuacgaggacuuccuggaguaccacgacgugcgggucgugcuggacuucaucuga

SEQ ID NO: 28128 - RNA, 366 nt, Artificial Sequence
  SARS-CoV-2/Wuhan-Hu-1__NC_045512.2/MN908947.2/EPI_ISL_402128__ORF 8 protein (ORF8) CDS gc (1-121)(T11K_P38S_S67F)
augaaguuccugguguuccucggcaucaucaagaccgucgccgccuuccaccaggagugcagccugcaguccugcacgcagcaccagcccuacgugguggacgacccgugcagcauccacuucuacagcaagugguacauccgcgucggggcccggaaguccgcgccccugaucgagcucugcguggacgaggccggcuucaagucccccauccaguacaucgacaucgggaacuacaccgugagcugccugccguucaccaucaacugccaggagcccaagcugggcucccucgucgugcgcugcagcuucuacgaggacuuccuggaguaccacgacgugcgggucgugcuggacuucaucuga

SEQ ID NO: 28129 - RNA, 366 nt, Artificial Sequence
  SARS-CoV-2/Wuhan-Hu-1__NC_045512.2/MN908947.2/EPI_ISL_402128__ORF 8 protein (ORF8) CDS gc (1-121)(T26I)
augaaguuccugguguuccucggcaucaucaccaccgucgccgccuuccaccaggagugcagccugcaguccugcauccagcaccagcccuacgugguggacgacccgugccccauccacuucuacagcaagugguacauccgcgucggggcccggaaguccgcgccccugaucgagcucugcguggacgaggccggcagcaagucccccauccaguacaucgacaucgggaacuacaccgugagcugccugccguucaccaucaacugccaggagcccaagcugggcucccucgucgugcgcugcagcuucuacgaggacuuccuggaguaccacgacgugcgggucgugcuggacuucaucuga

SEQ ID NO: 28130 - RNA, 366 nt, Artificial Sequence
  SARS-CoV-2/Wuhan-Hu-1__NC_045512.2/MN908947.2/EPI_ISL_402128__ORF 8 protein (ORF8) CDS gc (1-121)(F3Y)
augaaguaccugguguuccucggcaucaucaccaccgucgccgccuuccaccaggagugcagccugcaguccugcacgcagcaccagcccuacgugguggacgacccgugccccauccacuucuacagcaagugguacauccgcgucggggcccggaaguccgcgccccugaucgagcucugcguggacgaggccggcagcaagucccccauccaguacaucgacaucgggaacuacaccgugagcugccugccguucaccaucaacugccaggagcccaagcugggcucccucgucgugcgcugcagcuucuacgaggacuuccuggaguaccacgacgugcgggucgugcuggacuucaucuga

SEQ ID NO: 28131 - RNA, 366 nt, Artificial Sequence
  SARS-CoV-2/Wuhan-Hu-1__NC_045512.2/MN908947.2/EPI_ISL_402128__ORF 8 protein (ORF8) CDS gc (1-121)(T11I_A51S)
augaaguuccugguguuccucggcaucaucaucaccgucgccgccuuccaccaggagugcagccugcaguccugcacgcagcaccagcccuacgugguggacgacccgugccccauccacuucuacagcaagugguacauccgcgucgggagccggaaguccgcgccccugaucgagcucugcguggacgaggccggcagcaagucccccauccaguacaucgacaucgggaacuacaccgugagcugccugccguucaccaucaacugccaggagcccaagcugggcucccucgucgugcgcugcagcuucuacgaggacuuccuggaguaccacgacgugcgggucgugcuggacuucaucuga

SEQ ID NO: 28132 - RNA, 366 nt, Artificial Sequence
  SARS-CoV-2/Wuhan-Hu-1__NC_045512.2/MN908947.2/EPI_ISL_402128__ORF 8 protein (ORF8) CDS gc (1-121)(V32L_V100L)
augaaguuccugguguuccucggcaucaucaccaccgucgccgccuuccaccaggagugcagccugcaguccugcacgcagcaccagcccuaccugguggacgacccgugccccauccacuucuacagcaagugguacauccgcgucggggcccggaaguccgcgccccugaucgagcucugcguggacgaggccggcagcaagucccccauccaguacaucgacaucgggaacuacaccgugagcugccugccguucaccaucaacugccaggagcccaagcugggcucccucguccugcgcugcagcuucuacgaggacuuccuggaguaccacgacgugcgggucgugcuggacuucaucuga

SEQ ID NO: 28133 - RNA, 366 nt, Artificial Sequence
  SARS-CoV-2/Wuhan-Hu-1__NC_045512.2/MN908947.2/EPI_ISL_402128__ORF 8 protein (ORF8) CDS gc (1-121)(A65V)
augaaguuccugguguuccucggcaucaucaccaccgucgccgccuuccaccaggagugcagccugcaguccugcacgcagcaccagcccuacgugguggacgacccgugccccauccacuucuacagcaagugguacauccgcgucggggcccggaaguccgcgccccugaucgagcucugcguggacgaggugggcagcaagucccccauccaguacaucgacaucgggaacuacaccgugagcugccugccguucaccaucaacugccaggagcccaagcugggcucccucgucgugcgcugcagcuucuacgaggacuuccuggaguaccacgacgugcgggucgugcuggacuucaucuga

SEQ ID NO: 28134 - RNA, 1809 nt, Artificial Sequence
  SARS-CoV-2/Wuhan-Hu-1__NC_045512.2/MN908947.2/EPI_ISL_402128__non -structural protein 13 (NSP13) CDS gc (1-602)(P78L)
auggccgugggcgccugcguccugugcaacagccagaccucccuccgcugcggggcgugcauccggcgccccuuccugugcugcaagugcugcuacgaccacgugaucagcaccucccacaagcuggugcucagcgucaacccguacgugugcaacgcccccggcugcgacgugacggacgucacccagcuguaccucgggggcauguccuacuacugcaagagccacaagcugcccaucuccuucccccugugcgccaacggccagguguucggccuguacaagaacacgugcgugggcagcgacaacgucaccgacuucaacgccaucgcgaccugcgacuggaccaacgccggggacuacauccuggccaacacgugcaccgagcggcucaagcuguucgccgccgagacccugaaggcgaccgaggagaccuucaagcucuccuacggcaucgccaccgugcgcgaggugcugagcgaccgggagcugcaccucuccugggaggucgggaagccccgcccgccccugaaccggaacuacguguucacgggcuaccgcgugaccaagaacagcaagguccagaucggggaguacaccuucgagaagggcgacuacggcgacgccgugguguaccgggggaccacgaccuacaagcugaacgucggcgacuacuucgugcucaccucccacaccgugaugccccugagcgcccccacgcuggucccccaggagcacuacgugcgcaucaccgggcucuaccccacccugaacaucuccgacgaguucagcuccaacguggccaacuaccagaaggucggcaugcagaaguacagcacccugcagggcccgcccgggacgggcaagucccacuucgcgaucgggcucgcccuguacuaccccagcgcccggaucguguacaccgccugcagccacgccgcggucgacgcccugugcgagaaggcccucaaguaccugcccaucgacaagugcucccgcaucaucccggcccgggcccgcguggagugcuucgacaaguucaaggugaacagcacccuggagcaguacgucuucugcaccgugaacgcgcuccccgagacgaccgccgacaucguggucuucgacgagaucuccauggccaccaacuacgaccugagcguggugaacgcccggcugcgcgccaagcacuacgucuacaucggcgaccccgcgcagcuccccgccccgcggacccugcugacgaaggggacccucgagcccgaguacuucaacuccgugugccgccugaugaagaccaucggccccgacauguuccuggggaccugccggcgcugccccgccgagaucguggacacggucagcgcccucguguacgacaacaagcugaaggcgcacaaggacaaguccgcccagugcuucaagauguucuacaagggggugaucacccacgacgucagcuccgccaucaaccggccgcagaucggcguggugcgcgaguuccugacccgcaaccccgccuggcggaaggccgucuucaucagccccuacaacucccagaacgcgguggccagcaagauccucgggcugcccacccagaccguggacuccagccagggcuccgaguacgacuacgucaucuucacgcagaccaccgagaccgcccacagcugcaacgugaaccgcuucaacguggccaucacgcgggccaaggucgggauccugugcaucauguccgaccgcgaccucuacgacaagcugcaguucaccagccuggagaucccgcggcgcaacguggcgacccugcaguga

SEQ ID NO: 28135 - RNA, 1809 nt, Artificial Sequence
  SARS-CoV-2/Wuhan-Hu-1__NC_045512.2/MN908947.2/EPI_ISL_402128__non -structural protein 13 (NSP13) CDS gc (1-602)(P79S_K461R)
auggccgugggcgccugcguccugugcaacagccagaccucccuccgcugcggggcgugcauccggcgccccuuccugugcugcaagugcugcuacgaccacgugaucagcaccucccacaagcuggugcucagcgucaacccguacgugugcaacgcccccggcugcgacgugacggacgucacccagcuguaccucgggggcauguccuacuacugcaagagccacaagccgagcaucuccuucccccugugcgccaacggccagguguucggccuguacaagaacacgugcgugggcagcgacaacgucaccgacuucaacgccaucgcgaccugcgacuggaccaacgccggggacuacauccuggccaacacgugcaccgagcggcucaagcuguucgccgccgagacccugaaggcgaccgaggagaccuucaagcucuccuacggcaucgccaccgugcgcgaggugcugagcgaccgggagcugcaccucuccugggaggucgggaagccccgcccgccccugaaccggaacuacguguucacgggcuaccgcgugaccaagaacagcaagguccagaucggggaguacaccuucgagaagggcgacuacggcgacgccgugguguaccgggggaccacgaccuacaagcugaacgucggcgacuacuucgugcucaccucccacaccgugaugccccugagcgcccccacgcuggucccccaggagcacuacgugcgcaucaccgggcucuaccccacccugaacaucuccgacgaguucagcuccaacguggccaacuaccagaaggucggcaugcagaaguacagcacccugcagggcccgcccgggacgggcaagucccacuucgcgaucgggcucgcccuguacuaccccagcgcccggaucguguacaccgccugcagccacgccgcggucgacgcccugugcgagaaggcccucaaguaccugcccaucgacaagugcucccgcaucaucccggcccgggcccgcguggagugcuucgacaaguucaaggugaacagcacccuggagcaguacgucuucugcaccgugaacgcgcuccccgagacgaccgccgacaucguggucuucgacgagaucuccauggccaccaacuacgaccugagcguggugaacgcccggcugcgcgccaagcacuacgucuacaucggcgaccccgcgcagcuccccgccccgcggacccugcugacgaaggggacccucgagcccgaguacuucaacuccgugugccgccugaugaagaccaucggccccgacauguuccuggggaccugccggcgcugccccgccgagaucguggacacggucagcgcccucguguacgacaacagccugaaggcgcacaaggacaaguccgcccagugcuucaagauguucuacaagggggugaucacccacgacgucagcuccgccaucaaccggccgcagaucggcguggugcgcgaguuccugacccgcaaccccgccuggcggaaggccgucuucaucagccccuacaacucccagaacgcgguggccagcaagauccucgggcugcccacccagaccguggacuccagccagggcuccgaguacgacuacgucaucuucacgcagaccaccgagaccgcccacagcugcaacgugaaccgcuucaacguggccaucacgcgggccaaggucgggauccugugcaucauguccgaccgcgaccucuacgacaagcugcaguucaccagccuggagaucccgcggcgcaacguggcgacccugcaguga

SEQ ID NO: 28136 - RNA, 1809 nt, Artificial Sequence
  SARS-CoV-2/Wuhan-Hu-1__NC_045512.2/MN908947.2/EPI_ISL_402128__non -structural protein 13 (NSP13) CDS gc (1-602)(E342D)
auggccgugggcgccugcguccugugcaacagccagaccucccuccgcugcggggcgugcauccggcgccccuuccugugcugcaagugcugcuacgaccacgugaucagcaccucccacaagcuggugcucagcgucaacccguacgugugcaacgcccccggcugcgacgugacggacgucacccagcuguaccucgggggcauguccuacuacugcaagagccacaagccgcccaucuccuucccccugugcgccaacggccagguguucggccuguacaagaacacgugcgugggcagcgacaacgucaccgacuucaacgccaucgcgaccugcgacuggaccaacgccggggacuacauccuggccaacacgugcaccgagcggcucaagcuguucgccgccgagacccugaaggcgaccgaggagaccuucaagcucuccuacggcaucgccaccgugcgcgaggugcugagcgaccgggagcugcaccucuccugggaggucgggaagccccgcccgccccugaaccggaacuacguguucacgggcuaccgcgugaccaagaacagcaagguccagaucggggaguacaccuucgagaagggcgacuacggcgacgccgugguguaccgggggaccacgaccuacaagcugaacgucggcgacuacuucgugcucaccucccacaccgugaugccccugagcgcccccacgcuggucccccaggagcacuacgugcgcaucaccgggcucuaccccacccugaacaucuccgacgaguucagcuccaacguggccaacuaccagaaggucggcaugcagaaguacagcacccugcagggcccgcccgggacgggcaagucccacuucgcgaucgggcucgcccuguacuaccccagcgcccggaucguguacaccgccugcagccacgccgcggucgacgcccugugcgagaaggcccucaaguaccugcccaucgacaagugcucccgcaucaucccggcccgggcccgcguggacugcuucgacaaguucaaggugaacagcacccuggagcaguacgucuucugcaccgugaacgcgcuccccgagacgaccgccgacaucguggucuucgacgagaucuccauggccaccaacuacgaccugagcguggugaacgcccggcugcgcgccaagcacuacgucuacaucggcgaccccgcgcagcuccccgccccgcggacccugcugacgaaggggacccucgagcccgaguacuucaacuccgugugccgccugaugaagaccaucggccccgacauguuccuggggaccugccggcgcugccccgccgagaucguggacacggucagcgcccucguguacgacaacaagcugaaggcgcacaaggacaaguccgcccagugcuucaagauguucuacaagggggugaucacccacgacgucagcuccgccaucaaccggccgcagaucggcguggugcgcgaguuccugacccgcaaccccgccuggcggaaggccgucuucaucagccccuacaacucccagaacgcgguggccagcaagauccucgggcugcccacccagaccguggacuccagccagggcuccgaguacgacuacgucaucuucacgcagaccaccgagaccgcccacagcugcaacgugaaccgcuucaacguggccaucacgcgggccaaggucgggauccugugcaucauguccgaccgcgaccucuacgacaagcugcaguucaccagccuggagaucccgcggcgcaacguggcgacccugcaguga

SEQ ID NO: 28137 - RNA, 1809 nt, Artificial Sequence
  SARS-CoV-2/Wuhan-Hu-1__NC_045512.2/MN908947.2/EPI_ISL_402128__non -structural protein 13 (NSP13) CDS gc (1-602)(T589I)
auggccgugggcgccugcguccugugcaacagccagaccucccuccgcugcggggcgugcauccggcgccccuuccugugcugcaagugcugcuacgaccacgugaucagcaccucccacaagcuggugcucagcgucaacccguacgugugcaacgcccccggcugcgacgugacggacgucacccagcuguaccucgggggcauguccuacuacugcaagagccacaagccgcccaucuccuucccccugugcgccaacggccagguguucggccuguacaagaacacgugcgugggcagcgacaacgucaccgacuucaacgccaucgcgaccugcgacuggaccaacgccggggacuacauccuggccaacacgugcaccgagcggcucaagcuguucgccgccgagacccugaaggcgaccgaggagaccuucaagcucuccuacggcaucgccaccgugcgcgaggugcugagcgaccgggagcugcaccucuccugggaggucgggaagccccgcccgccccugaaccggaacuacguguucacgggcuaccgcgugaccaagaacagcaagguccagaucggggaguacaccuucgagaagggcgacuacggcgacgccgugguguaccgggggaccacgaccuacaagcugaacgucggcgacuacuucgugcucaccucccacaccgugaugccccugagcgcccccacgcuggucccccaggagcacuacgugcgcaucaccgggcucuaccccacccugaacaucuccgacgaguucagcuccaacguggccaacuaccagaaggucggcaugcagaaguacagcacccugcagggcccgcccgggacgggcaagucccacuucgcgaucgggcucgcccuguacuaccccagcgcccggaucguguacaccgccugcagccacgccgcggucgacgcccugugcgagaaggcccucaaguaccugcccaucgacaagugcucccgcaucaucccggcccgggcccgcguggagugcuucgacaaguucaaggugaacagcacccuggagcaguacgucuucugcaccgugaacgcgcuccccgagacgaccgccgacaucguggucuucgacgagaucuccauggccaccaacuacgaccugagcguggugaacgcccggcugcgcgccaagcacuacgucuacaucggcgaccccgcgcagcuccccgccccgcggacccugcugacgaaggggacccucgagcccgaguacuucaacuccgugugccgccugaugaagaccaucggccccgacauguuccuggggaccugccggcgcugccccgccgagaucguggacacggucagcgcccucguguacgacaacaagcugaaggcgcacaaggacaaguccgcccagugcuucaagauguucuacaagggggugaucacccacgacgucagcuccgccaucaaccggccgcagaucggcguggugcgcgaguuccugacccgcaaccccgccuggcggaaggccgucuucaucagccccuacaacucccagaacgcgguggccagcaagauccucgggcugcccacccagaccguggacuccagccagggcuccgaguacgacuacgucaucuucacgcagaccaccgagaccgcccacagcugcaacgugaaccgcuucaacguggccaucacgcgggccaaggucgggauccugugcaucauguccgaccgcgaccucuacgacaagcugcaguucaucagccuggagaucccgcggcgcaacguggcgacccugcaguga

SEQ ID NO: 28138 - RNA, 1809 nt, Artificial Sequence
  SARS-CoV-2/Wuhan-Hu-1__NC_045512.2/MN908947.2/EPI_ISL_402128__non -structural protein 13 (NSP13) CDS gc (1-602)(P54L_D261Y)
auggccgugggcgccugcguccugugcaacagccagaccucccuccgcugcggggcgugcauccggcgccccuuccugugcugcaagugcugcuacgaccacgugaucagcaccucccacaagcuggugcucagcgucaacccguacgugugcaacgcccugggcugcgacgugacggacgucacccagcuguaccucgggggcauguccuacuacugcaagagccacaagccgcccaucuccuucccccugugcgccaacggccagguguucggccuguacaagaacacgugcgugggcagcgacaacgucaccgacuucaacgccaucgcgaccugcgacuggaccaacgccggggacuacauccuggccaacacgugcaccgagcggcucaagcuguucgccgccgagacccugaaggcgaccgaggagaccuucaagcucuccuacggcaucgccaccgugcgcgaggugcugagcgaccgggagcugcaccucuccugggaggucgggaagccccgcccgccccugaaccggaacuacguguucacgggcuaccgcgugaccaagaacagcaagguccagaucggggaguacaccuucgagaagggcgacuacggcgacgccgugguguaccgggggaccacgaccuacaagcugaacgucggcgacuacuucgugcucaccucccacaccgugaugccccugagcgcccccacgcuggucccccaggagcacuacgugcgcaucaccgggcucuaccccacccugaacaucuccuacgaguucagcuccaacguggccaacuaccagaaggucggcaugcagaaguacagcacccugcagggcccgcccgggacgggcaagucccacuucgcgaucgggcucgcccuguacuaccccagcgcccggaucguguacaccgccugcagccacgccgcggucgacgcccugugcgagaaggcccucaaguaccugcccaucgacaagugcucccgcaucaucccggcccgggcccgcguggagugcuucgacaaguucaaggugaacagcacccuggagcaguacgucuucugcaccgugaacgcgcuccccgagacgaccgccgacaucguggucuucgacgagaucuccauggccaccaacuacgaccugagcguggugaacgcccggcugcgcgccaagcacuacgucuacaucggcgaccccgcgcagcuccccgccccgcggacccugcugacgaaggggacccucgagcccgaguacuucaacuccgugugccgccugaugaagaccaucggccccgacauguuccuggggaccugccggcgcugccccgccgagaucguggacacggucagcgcccucguguacgacaacaagcugaaggcgcacaaggacaaguccgcccagugcuucaagauguucuacaagggggugaucacccacgacgucagcuccgccaucaaccggccgcagaucggcguggugcgcgaguuccugacccgcaaccccgccuggcggaaggccgucuucaucagccccuacaacucccagaacgcgguggccagcaagauccucgggcugcccacccagaccguggacuccagccagggcuccgaguacgacuacgucaucuucacgcagaccaccgagaccgcccacagcugcaacgugaaccgcuucaacguggccaucacgcgggccaaggucgggauccugugcaucauguccgaccgcgaccucuacgacaagcugcaguucaccagccuggagaucccgcggcgcaacguggcgacccugcaguga

SEQ ID NO: 28139 - RNA, 1809 nt, Artificial Sequence
  SARS-CoV-2/Wuhan-Hu-1__NC_045512.2/MN908947.2/EPI_ISL_402128__non -structural protein 13 (NSP13) CDS gc (1-602)(Q89H_H165Y)
auggccgugggcgccugcguccugugcaacagccagaccucccuccgcugcggggcgugcauccggcgccccuuccugugcugcaagugcugcuacgaccacgugaucagcaccucccacaagcuggugcucagcgucaacccguacgugugcaacgcccccggcugcgacgugacggacgucacccagcuguaccucgggggcauguccuacuacugcaagagccacaagccgcccaucuccuucccccugugcgccaacggccacguguucggccuguacaagaacacgugcgugggcagcgacaacgucaccgacuucaacgccaucgcgaccugcgacuggaccaacgccggggacuacauccuggccaacacgugcaccgagcggcucaagcuguucgccgccgagacccugaaggcgaccgaggagaccuucaagcucuccuacggcaucgccaccgugcgcgaggugcugagcgaccgggagcuguaccucuccugggaggucgggaagccccgcccgccccugaaccggaacuacguguucacgggcuaccgcgugaccaagaacagcaagguccagaucggggaguacaccuucgagaagggcgacuacggcgacgccgugguguaccgggggaccacgaccuacaagcugaacgucggcgacuacuucgugcucaccucccacaccgugaugccccugagcgcccccacgcuggucccccaggagcacuacgugcgcaucaccgggcucuaccccacccugaacaucuccgacgaguucagcuccaacguggccaacuaccagaaggucggcaugcagaaguacagcacccugcagggcccgcccgggacgggcaagucccacuucgcgaucgggcucgcccuguacuaccccagcgcccggaucguguacaccgccugcagccacgccgcggucgacgcccugugcgagaaggcccucaaguaccugcccaucgacaagugcucccgcaucaucccggcccgggcccgcguggagugcuucgacaaguucaaggugaacagcacccuggagcaguacgucuucugcaccgugaacgcgcuccccgagacgaccgccgacaucguggucuucgacgagaucuccauggccaccaacuacgaccugagcguggugaacgcccggcugcgcgccaagcacuacgucuacaucggcgaccccgcgcagcuccccgccccgcggacccugcugacgaaggggacccucgagcccgaguacuucaacuccgugugccgccugaugaagaccaucggccccgacauguuccuggggaccugccggcgcugccccgccgagaucguggacacggucagcgcccucguguacgacaacaagcugaaggcgcacaaggacaaguccgcccagugcuucaagauguucuacaagggggugaucacccacgacgucagcuccgccaucaaccggccgcagaucggcguggugcgcgaguuccugacccgcaaccccgccuggcggaaggccgucuucaucagccccuacaacucccagaacgcgguggccagcaagauccucgggcugcccacccagaccguggacuccagccagggcuccgaguacgacuacgucaucuucacgcagaccaccgagaccgcccacagcugcaacgugaaccgcuucaacguggccaucacgcgggccaaggucgggauccugugcaucauguccgaccgcgaccucuacgacaagcugcaguucaccagccuggagaucccgcggcgcaacguggcgacccugcaguga

SEQ ID NO: 28140 - RNA, 1809 nt, Artificial Sequence
  SARS-CoV-2/Wuhan-Hu-1__NC_045512.2/MN908947.2/EPI_ISL_402128__non -structural protein 13 (NSP13) CDS gc (1-602)(D106Y_P530L)
auggccgugggcgccugcguccugugcaacagccagaccucccuccgcugcggggcgugcauccggcgccccuuccugugcugcaagugcugcuacgaccacgugaucagcaccucccacaagcuggugcucagcgucaacccguacgugugcaacgcccccggcugcgacgugacggacgucacccagcuguaccucgggggcauguccuacuacugcaagagccacaagccgcccaucuccuucccccugugcgccaacggccagguguucggccuguacaagaacacgugcgugggcagcgacaacgucaccuacuucaacgccaucgcgaccugcgacuggaccaacgccggggacuacauccuggccaacacgugcaccgagcggcucaagcuguucgccgccgagacccugaaggcgaccgaggagaccuucaagcucuccuacggcaucgccaccgugcgcgaggugcugagcgaccgggagcugcaccucuccugggaggucgggaagccccgcccgccccugaaccggaacuacguguucacgggcuaccgcgugaccaagaacagcaagguccagaucggggaguacaccuucgagaagggcgacuacggcgacgccgugguguaccgggggaccacgaccuacaagcugaacgucggcgacuacuucgugcucaccucccacaccgugaugccccugagcgcccccacgcuggucccccaggagcacuacgugcgcaucaccgggcucuaccccacccugaacaucuccgacgaguucagcuccaacguggccaacuaccagaaggucggcaugcagaaguacagcacccugcagggcccgcccgggacgggcaagucccacuucgcgaucgggcucgcccuguacuaccccagcgcccggaucguguacaccgccugcagccacgccgcggucgacgcccugugcgagaaggcccucaaguaccugcccaucgacaagugcucccgcaucaucccggcccgggcccgcguggagugcuucgacaaguucaaggugaacagcacccuggagcaguacgucuucugcaccgugaacgcgcuccccgagacgaccgccgacaucguggucuucgacgagaucuccauggccaccaacuacgaccugagcguggugaacgcccggcugcgcgccaagcacuacgucuacaucggcgaccccgcgcagcuccccgccccgcggacccugcugacgaaggggacccucgagcccgaguacuucaacuccgugugccgccugaugaagaccaucggccccgacauguuccuggggaccugccggcgcugccccgccgagaucguggacacggucagcgcccucguguacgacaacaagcugaaggcgcacaaggacaaguccgcccagugcuucaagauguucuacaagggggugaucacccacgacgucagcuccgccaucaaccggccgcagaucggcguggugcgcgaguuccugacccgcaaccccgccuggcggaaggccgucuucaucagccccuacaacucccagaacgcgguggccagcaagauccucgggcugcugacccagaccguggacuccagccagggcuccgaguacgacuacgucaucuucacgcagaccaccgagaccgcccacagcugcaacgugaaccgcuucaacguggccaucacgcgggccaaggucgggauccugugcaucauguccgaccgcgaccucuacgacaagcugcaguucaccagccuggagaucccgcggcgcaacguggcgacccugcaguga

SEQ ID NO: 28141 - RNA, 1809 nt, Artificial Sequence
  SARS-CoV-2/Wuhan-Hu-1__NC_045512.2/MN908947.2/EPI_ISL_402128__non -structural protein 13 (NSP13) CDS gc (1-602)(P173H_E262D_P420S_P492S)
auggccgugggcgccugcguccugugcaacagccagaccucccuccgcugcggggcgugcauccggcgccccuuccugugcugcaagugcugcuacgaccacgugaucagcaccucccacaagcuggugcucagcgucaacccguacgugugcaacgcccccggcugcgacgugacggacgucacccagcuguaccucgggggcauguccuacuacugcaagagccacaagccgcccaucuccuucccccugugcgccaacggccagguguucggccuguacaagaacacgugcgugggcagcgacaacgucaccgacuucaacgccaucgcgaccugcgacuggaccaacgccggggacuacauccuggccaacacgugcaccgagcggcucaagcuguucgccgccgagacccugaaggcgaccgaggagaccuucaagcucuccuacggcaucgccaccgugcgcgaggugcugagcgaccgggagcugcaccucuccugggaggucgggaagcaccgcccgccccugaaccggaacuacguguucacgggcuaccgcgugaccaagaacagcaagguccagaucggggaguacaccuucgagaagggcgacuacggcgacgccgugguguaccgggggaccacgaccuacaagcugaacgucggcgacuacuucgugcucaccucccacaccgugaugccccugagcgcccccacgcuggucccccaggagcacuacgugcgcaucaccgggcucuaccccacccugaacaucuccgacgacuucagcuccaacguggccaacuaccagaaggucggcaugcagaaguacagcacccugcagggcccgcccgggacgggcaagucccacuucgcgaucgggcucgcccuguacuaccccagcgcccggaucguguacaccgccugcagccacgccgcggucgacgcccugugcgagaaggcccucaaguaccugcccaucgacaagugcucccgcaucaucccggcccgggcccgcguggagugcuucgacaaguucaaggugaacagcacccuggagcaguacgucuucugcaccgugaacgcgcuccccgagacgaccgccgacaucguggucuucgacgagaucuccauggccaccaacuacgaccugagcguggugaacgcccggcugcgcgccaagcacuacgucuacaucggcgaccccgcgcagcuccccgccccgcggacccugcugacgaaggggacccucgagagcgaguacuucaacuccgugugccgccugaugaagaccaucggccccgacauguuccuggggaccugccggcgcugccccgccgagaucguggacacggucagcgcccucguguacgacaacaagcugaaggcgcacaaggacaaguccgcccagugcuucaagauguucuacaagggggugaucacccacgacgucagcuccgccaucaaccggagccagaucggcguggugcgcgaguuccugacccgcaaccccgccuggcggaaggccgucuucaucagccccuacaacucccagaacgcgguggccagcaagauccucgggcugcccacccagaccguggacuccagccagggcuccgaguacgacuacgucaucuucacgcagaccaccgagaccgcccacagcugcaacgugaaccgcuucaacguggccaucacgcgggccaaggucgggauccugugcaucauguccgaccgcgaccucuacgacaagcugcaguucaccagccuggagaucccgcggcgcaacguggcgacccugcaguga

SEQ ID NO: 28142 - RNA, 1809 nt, Artificial Sequence
  SARS-CoV-2/Wuhan-Hu-1__NC_045512.2/MN908947.2/EPI_ISL_402128__non -structural protein 13 (NSP13) CDS gc (1-602)(D261Y)
auggccgugggcgccugcguccugugcaacagccagaccucccuccgcugcggggcgugcauccggcgccccuuccugugcugcaagugcugcuacgaccacgugaucagcaccucccacaagcuggugcucagcgucaacccguacgugugcaacgcccccggcugcgacgugacggacgucacccagcuguaccucgggggcauguccuacuacugcaagagccacaagccgcccaucuccuucccccugugcgccaacggccagguguucggccuguacaagaacacgugcgugggcagcgacaacgucaccgacuucaacgccaucgcgaccugcgacuggaccaacgccggggacuacauccuggccaacacgugcaccgagcggcucaagcuguucgccgccgagacccugaaggcgaccgaggagaccuucaagcucuccuacggcaucgccaccgugcgcgaggugcugagcgaccgggagcugcaccucuccugggaggucgggaagccccgcccgccccugaaccggaacuacguguucacgggcuaccgcgugaccaagaacagcaagguccagaucggggaguacaccuucgagaagggcgacuacggcgacgccgugguguaccgggggaccacgaccuacaagcugaacgucggcgacuacuucgugcucaccucccacaccgugaugccccugagcgcccccacgcuggucccccaggagcacuacgugcgcaucaccgggcucuaccccacccugaacaucuccuacgaguucagcuccaacguggccaacuaccagaaggucggcaugcagaaguacagcacccugcagggcccgcccgggacgggcaagucccacuucgcgaucgggcucgcccuguacuaccccagcgcccggaucguguacaccgccugcagccacgccgcggucgacgcccugugcgagaaggcccucaaguaccugcccaucgacaagugcucccgcaucaucccggcccgggcccgcguggagugcuucgacaaguucaaggugaacagcacccuggagcaguacgucuucugcaccgugaacgcgcuccccgagacgaccgccgacaucguggucuucgacgagaucuccauggccaccaacuacgaccugagcguggugaacgcccggcugcgcgccaagcacuacgucuacaucggcgaccccgcgcagcuccccgccccgcggacccugcugacgaaggggacccucgagcccgaguacuucaacuccgugugccgccugaugaagaccaucggccccgacauguuccuggggaccugccggcgcugccccgccgagaucguggacacggucagcgcccucguguacgacaacaagcugaaggcgcacaaggacaaguccgcccagugcuucaagauguucuacaagggggugaucacccacgacgucagcuccgccaucaaccggccgcagaucggcguggugcgcgaguuccugacccgcaaccccgccuggcggaaggccgucuucaucagccccuacaacucccagaacgcgguggccagcaagauccucgggcugcccacccagaccguggacuccagccagggcuccgaguacgacuacgucaucuucacgcagaccaccgagaccgcccacagcugcaacgugaaccgcuucaacguggccaucacgcgggccaaggucgggauccugugcaucauguccgaccgcgaccucuacgacaagcugcaguucaccagccuggagaucccgcggcgcaacguggcgacccugcaguga

SEQ ID NO: 28143 - RNA, 1587 nt, Artificial Sequence
  SARS-CoV-2/Wuhan-Hu-1__NC_045512.2/MN908947.2/EPI_ISL_402128__non -structural protein 14 (NSP14) CDS gc (1-528)(T32I_P143S_P444S)
auggccgagaacgugaccggccuguucaaggacugcagcaaggucaucaccgggcuccaccccacgcaggccccgacccaccuguccguggacaucaaguucaagaccgagggccugugcguggacauccccgggauccccaaggacaugacguaccgccggcucaucagcaugaugggcuucaagaugaacuaccaggucaacggguaccccaacauguucaucacccgcgaggaggcgauccggcacgugcgcgccuggaucggcuucgacguggagggcugccacgccacccgggaggccgucgggaccaaccugccgcugcagcucggcuucuccacgggggugaaccugguggccguccccaccggcuacguggacacccccaacaacaccgacuucagccgcguguccgcgaagcccccgagcggggaccaguucaagcaccugaucccccucauguacaagggccugcccuggaacgucgugcggaucaagaucgugcagaugcugagcgacacgcucaagaaccuguccgaccgcgucguguucgugcugugggcccacggcuucgagcucaccagcaugaaguacuucgucaagaucgggccggagcggaccugcugccugugcgaccgccgggcgaccugcuucuccacggccagcgacaccuacgccugcuggcaccacuccaucggcuucgacuacguguacaaccccuucaugaucgacgugcagcaguggggguucaccggcaaccugcagagcaaccacgaccucuacugccagguccacggcaacgcccacguggccuccugcgacgccaucaugacccgcugccuggccgugcacgagugcuucgucaagcggguggacuggacgaucgaguaccccaucaucggggacgagcugaagaucaacgcggccugccgcaagguccagcacaugguggugaaggccgcccuccuggccgacaaguuccccguccugcacgacaucggcaacccgaaggcgaucaagugcgugccccaggccgacguggaguggaaguucuacgacgcccagcccugcagcgacaaggccuacaagaucgaggagcuguucuacuccuacgccacccacagcgacaaguucaccgacggggucugccuguucuggaacugcaacguggaccgguaccccgcgaacuccaucgugugccgcuucgacacccggguccugagcaaccucaaccugccgggcugcgacgggggcucccuguacgugaacaagcacgccuuccacacgcccgccuucgacaagagcgccuucgugaaccucaagcagcugagcuucuucuacuacagcgacucccccugcgagagccacggcaagcaggucguguccgacaucgacuacgugccgcucaagagcgcgaccugcaucacccgcugcaaccucgggggcgccgucugccggcaccacgccaacgaguaccgccuguaccuggacgccuacaacaugaugaucuccgccggguucagccucuggguguacaagcaguucgacaccuacaaccuguggaacacguucacccggcugcaguga

SEQ ID NO: 28144 - RNA, 1587 nt, Artificial Sequence
  SARS-CoV-2/Wuhan-Hu-1__NC_045512.2/MN908947.2/EPI_ISL_402128__non -structural protein 14 (NSP14) CDS gc (1-528)(P204L_F218Y_P328Q)
auggccgagaacgugaccggccuguucaaggacugcagcaaggucaucaccgggcuccaccccacgcaggccccgacccaccuguccguggacaccaaguucaagaccgagggccugugcguggacauccccgggauccccaaggacaugacguaccgccggcucaucagcaugaugggcuucaagaugaacuaccaggucaacggguaccccaacauguucaucacccgcgaggaggcgauccggcacgugcgcgccuggaucggcuucgacguggagggcugccacgccacccgggaggccgucgggaccaaccugccgcugcagcucggcuucuccacgggggugaaccugguggccguccccaccggcuacguggacacccccaacaacaccgacuucagccgcguguccgcgaagcccccgcccggggaccaguucaagcaccugaucccccucauguacaagggccugcccuggaacgucgugcggaucaagaucgugcagaugcugagcgacacgcucaagaaccuguccgaccgcgucguguucgugcugugggcccacggcuucgagcucaccagcaugaaguacuucgucaagaucgggcuggagcggaccugcugccugugcgaccgccgggcgaccugcuacuccacggccagcgacaccuacgccugcuggcaccacuccaucggcuucgacuacguguacaaccccuucaugaucgacgugcagcaguggggguucaccggcaaccugcagagcaaccacgaccucuacugccagguccacggcaacgcccacguggccuccugcgacgccaucaugacccgcugccuggccgugcacgagugcuucgucaagcggguggacuggacgaucgaguaccccaucaucggggacgagcugaagaucaacgcggccugccgcaagguccagcacaugguggugaaggccgcccuccuggccgacaaguuccagguccugcacgacaucggcaacccgaaggcgaucaagugcgugccccaggccgacguggaguggaaguucuacgacgcccagcccugcagcgacaaggccuacaagaucgaggagcuguucuacuccuacgccacccacagcgacaaguucaccgacggggucugccuguucuggaacugcaacguggaccgguaccccgcgaacuccaucgugugccgcuucgacacccggguccugagcaaccucaaccugccgggcugcgacgggggcucccuguacgugaacaagcacgccuuccacacgcccgccuucgacaagagcgccuucgugaaccucaagcagcugcccuucuucuacuacagcgacucccccugcgagagccacggcaagcaggucguguccgacaucgacuacgugccgcucaagagcgcgaccugcaucacccgcugcaaccucgggggcgccgucugccggcaccacgccaacgaguaccgccuguaccuggacgccuacaacaugaugaucuccgccggguucagccucuggguguacaagcaguucgacaccuacaaccuguggaacacguucacccggcugcaguga

SEQ ID NO: 28145 - RNA, 1587 nt, Artificial Sequence
  SARS-CoV-2/Wuhan-Hu-1__NC_045512.2/MN908947.2/EPI_ISL_402128__non -structural protein 14 (NSP14) CDS gc (1-528)(E348G_P452S)
auggccgagaacgugaccggccuguucaaggacugcagcaaggucaucaccgggcuccaccccacgcaggccccgacccaccuguccguggacaccaaguucaagaccgagggccugugcguggacauccccgggauccccaaggacaugacguaccgccggcucaucagcaugaugggcuucaagaugaacuaccaggucaacggguaccccaacauguucaucacccgcgaggaggcgauccggcacgugcgcgccuggaucggcuucgacguggagggcugccacgccacccgggaggccgucgggaccaaccugccgcugcagcucggcuucuccacgggggugaaccugguggccguccccaccggcuacguggacacccccaacaacaccgacuucagccgcguguccgcgaagcccccgcccggggaccaguucaagcaccugaucccccucauguacaagggccugcccuggaacgucgugcggaucaagaucgugcagaugcugagcgacacgcucaagaaccuguccgaccgcgucguguucgugcugugggcccacggcuucgagcucaccagcaugaaguacuucgucaagaucgggccggagcggaccugcugccugugcgaccgccgggcgaccugcuucuccacggccagcgacaccuacgccugcuggcaccacuccaucggcuucgacuacguguacaaccccuucaugaucgacgugcagcaguggggguucaccggcaaccugcagagcaaccacgaccucuacugccagguccacggcaacgcccacguggccuccugcgacgccaucaugacccgcugccuggccgugcacgagugcuucgucaagcggguggacuggacgaucgaguaccccaucaucggggacgagcugaagaucaacgcggccugccgcaagguccagcacaugguggugaaggccgcccuccuggccgacaaguuccccguccugcacgacaucggcaacccgaaggcgaucaagugcgugccccaggccgacgugggcuggaaguucuacgacgcccagcccugcagcgacaaggccuacaagaucgaggagcuguucuacuccuacgccacccacagcgacaaguucaccgacggggucugccuguucuggaacugcaacguggaccgguaccccgcgaacuccaucgugugccgcuucgacacccggguccugagcaaccucaaccugccgggcugcgacgggggcucccuguacgugaacaagcacgccuuccacacgcccgccuucgacaagagcgccuucgugaaccucaagcagcugcccuucuucuacuacagcgacuccagcugcgagagccacggcaagcaggucguguccgacaucgacuacgugccgcucaagagcgcgaccugcaucacccgcugcaaccucgggggcgccgucugccggcaccacgccaacgaguaccgccuguaccuggacgccuacaacaugaugaucuccgccggguucagccucuggguguacaagcaguucgacaccuacaaccuguggaacacguucacccggcugcaguga

SEQ ID NO: 28146 - RNA, 1587 nt, Artificial Sequence
  SARS-CoV-2/Wuhan-Hu-1__NC_045512.2/MN908947.2/EPI_ISL_402128__non -structural protein 14 (NSP14) CDS gc (1-528)(A395V)
auggccgagaacgugaccggccuguucaaggacugcagcaaggucaucaccgggcuccaccccacgcaggccccgacccaccuguccguggacaccaaguucaagaccgagggccugugcguggacauccccgggauccccaaggacaugacguaccgccggcucaucagcaugaugggcuucaagaugaacuaccaggucaacggguaccccaacauguucaucacccgcgaggaggcgauccggcacgugcgcgccuggaucggcuucgacguggagggcugccacgccacccgggaggccgucgggaccaaccugccgcugcagcucggcuucuccacgggggugaaccugguggccguccccaccggcuacguggacacccccaacaacaccgacuucagccgcguguccgcgaagcccccgcccggggaccaguucaagcaccugaucccccucauguacaagggccugcccuggaacgucgugcggaucaagaucgugcagaugcugagcgacacgcucaagaaccuguccgaccgcgucguguucgugcugugggcccacggcuucgagcucaccagcaugaaguacuucgucaagaucgggccggagcggaccugcugccugugcgaccgccgggcgaccugcuucuccacggccagcgacaccuacgccugcuggcaccacuccaucggcuucgacuacguguacaaccccuucaugaucgacgugcagcaguggggguucaccggcaaccugcagagcaaccacgaccucuacugccagguccacggcaacgcccacguggccuccugcgacgccaucaugacccgcugccuggccgugcacgagugcuucgucaagcggguggacuggacgaucgaguaccccaucaucggggacgagcugaagaucaacgcggccugccgcaagguccagcacaugguggugaaggccgcccuccuggccgacaaguuccccguccugcacgacaucggcaacccgaaggcgaucaagugcgugccccaggccgacguggaguggaaguucuacgacgcccagcccugcagcgacaaggccuacaagaucgaggagcuguucuacuccuacgccacccacagcgacaaguucaccgacggggucugccuguucuggaacugcaacguggaccgguaccccgugaacuccaucgugugccgcuucgacacccggguccugagcaaccucaaccugccgggcugcgacgggggcucccuguacgugaacaagcacgccuuccacacgcccgccuucgacaagagcgccuucgugaaccucaagcagcugcccuucuucuacuacagcgacucccccugcgagagccacggcaagcaggucguguccgacaucgacuacgugccgcucaagagcgcgaccugcaucacccgcugcaaccucgggggcgccgucugccggcaccacgccaacgaguaccgccuguaccuggacgccuacaacaugaugaucuccgccggguucagccucuggguguacaagcaguucgacaccuacaaccuguggaacacguucacccggcugcaguga

SEQ ID NO: 28147 - RNA, 1587 nt, Artificial Sequence
  SARS-CoV-2/Wuhan-Hu-1__NC_045512.2/MN908947.2/EPI_ISL_402128__non -structural protein 14 (NSP14) CDS gc (1-528)(D145E_A275S)
auggccgagaacgugaccggccuguucaaggacugcagcaaggucaucaccgggcuccaccccacgcaggccccgacccaccuguccguggacaccaaguucaagaccgagggccugugcguggacauccccgggauccccaaggacaugacguaccgccggcucaucagcaugaugggcuucaagaugaacuaccaggucaacggguaccccaacauguucaucacccgcgaggaggcgauccggcacgugcgcgccuggaucggcuucgacguggagggcugccacgccacccgggaggccgucgggaccaaccugccgcugcagcucggcuucuccacgggggugaaccugguggccguccccaccggcuacguggacacccccaacaacaccgacuucagccgcguguccgcgaagcccccgcccggggagcaguucaagcaccugaucccccucauguacaagggccugcccuggaacgucgugcggaucaagaucgugcagaugcugagcgacacgcucaagaaccuguccgaccgcgucguguucgugcugugggcccacggcuucgagcucaccagcaugaaguacuucgucaagaucgggccggagcggaccugcugccugugcgaccgccgggcgaccugcuucuccacggccagcgacaccuacgccugcuggcaccacuccaucggcuucgacuacguguacaaccccuucaugaucgacgugcagcaguggggguucaccggcaaccugcagagcaaccacgaccucuacugccagguccacggcaacgcccacguggccuccugcgacagcaucaugacccgcugccuggccgugcacgagugcuucgucaagcggguggacuggacgaucgaguaccccaucaucggggacgagcugaagaucaacgcggccugccgcaagguccagcacaugguggugaaggccgcccuccuggccgacaaguuccccguccugcacgacaucggcaacccgaaggcgaucaagugcgugccccaggccgacguggaguggaaguucuacgacgcccagcccugcagcgacaaggccuacaagaucgaggagcuguucuacuccuacgccacccacagcgacaaguucaccgacggggucugccuguucuggaacugcaacguggaccgguaccccgcgaacuccaucgugugccgcuucgacacccggguccugagcaaccucaaccugccgggcugcgacgggggcucccuguacgugaacaagcacgccuuccacacgcccgccuucgacaagagcgccuucgugaaccucaagcagcugcccuucuucuacuacagcgacucccccugcgagagccacggcaagcaggucguguccgacaucgacuacgugccgcucaagagcgcgaccugcaucacccgcugcaaccucgggggcgccgucugccggcaccacgccaacgaguaccgccuguaccuggacgccuacaacaugaugaucuccgccggguucagccucuggguguacaagcaguucgacaccuacaaccuguggaacacguucacccggcugcaguga

SEQ ID NO: 28148 - RNA, 1587 nt, Artificial Sequence
  SARS-CoV-2/Wuhan-Hu-1__NC_045512.2/MN908947.2/EPI_ISL_402128__non -structural protein 14 (NSP14) CDS gc (1-528)(D145G_Q355H)
auggccgagaacgugaccggccuguucaaggacugcagcaaggucaucaccgggcuccaccccacgcaggccccgacccaccuguccguggacaccaaguucaagaccgagggccugugcguggacauccccgggauccccaaggacaugacguaccgccggcucaucagcaugaugggcuucaagaugaacuaccaggucaacggguaccccaacauguucaucacccgcgaggaggcgauccggcacgugcgcgccuggaucggcuucgacguggagggcugccacgccacccgggaggccgucgggaccaaccugccgcugcagcucggcuucuccacgggggugaaccugguggccguccccaccggcuacguggacacccccaacaacaccgacuucagccgcguguccgcgaagcccccgcccgggggccaguucaagcaccugaucccccucauguacaagggccugcccuggaacgucgugcggaucaagaucgugcagaugcugagcgacacgcucaagaaccuguccgaccgcgucguguucgugcugugggcccacggcuucgagcucaccagcaugaaguacuucgucaagaucgggccggagcggaccugcugccugugcgaccgccgggcgaccugcuucuccacggccagcgacaccuacgccugcuggcaccacuccaucggcuucgacuacguguacaaccccuucaugaucgacgugcagcaguggggguucaccggcaaccugcagagcaaccacgaccucuacugccagguccacggcaacgcccacguggccuccugcgacgccaucaugacccgcugccuggccgugcacgagugcuucgucaagcggguggacuggacgaucgaguaccccaucaucggggacgagcugaagaucaacgcggccugccgcaagguccagcacaugguggugaaggccgcccuccuggccgacaaguuccccguccugcacgacaucggcaacccgaaggcgaucaagugcgugccccaggccgacguggaguggaaguucuacgacgcccaccccugcagcgacaaggccuacaagaucgaggagcuguucuacuccuacgccacccacagcgacaaguucaccgacggggucugccuguucuggaacugcaacguggaccgguaccccgcgaacuccaucgugugccgcuucgacacccggguccugagcaaccucaaccugccgggcugcgacgggggcucccuguacgugaacaagcacgccuuccacacgcccgccuucgacaagagcgccuucgugaaccucaagcagcugcccuucuucuacuacagcgacucccccugcgagagccacggcaagcaggucguguccgacaucgacuacgugccgcucaagagcgcgaccugcaucacccgcugcaaccucgggggcgccgucugccggcaccacgccaacgaguaccgccuguaccuggacgccuacaacaugaugaucuccgccggguucagccucuggguguacaagcaguucgacaccuacaaccuguggaacacguucacccggcugcaguga

SEQ ID NO: 28149 - RNA, 1587 nt, Artificial Sequence
  SARS-CoV-2/Wuhan-Hu-1__NC_045512.2/MN908947.2/EPI_ISL_402128__non -structural protein 14 (NSP14) CDS gc (1-528)(S256I_A361V_A372T)
auggccgagaacgugaccggccuguucaaggacugcagcaaggucaucaccgggcuccaccccacgcaggccccgacccaccuguccguggacaccaaguucaagaccgagggccugugcguggacauccccgggauccccaaggacaugacguaccgccggcucaucagcaugaugggcuucaagaugaacuaccaggucaacggguaccccaacauguucaucacccgcgaggaggcgauccggcacgugcgcgccuggaucggcuucgacguggagggcugccacgccacccgggaggccgucgggaccaaccugccgcugcagcucggcuucuccacgggggugaaccugguggccguccccaccggcuacguggacacccccaacaacaccgacuucagccgcguguccgcgaagcccccgcccggggaccaguucaagcaccugaucccccucauguacaagggccugcccuggaacgucgugcggaucaagaucgugcagaugcugagcgacacgcucaagaaccuguccgaccgcgucguguucgugcugugggcccacggcuucgagcucaccagcaugaaguacuucgucaagaucgggccggagcggaccugcugccugugcgaccgccgggcgaccugcuucuccacggccagcgacaccuacgccugcuggcaccacuccaucggcuucgacuacguguacaaccccuucaugaucgacgugcagcaguggggguucaccggcaaccugcagaucaaccacgaccucuacugccagguccacggcaacgcccacguggccuccugcgacgccaucaugacccgcugccuggccgugcacgagugcuucgucaagcggguggacuggacgaucgaguaccccaucaucggggacgagcugaagaucaacgcggccugccgcaagguccagcacaugguggugaaggccgcccuccuggccgacaaguuccccguccugcacgacaucggcaacccgaaggcgaucaagugcgugccccaggccgacguggaguggaaguucuacgacgcccagcccugcagcgacaagguguacaagaucgaggagcuguucuacuccuacaccacccacagcgacaaguucaccgacggggucugccuguucuggaacugcaacguggaccgguaccccgcgaacuccaucgugugccgcuucgacacccggguccugagcaaccucaaccugccgggcugcgacgggggcucccuguacgugaacaagcacgccuuccacacgcccgccuucgacaagagcgccuucgugaaccucaagcagcugcccuucuucuacuacagcgacucccccugcgagagccacggcaagcaggucguguccgacaucgacuacgugccgcucaagagcgcgaccugcaucacccgcugcaaccucgggggcgccgucugccggcaccacgccaacgaguaccgccuguaccuggacgccuacaacaugaugaucuccgccggguucagccucuggguguacaagcaguucgacaccuacaaccuguggaacacguucacccggcugcaguga

SEQ ID NO: 28150 - RNA, 2081 nt, Artificial Sequence
  SARS-CoV-2/Wuhan-Hu-1__NC_045512.2/MN908947.2/EPI_ISL_402128__non -structural protein 13 (NSP13) mRNA gc R10382
aggagagucccgcagucggcguccagcggcucugcuuguucgugugugugucguugcaggccuuauucaagcuuaccauggccgugggcgccugcguccugugcaacagccagaccucccuccgcugcggggcgugcauccggcgccccuuccugugcugcaagugcugcuacgaccacgugaucagcaccucccacaagcuggugcucagcgucaacccguacgugugcaacgcccccggcugcgacgugacggacgucacccagcuguaccucgggggcauguccuacuacugcaagagccacaagccgcccaucuccuucccccugugcgccaacggccagguguucggccuguacaagaacacgugcgugggcagcgacaacgucaccgacuucaacgccaucgcgaccugcgacuggaccaacgccggggacuacauccuggccaacacgugcaccgagcggcucaagcuguucgccgccgagacccugaaggcgaccgaggagaccuucaagcucuccuacggcaucgccaccgugcgcgaggugcugagcgaccgggagcugcaccucuccugggaggucgggaagccccgcccgccccugaaccggaacuacguguucacgggcuaccgcgugaccaagaacagcaagguccagaucggggaguacaccuucgagaagggcgacuacggcgacgccgugguguaccgggggaccacgaccuacaagcugaacgucggcgacuacuucgugcucaccucccacaccgugaugccccugagcgcccccacgcuggucccccaggagcacuacgugcgcaucaccgggcucuaccccacccugaacaucuccgacgaguucagcuccaacguggccaacuaccagaaggucggcaugcagaaguacagcacccugcagggcccgcccgggacgggcaagucccacuucgcgaucgggcucgcccuguacuaccccagcgcccggaucguguacaccgccugcagccacgccgcggucgacgcccugugcgagaaggcccucaaguaccugcccaucgacaagugcucccgcaucaucccggcccgggcccgcguggagugcuucgacaaguucaaggugaacagcacccuggagcaguacgucuucugcaccgugaacgcgcuccccgagacgaccgccgacaucguggucuucgacgagaucuccauggccaccaacuacgaccugagcguggugaacgcccggcugcgcgccaagcacuacgucuacaucggcgaccccgcgcagcuccccgccccgcggacccugcugacgaaggggacccucgagcccgaguacuucaacuccgugugccgccugaugaagaccaucggccccgacauguuccuggggaccugccggcgcugccccgccgagaucguggacacggucagcgcccucguguacgacaacaagcugaaggcgcacaaggacaaguccgcccagugcuucaagauguucuacaagggggugaucacccacgacgucagcuccgccaucaaccggccgcagaucggcguggugcgcgaguuccugacccgcaaccccgccuggcggaaggccgucuucaucagccccuacaacucccagaacgcgguggccagcaagauccucgggcugcccacccagaccguggacuccagccagggcuccgaguacgacuacgucaucuucacgcagaccaccgagaccgcccacagcugcaacgugaaccgcuucaacguggccaucacgcgggccaaggucgggauccugugcaucauguccgaccgcgaccucuacgacaagcugcaguucaccagccuggagaucccgcggcgcaacguggcgacccugcagugaggacuagucccuguucccagagcccacuuuuuuuucuuuuuuugaaauaaaauagccugucuuucagaucucaaaggcucuuuucagagccaccaaaaaaaaaaaaaaaaaaaaaaaaaaaaaaaaaaaaaaaaaaaaaaaaaaaaaaaaaaaaaaaaaaaaaaaaaaaaaaaaaaaaaaaaaaaaaaaaaaaaa

SEQ ID NO: 28151 - RNA, 1859 nt, Artificial Sequence
  SARS-CoV-2/Wuhan-Hu-1__NC_045512.2/MN908947.2/EPI_ISL_402128__non -structural protein 14 (NSP14) mRNA gc R10383
aggagagucccgcagucggcguccagcggcucugcuuguucgugugugugucguugcaggccuuauucaagcuuaccauggccgagaacgugaccggccuguucaaggacugcagcaaggucaucaccgggcuccaccccacgcaggccccgacccaccuguccguggacaccaaguucaagaccgagggccugugcguggacauccccgggauccccaaggacaugacguaccgccggcucaucagcaugaugggcuucaagaugaacuaccaggucaacggguaccccaacauguucaucacccgcgaggaggcgauccggcacgugcgcgccuggaucggcuucgacguggagggcugccacgccacccgggaggccgucgggaccaaccugccgcugcagcucggcuucuccacgggggugaaccugguggccguccccaccggcuacguggacacccccaacaacaccgacuucagccgcguguccgcgaagcccccgcccggggaccaguucaagcaccugaucccccucauguacaagggccugcccuggaacgucgugcggaucaagaucgugcagaugcugagcgacacgcucaagaaccuguccgaccgcgucguguucgugcugugggcccacggcuucgagcucaccagcaugaaguacuucgucaagaucgggccggagcggaccugcugccugugcgaccgccgggcgaccugcuucuccacggccagcgacaccuacgccugcuggcaccacuccaucggcuucgacuacguguacaaccccuucaugaucgacgugcagcaguggggguucaccggcaaccugcagagcaaccacgaccucuacugccagguccacggcaacgcccacguggccuccugcgacgccaucaugacccgcugccuggccgugcacgagugcuucgucaagcggguggacuggacgaucgaguaccccaucaucggggacgagcugaagaucaacgcggccugccgcaagguccagcacaugguggugaaggccgcccuccuggccgacaaguuccccguccugcacgacaucggcaacccgaaggcgaucaagugcgugccccaggccgacguggaguggaaguucuacgacgcccagcccugcagcgacaaggccuacaagaucgaggagcuguucuacuccuacgccacccacagcgacaaguucaccgacggggucugccuguucuggaacugcaacguggaccgguaccccgcgaacuccaucgugugccgcuucgacacccggguccugagcaaccucaaccugccgggcugcgacgggggcucccuguacgugaacaagcacgccuuccacacgcccgccuucgacaagagcgccuucgugaaccucaagcagcugcccuucuucuacuacagcgacucccccugcgagagccacggcaagcaggucguguccgacaucgacuacgugccgcucaagagcgcgaccugcaucacccgcugcaaccucgggggcgccgucugccggcaccacgccaacgaguaccgccuguaccuggacgccuacaacaugaugaucuccgccggguucagccucuggguguacaagcaguucgacaccuacaaccuguggaacacguucacccggcugcagugaggacuagucccuguucccagagcccacuuuuuuuucuuuuuuugaaauaaaauagccugucuuucagaucucaaaggcucuuuucagagccaccaaaaaaaaaaaaaaaaaaaaaaaaaaaaaaaaaaaaaaaaaaaaaaaaaaaaaaaaaaaaaaaaaaaaaaaaaaaaaaaaaaaaaaaaaaaaaaaaaaaaa

SEQ ID NO: 28152 - RNA, 941 nt, Artificial Sequence
  SARS-CoV-2/Wuhan-Hu-1__NC_045512.2/MN908947.2/EPI_ISL_402128__mem brane protein (M) mRNA gc (1-222)(I82T)
aggagagucccgcagucggcguccagcggcucugcuuguucgugugugugucguugcaggccuuauucaagcuuaccauggccgacagcaacggcaccaucaccguggaggagcugaagaagcuccuggagcaguggaaccuggucaucggguuccucuuccugacguggaucugccugcuccaguucgccuacgcgaaccgcaaccgguuccuguacaucaucaagcugaucuuccucuggcugcuguggcccgugacccucgccugcuucgugcuggccgccgucuaccgcaucaacuggaucaccggcgggaucgccaccgcgauggccugccuggugggccucauguggcuguccuacuucaucgccagcuuccggcuguucgcccgcacccgguccauguggagcuucaacccggagacgaacauccuccugaacgugccccugcacgggaccauccucacccgcccccugcuggaguccgagcucgucaucggcgcggugauccugcggggccaccuccgcaucgccgggcaccaccugggccggugcgacaucaaggaccugcccaaggagaucaccguggccacgagccgcacccuguccuacuacaagcucggggccagccagcgggucgccggcgacuccggguucgcggccuacagccgcuaccggaucggcaacuacaagcugaacaccgaccacuccagcuccagcgacaacaucgcccugcucgugcagugaggacuagucccuguucccagagcccacuuuuuuuucuuuuuuugaaauaaaauagccugucuuucagaucucaaaggcucuuuucagagccaccaaaaaaaaaaaaaaaaaaaaaaaaaaaaaaaaaaaaaaaaaaaaaaaaaaaaaaaaaaaaaaaaaaaaaaaaaaaaaaaaaaaaaaaaaaaaaaaaaaaaa

SEQ ID NO: 28153 - RNA, 941 nt, Artificial Sequence
  SARS-CoV-2/Wuhan-Hu-1__NC_045512.2/MN908947.2/EPI_ISL_402128__mem brane protein (M) mRNA gc (1-222)(A2S_F28L_V70L)
aggagagucccgcagucggcguccagcggcucugcuuguucgugugugugucguugcaggccuuauucaagcuuaccaugagcgacagcaacggcaccaucaccguggaggagcugaagaagcuccuggagcaguggaaccuggucaucggguuccuccugcugacguggaucugccugcuccaguucgccuacgcgaaccgcaaccgguuccuguacaucaucaagcugaucuuccucuggcugcuguggcccgugacccucgccugcuucgugcuggccgcccuguaccgcaucaacuggaucaccggcgggaucgccaucgcgauggccugccuggugggccucauguggcuguccuacuucaucgccagcuuccggcuguucgcccgcacccgguccauguggagcuucaacccggagacgaacauccuccugaacgugccccugcacgggaccauccucacccgcccccugcuggaguccgagcucgucaucggcgcggugauccugcggggccaccuccgcaucgccgggcaccaccugggccggugcgacaucaaggaccugcccaaggagaucaccguggccacgagccgcacccuguccuacuacaagcucggggccagccagcgggucgccggcgacuccggguucgcggccuacagccgcuaccggaucggcaacuacaagcugaacaccgaccacuccagcuccagcgacaacaucgcccugcucgugcagugaggacuagucccuguucccagagcccacuuuuuuuucuuuuuuugaaauaaaauagccugucuuucagaucucaaaggcucuuuucagagccaccaaaaaaaaaaaaaaaaaaaaaaaaaaaaaaaaaaaaaaaaaaaaaaaaaaaaaaaaaaaaaaaaaaaaaaaaaaaaaaaaaaaaaaaaaaaaaaaaaaaaa

SEQ ID NO: 28154 - RNA, 941 nt, Artificial Sequence
  SARS-CoV-2/Wuhan-Hu-1__NC_045512.2/MN908947.2/EPI_ISL_402128__mem brane protein (M) mRNA gc (1-222)(A2T_I201V)
aggagagucccgcagucggcguccagcggcucugcuuguucgugugugugucguugcaggccuuauucaagcuuaccaugaccgacagcaacggcaccaucaccguggaggagcugaagaagcuccuggagcaguggaaccuggucaucggguuccucuuccugacguggaucugccugcuccaguucgccuacgcgaaccgcaaccgguuccuguacaucaucaagcugaucuuccucuggcugcuguggcccgugacccucgccugcuucgugcuggccgccgucuaccgcaucaacuggaucaccggcgggaucgccaucgcgauggccugccuggugggccucauguggcuguccuacuucaucgccagcuuccggcuguucgcccgcacccgguccauguggagcuucaacccggagacgaacauccuccugaacgugccccugcacgggaccauccucacccgcccccugcuggaguccgagcucgucaucggcgcggugauccugcggggccaccuccgcaucgccgggcaccaccugggccggugcgacaucaaggaccugcccaaggagaucaccguggccacgagccgcacccuguccuacuacaagcucggggccagccagcgggucgccggcgacuccggguucgcggccuacagccgcuaccgggugggcaacuacaagcugaacaccgaccacuccagcuccagcgacaacaucgcccugcucgugcagugaggacuagucccuguucccagagcccacuuuuuuuucuuuuuuugaaauaaaauagccugucuuucagaucucaaaggcucuuuucagagccaccaaaaaaaaaaaaaaaaaaaaaaaaaaaaaaaaaaaaaaaaaaaaaaaaaaaaaaaaaaaaaaaaaaaaaaaaaaaaaaaaaaaaaaaaaaaaaaaaaaaaa

SEQ ID NO: 28155 - RNA, 941 nt, Artificial Sequence
  SARS-CoV-2/Wuhan-Hu-1__NC_045512.2/MN908947.2/EPI_ISL_402128__mem brane protein (M) mRNA gc (1-222)(N121K_H125Y_H148Y_H155Y_K162N)
aggagagucccgcagucggcguccagcggcucugcuuguucgugugugugucguugcaggccuuauucaagcuuaccauggccgacagcaacggcaccaucaccguggaggagcugaagaagcuccuggagcaguggaaccuggucaucggguuccucuuccugacguggaucugccugcuccaguucgccuacgcgaaccgcaaccgguuccuguacaucaucaagcugaucuuccucuggcugcuguggcccgugacccucgccugcuucgugcuggccgccgucuaccgcaucaacuggaucaccggcgggaucgccaucgcgauggccugccuggugggccucauguggcuguccuacuucaucgccagcuuccggcuguucgcccgcacccgguccauguggagcuucaacccggagacgaacauccuccugaaggugccccuguacgggaccauccucacccgcccccugcuggaguccgagcucgucaucggcgcggugauccugcggggcuaccuccgcaucgccgggcacuaccugggccggugcgacaucaacgaccugcccaaggagaucaccguggccacgagccgcacccuguccuacuacaagcucggggccagccagcgggucgccggcgacuccggguucgcggccuacagccgcuaccggaucggcaacuacaagcugaacaccgaccacuccagcuccagcgacaacaucgcccugcucgugcagugaggacuagucccuguucccagagcccacuuuuuuuucuuuuuuugaaauaaaauagccugucuuucagaucucaaaggcucuuuucagagccaccaaaaaaaaaaaaaaaaaaaaaaaaaaaaaaaaaaaaaaaaaaaaaaaaaaaaaaaaaaaaaaaaaaaaaaaaaaaaaaaaaaaaaaaaaaaaaaaaaaaaa

SEQ ID NO: 28156 - RNA, 941 nt, Artificial Sequence
  SARS-CoV-2/Wuhan-Hu-1__NC_045512.2/MN908947.2/EPI_ISL_402128__mem brane protein (M) mRNA gc (1-222)(A63T_H125Y)
aggagagucccgcagucggcguccagcggcucugcuuguucgugugugugucguugcaggccuuauucaagcuuaccauggccgacagcaacggcaccaucaccguggaggagcugaagaagcuccuggagcaguggaaccuggucaucggguuccucuuccugacguggaucugccugcuccaguucgccuacgcgaaccgcaaccgguuccuguacaucaucaagcugaucuuccucuggcugcuguggcccgugacccucaccugcuucgugcuggccgccgucuaccgcaucaacuggaucaccggcgggaucgccaucgcgauggccugccuggugggccucauguggcuguccuacuucaucgccagcuuccggcuguucgcccgcacccgguccauguggagcuucaacccggagacgaacauccuccugaacgugccccuguacgggaccauccucacccgcccccugcuggaguccgagcucgucaucggcgcggugauccugcggggccaccuccgcaucgccgggcaccaccugggccggugcgacaucaaggaccugcccaaggagaucaccguggccacgagccgcacccuguccuacuacaagcucggggccagccagcgggucgccggcgacuccggguucgcggccuacagccgcuaccggaucggcaacuacaagcugaacaccgaccacuccagcuccagcgacaacaucgcccugcucgugcagugaggacuagucccuguucccagagcccacuuuuuuuucuuuuuuugaaauaaaauagccugucuuucagaucucaaaggcucuuuucagagccaccaaaaaaaaaaaaaaaaaaaaaaaaaaaaaaaaaaaaaaaaaaaaaaaaaaaaaaaaaaaaaaaaaaaaaaaaaaaaaaaaaaaaaaaaaaaaaaaaaaaaa

SEQ ID NO: 28157 - RNA, 941 nt, Artificial Sequence
  SARS-CoV-2/Wuhan-Hu-1__NC_045512.2/MN908947.2/EPI_ISL_402128__mem brane protein (M) mRNA gc (1-222)(A2S_M109I_H125Y)
aggagagucccgcagucggcguccagcggcucugcuuguucgugugugugucguugcaggccuuauucaagcuuaccaugagcgacagcaacggcaccaucaccguggaggagcugaagaagcuccuggagcaguggaaccuggucaucggguuccucuuccugacguggaucugccugcuccaguucgccuacgcgaaccgcaaccgguuccuguacaucaucaagcugaucuuccucuggcugcuguggcccgugacccucgccugcuucgugcuggccgccgucuaccgcaucaacuggaucaccggcgggaucgccaucgcgauggccugccuggugggccucauguggcuguccuacuucaucgccagcuuccggcuguucgcccgcacccgguccaucuggagcuucaacccggagacgaacauccuccugaacgugccccuguacgggaccauccucacccgcccccugcuggaguccgagcucgucaucggcgcggugauccugcggggccaccuccgcaucgccgggcaccaccugggccggugcgacaucaaggaccugcccaaggagaucaccguggccacgagccgcacccuguccuacuacaagcucggggccagccagcgggucgccggcgacuccggguucgcggccuacagccgcuaccggaucggcaacuacaagcugaacaccgaccacuccagcuccagcgacaacaucgcccugcucgugcagugaggacuagucccuguucccagagcccacuuuuuuuucuuuuuuugaaauaaaauagccugucuuucagaucucaaaggcucuuuucagagccaccaaaaaaaaaaaaaaaaaaaaaaaaaaaaaaaaaaaaaaaaaaaaaaaaaaaaaaaaaaaaaaaaaaaaaaaaaaaaaaaaaaaaaaaaaaaaaaaaaaaaa

SEQ ID NO: 28158 - RNA, 941 nt, Artificial Sequence
  SARS-CoV-2/Wuhan-Hu-1__NC_045512.2/MN908947.2/EPI_ISL_402128__mem brane protein (M) mRNA gc (1-222)(A2V_M109I_H125Y)
aggagagucccgcagucggcguccagcggcucugcuuguucgugugugugucguugcaggccuuauucaagcuuaccaugguggacagcaacggcaccaucaccguggaggagcugaagaagcuccuggagcaguggaaccuggucaucggguuccucuuccugacguggaucugccugcuccaguucgccuacgcgaaccgcaaccgguuccuguacaucaucaagcugaucuuccucuggcugcuguggcccgugacccucgccugcuucgugcuggccgccgucuaccgcaucaacuggaucaccggcgggaucgccaucgcgauggccugccuggugggccucauguggcuguccuacuucaucgccagcuuccggcuguucgcccgcacccgguccaucuggagcuucaacccggagacgaacauccuccugaacgugccccuguacgggaccauccucacccgcccccugcuggaguccgagcucgucaucggcgcggugauccugcggggccaccuccgcaucgccgggcaccaccugggccggugcgacaucaaggaccugcccaaggagaucaccguggccacgagccgcacccuguccuacuacaagcucggggccagccagcgggucgccggcgacuccggguucgcggccuacagccgcuaccggaucggcaacuacaagcugaacaccgaccacuccagcuccagcgacaacaucgcccugcucgugcagugaggacuagucccuguucccagagcccacuuuuuuuucuuuuuuugaaauaaaauagccugucuuucagaucucaaaggcucuuuucagagccaccaaaaaaaaaaaaaaaaaaaaaaaaaaaaaaaaaaaaaaaaaaaaaaaaaaaaaaaaaaaaaaaaaaaaaaaaaaaaaaaaaaaaaaaaaaaaaaaaaaaaa

SEQ ID NO: 28159 - RNA, 941 nt, Artificial Sequence
  SARS-CoV-2/Wuhan-Hu-1__NC_045512.2/MN908947.2/EPI_ISL_402128__mem brane protein (M) mRNA gc (1-222)(L17F_M109I)
aggagagucccgcagucggcguccagcggcucugcuuguucgugugugugucguugcaggccuuauucaagcuuaccauggccgacagcaacggcaccaucaccguggaggagcugaagaagcucuucgagcaguggaaccuggucaucggguuccucuuccugacguggaucugccugcuccaguucgccuacgcgaaccgcaaccgguuccuguacaucaucaagcugaucuuccucuggcugcuguggcccgugacccucgccugcuucgugcuggccgccgucuaccgcaucaacuggaucaccggcgggaucgccaucgcgauggccugccuggugggccucauguggcuguccuacuucaucgccagcuuccggcuguucgcccgcacccgguccaucuggagcuucaacccggagacgaacauccuccugaacgugccccugcacgggaccauccucacccgcccccugcuggaguccgagcucgucaucggcgcggugauccugcggggccaccuccgcaucgccgggcaccaccugggccggugcgacaucaaggaccugcccaaggagaucaccguggccacgagccgcacccuguccuacuacaagcucggggccagccagcgggucgccggcgacuccggguucgcggccuacagccgcuaccggaucggcaacuacaagcugaacaccgaccacuccagcuccagcgacaacaucgcccugcucgugcagugaggacuagucccuguucccagagcccacuuuuuuuucuuuuuuugaaauaaaauagccugucuuucagaucucaaaggcucuuuucagagccaccaaaaaaaaaaaaaaaaaaaaaaaaaaaaaaaaaaaaaaaaaaaaaaaaaaaaaaaaaaaaaaaaaaaaaaaaaaaaaaaaaaaaaaaaaaaaaaaaaaaaa

SEQ ID NO: 28160 - RNA, 1529 nt, Artificial Sequence
  SARS-CoV-2/Wuhan-Hu-1__NC_045512.2/MN908947.2/EPI_ISL_402128__nuc leocapsid protein (N) mRNA gc (1-419)(D3L_R203K_G204R_S235F)
aggagagucccgcagucggcguccagcggcucugcuuguucgugugugugucguugcaggccuuauucaagcuuaccaugagcaacggcccccagaaccagcgcaacgccccgcggaucaccuucgggggccccuccgacagcaccggguccaaccagaacggcgagcgcagcggggcccgguccaagcagcgccggccccagggccugcccaacaacacggcgagcugguucaccgcccucacccagcacggcaaggaggaccugaaguucccgcgcgggcagggcgugcccaucaacaccaacuccagccccgacgaccagaucggguacuaccggcgcgccacgcggcgcauccggggcggggacggcaagaugaaggaccugagcccccgcugguacuucuacuaccucggcaccgggccggaggccggccugcccuacggggccaacaaggacggcaucaucugggucgcgaccgagggcgcccugaacacccccaaggaccacaucgggacgcggaaccccgccaacaacgccgcgaucgugcuccagcugccgcagggcaccacccugcccaagggguucuacgccgagggcucccgcgggggcucccaggccagcucccggagcuccagccgcucccggaacagcucccgcaacagcacccccggcagcuccaagcgcacgagccccgcccgcauggccggcaacgggggcgacgcggcccucgcccugcugcuccuggaccggcugaaccagcucgaguccaagauguucgggaagggccagcagcagcagggccagaccgugaccaagaaguccgccgccgaggcgagcaagaagccgcgccagaagcgcaccgccacgaaggccuacaacgucacccaggccuucgggcggcgcggccccgagcagacccaggggaacuucggcgaccaggagcugauccggcaggggaccgacuacaagcacuggccccagaucgcccaguucgcgcccuccgccagcgccuucuucggcaugucccgcaucggcauggaggugacgccgagcgggaccuggcugaccuacaccggcgccaucaagcucgacgacaaggaccccaacuucaaggaccaggugauccugcugaacaagcacaucgacgccuacaagacguucccgcccaccgagcccaagaaggacaagaagaagaaggcggacgagacccaggcccucccccagcggcagaagaagcagcagaccgucacgcugcugcccgccgccgaccucgacgacuucuccaagcagcugcagcagagcauguccagcgcggacuccacccaggccugaggacuagucccuguucccagagcccacuuuuuuuucuuuuuuugaaauaaaauagccugucuuucagaucucaaaggcucuuuucagagccaccaaaaaaaaaaaaaaaaaaaaaaaaaaaaaaaaaaaaaaaaaaaaaaaaaaaaaaaaaaaaaaaaaaaaaaaaaaaaaaaaaaaaaaaaaaaaaaaaaaaaa

SEQ ID NO: 28161 - RNA, 1532 nt, Artificial Sequence
  SARS-CoV-2/Wuhan-Hu-1__NC_045512.2/MN908947.2/EPI_ISL_402128__nuc leocapsid protein (N) mRNA gc (1-419)(T205I)
aggagagucccgcagucggcguccagcggcucugcuuguucgugugugugucguugcaggccuuauucaagcuuaccaugagcgacaacggcccccagaaccagcgcaacgccccgcggaucaccuucgggggccccuccgacagcaccggguccaaccagaacggcgagcgcagcggggcccgguccaagcagcgccggccccagggccugcccaacaacacggcgagcugguucaccgcccucacccagcacggcaaggaggaccugaaguucccgcgcgggcagggcgugcccaucaacaccaacuccagccccgacgaccagaucggguacuaccggcgcgccacgcggcgcauccggggcggggacggcaagaugaaggaccugagcccccgcugguacuucuacuaccucggcaccgggccggaggccggccugcccuacggggccaacaaggacggcaucaucugggucgcgaccgagggcgcccugaacacccccaaggaccacaucgggacgcggaaccccgccaacaacgccgcgaucgugcuccagcugccgcagggcaccacccugcccaagggguucuacgccgagggcucccgcgggggcucccaggccagcucccggagcuccagccgcucccggaacagcucccgcaacagcacccccggcagcucccgggggaucagccccgcccgcauggccggcaacgggggcgacgcggcccucgcccugcugcuccuggaccggcugaaccagcucgaguccaagaugagcgggaagggccagcagcagcagggccagaccgugaccaagaaguccgccgccgaggcgagcaagaagccgcgccagaagcgcaccgccacgaaggccuacaacgucacccaggccuucgggcggcgcggccccgagcagacccaggggaacuucggcgaccaggagcugauccggcaggggaccgacuacaagcacuggccccagaucgcccaguucgcgcccuccgccagcgccuucuucggcaugucccgcaucggcauggaggugacgccgagcgggaccuggcugaccuacaccggcgccaucaagcucgacgacaaggaccccaacuucaaggaccaggugauccugcugaacaagcacaucgacgccuacaagacguucccgcccaccgagcccaagaaggacaagaagaagaaggcggacgagacccaggcccucccccagcggcagaagaagcagcagaccgucacgcugcugcccgccgccgaccucgacgacuucuccaagcagcugcagcagagcauguccagcgcggacuccacccaggccugaggacuagucccuguucccagagcccacuuuuuuuucuuuuuuugaaauaaaauagccugucuuucagaucucaaaggcucuuuucagagccaccaaaaaaaaaaaaaaaaaaaaaaaaaaaaaaaaaaaaaaaaaaaaaaaaaaaaaaaaaaaaaaaaaaaaaaaaaaaaaaaaaaaaaaaaaaaaaaaaaaaaa

SEQ ID NO: 28162 - RNA, 1532 nt, Artificial Sequence
  SARS-CoV-2/Wuhan-Hu-1__NC_045512.2/MN908947.2/EPI_ISL_402128__nuc leocapsid protein (N) mRNA gc (1-419)(P80R)
aggagagucccgcagucggcguccagcggcucugcuuguucgugugugugucguugcaggccuuauucaagcuuaccaugagcgacaacggcccccagaaccagcgcaacgccccgcggaucaccuucgggggccccuccgacagcaccggguccaaccagaacggcgagcgcagcggggcccgguccaagcagcgccggccccagggccugcccaacaacacggcgagcugguucaccgcccucacccagcacggcaaggaggaccugaaguucccgcgcgggcagggcgugcccaucaacaccaacuccagccgcgacgaccagaucggguacuaccggcgcgccacgcggcgcauccggggcggggacggcaagaugaaggaccugagcccccgcugguacuucuacuaccucggcaccgggccggaggccggccugcccuacggggccaacaaggacggcaucaucugggucgcgaccgagggcgcccugaacacccccaaggaccacaucgggacgcggaaccccgccaacaacgccgcgaucgugcuccagcugccgcagggcaccacccugcccaagggguucuacgccgagggcucccgcgggggcucccaggccagcucccggagcuccagccgcucccggaacagcucccgcaacagcacccccggcagcucccgggggacgagccccgcccgcauggccggcaacgggggcgacgcggcccucgcccugcugcuccuggaccggcugaaccagcucgaguccaagaugagcgggaagggccagcagcagcagggccagaccgugaccaagaaguccgccgccgaggcgagcaagaagccgcgccagaagcgcaccgccacgaaggccuacaacgucacccaggccuucgggcggcgcggccccgagcagacccaggggaacuucggcgaccaggagcugauccggcaggggaccgacuacaagcacuggccccagaucgcccaguucgcgcccuccgccagcgccuucuucggcaugucccgcaucggcauggaggugacgccgagcgggaccuggcugaccuacaccggcgccaucaagcucgacgacaaggaccccaacuucaaggaccaggugauccugcugaacaagcacaucgacgccuacaagacguucccgcccaccgagcccaagaaggacaagaagaagaaggcggacgagacccaggcccucccccagcggcagaagaagcagcagaccgucacgcugcugcccgccgccgaccucgacgacuucuccaagcagcugcagcagagcauguccagcgcggacuccacccaggccugaggacuagucccuguucccagagcccacuuuuuuuucuuuuuuugaaauaaaauagccugucuuucagaucucaaaggcucuuuucagagccaccaaaaaaaaaaaaaaaaaaaaaaaaaaaaaaaaaaaaaaaaaaaaaaaaaaaaaaaaaaaaaaaaaaaaaaaaaaaaaaaaaaaaaaaaaaaaaaaaaaaaa

SEQ ID NO: 28163 - RNA, 1532 nt, Artificial Sequence
  SARS-CoV-2/Wuhan-Hu-1__NC_045512.2/MN908947.2/EPI_ISL_402128__nuc leocapsid protein (N) mRNA gc (1-419)(P80R_R203K_G204R)
aggagagucccgcagucggcguccagcggcucugcuuguucgugugugugucguugcaggccuuauucaagcuuaccaugagcgacaacggcccccagaaccagcgcaacgccccgcggaucaccuucgggggccccuccgacagcaccggguccaaccagaacggcgagcgcagcggggcccgguccaagcagcgccggccccagggccugcccaacaacacggcgagcugguucaccgcccucacccagcacggcaaggaggaccugaaguucccgcgcgggcagggcgugcccaucaacaccaacuccagccgcgacgaccagaucggguacuaccggcgcgccacgcggcgcauccggggcggggacggcaagaugaaggaccugagcccccgcugguacuucuacuaccucggcaccgggccggaggccggccugcccuacggggccaacaaggacggcaucaucugggucgcgaccgagggcgcccugaacacccccaaggaccacaucgggacgcggaaccccgccaacaacgccgcgaucgugcuccagcugccgcagggcaccacccugcccaagggguucuacgccgagggcucccgcgggggcucccaggccagcucccggagcuccagccgcucccggaacagcucccgcaacagcacccccggcagcuccaagcgcacgagccccgcccgcauggccggcaacgggggcgacgcggcccucgcccugcugcuccuggaccggcugaaccagcucgaguccaagaugagcgggaagggccagcagcagcagggccagaccgugaccaagaaguccgccgccgaggcgagcaagaagccgcgccagaagcgcaccgccacgaaggccuacaacgucacccaggccuucgggcggcgcggccccgagcagacccaggggaacuucggcgaccaggagcugauccggcaggggaccgacuacaagcacuggccccagaucgcccaguucgcgcccuccgccagcgccuucuucggcaugucccgcaucggcauggaggugacgccgagcgggaccuggcugaccuacaccggcgccaucaagcucgacgacaaggaccccaacuucaaggaccaggugauccugcugaacaagcacaucgacgccuacaagacguucccgcccaccgagcccaagaaggacaagaagaagaaggcggacgagacccaggcccucccccagcggcagaagaagcagcagaccgucacgcugcugcccgccgccgaccucgacgacuucuccaagcagcugcagcagagcauguccagcgcggacuccacccaggccugaggacuagucccuguucccagagcccacuuuuuuuucuuuuuuugaaauaaaauagccugucuuucagaucucaaaggcucuuuucagagccaccaaaaaaaaaaaaaaaaaaaaaaaaaaaaaaaaaaaaaaaaaaaaaaaaaaaaaaaaaaaaaaaaaaaaaaaaaaaaaaaaaaaaaaaaaaaaaaaaaaaaa

SEQ ID NO: 28164 - RNA, 1532 nt, Artificial Sequence
  SARS-CoV-2/Wuhan-Hu-1__NC_045512.2/MN908947.2/EPI_ISL_402128__nuc leocapsid protein (N) mRNA gc (1-419)(D63G_R203M_G215C_D377Y)
aggagagucccgcagucggcguccagcggcucugcuuguucgugugugugucguugcaggccuuauucaagcuuaccaugagcgacaacggcccccagaaccagcgcaacgccccgcggaucaccuucgggggccccuccgacagcaccggguccaaccagaacggcgagcgcagcggggcccgguccaagcagcgccggccccagggccugcccaacaacacggcgagcugguucaccgcccucacccagcacggcaaggagggccugaaguucccgcgcgggcagggcgugcccaucaacaccaacuccagccccgacgaccagaucggguacuaccggcgcgccacgcggcgcauccggggcggggacggcaagaugaaggaccugagcccccgcugguacuucuacuaccucggcaccgggccggaggccggccugcccuacggggccaacaaggacggcaucaucugggucgcgaccgagggcgcccugaacacccccaaggaccacaucgggacgcggaaccccgccaacaacgccgcgaucgugcuccagcugccgcagggcaccacccugcccaagggguucuacgccgagggcucccgcgggggcucccaggccagcucccggagcuccagccgcucccggaacagcucccgcaacagcacccccggcagcuccauggggacgagccccgcccgcauggccggcaacgggugcgacgcggcccucgcccugcugcuccuggaccggcugaaccagcucgaguccaagaugagcgggaagggccagcagcagcagggccagaccgugaccaagaaguccgccgccgaggcgagcaagaagccgcgccagaagcgcaccgccacgaaggccuacaacgucacccaggccuucgggcggcgcggccccgagcagacccaggggaacuucggcgaccaggagcugauccggcaggggaccgacuacaagcacuggccccagaucgcccaguucgcgcccuccgccagcgccuucuucggcaugucccgcaucggcauggaggugacgccgagcgggaccuggcugaccuacaccggcgccaucaagcucgacgacaaggaccccaacuucaaggaccaggugauccugcugaacaagcacaucgacgccuacaagacguucccgcccaccgagcccaagaaggacaagaagaagaaggcguacgagacccaggcccucccccagcggcagaagaagcagcagaccgucacgcugcugcccgccgccgaccucgacgacuucuccaagcagcugcagcagagcauguccagcgcggacuccacccaggccugaggacuagucccuguucccagagcccacuuuuuuuucuuuuuuugaaauaaaauagccugucuuucagaucucaaaggcucuuuucagagccaccaaaaaaaaaaaaaaaaaaaaaaaaaaaaaaaaaaaaaaaaaaaaaaaaaaaaaaaaaaaaaaaaaaaaaaaaaaaaaaaaaaaaaaaaaaaaaaaaaaaaa

SEQ ID NO: 28165 - RNA, 1532 nt, Artificial Sequence
  SARS-CoV-2/Wuhan-Hu-1__NC_045512.2/MN908947.2/EPI_ISL_402128__nuc leocapsid protein (N) mRNA gc (1-419)(D63G_R203M_D377Y)
aggagagucccgcagucggcguccagcggcucugcuuguucgugugugugucguugcaggccuuauucaagcuuaccaugagcgacaacggcccccagaaccagcgcaacgccccgcggaucaccuucgggggccccuccgacagcaccggguccaaccagaacggcgagcgcagcggggcccgguccaagcagcgccggccccagggccugcccaacaacacggcgagcugguucaccgcccucacccagcacggcaaggagggccugaaguucccgcgcgggcagggcgugcccaucaacaccaacuccagccccgacgaccagaucggguacuaccggcgcgccacgcggcgcauccggggcggggacggcaagaugaaggaccugagcccccgcugguacuucuacuaccucggcaccgggccggaggccggccugcccuacggggccaacaaggacggcaucaucugggucgcgaccgagggcgcccugaacacccccaaggaccacaucgggacgcggaaccccgccaacaacgccgcgaucgugcuccagcugccgcagggcaccacccugcccaagggguucuacgccgagggcucccgcgggggcucccaggccagcucccggagcuccagccgcucccggaacagcucccgcaacagcacccccggcagcuccauggggacgagccccgcccgcauggccggcaacgggggcgacgcggcccucgcccugcugcuccuggaccggcugaaccagcucgaguccaagaugagcgggaagggccagcagcagcagggccagaccgugaccaagaaguccgccgccgaggcgagcaagaagccgcgccagaagcgcaccgccacgaaggccuacaacgucacccaggccuucgggcggcgcggccccgagcagacccaggggaacuucggcgaccaggagcugauccggcaggggaccgacuacaagcacuggccccagaucgcccaguucgcgcccuccgccagcgccuucuucggcaugucccgcaucggcauggaggugacgccgagcgggaccuggcugaccuacaccggcgccaucaagcucgacgacaaggaccccaacuucaaggaccaggugauccugcugaacaagcacaucgacgccuacaagacguucccgcccaccgagcccaagaaggacaagaagaagaaggcguacgagacccaggcccucccccagcggcagaagaagcagcagaccgucacgcugcugcccgccgccgaccucgacgacuucuccaagcagcugcagcagagcauguccagcgcggacuccacccaggccugaggacuagucccuguucccagagcccacuuuuuuuucuuuuuuugaaauaaaauagccugucuuucagaucucaaaggcucuuuucagagccaccaaaaaaaaaaaaaaaaaaaaaaaaaaaaaaaaaaaaaaaaaaaaaaaaaaaaaaaaaaaaaaaaaaaaaaaaaaaaaaaaaaaaaaaaaaaaaaaaaaaaa

SEQ ID NO: 28166 - RNA, 1532 nt, Artificial Sequence
  SARS-CoV-2/Wuhan-Hu-1__NC_045512.2/MN908947.2/EPI_ISL_402128__nuc leocapsid protein (N) mRNA gc (1-419)(T205I_T362I)
aggagagucccgcagucggcguccagcggcucugcuuguucgugugugugucguugcaggccuuauucaagcuuaccaugagcgacaacggcccccagaaccagcgcaacgccccgcggaucaccuucgggggccccuccgacagcaccggguccaaccagaacggcgagcgcagcggggcccgguccaagcagcgccggccccagggccugcccaacaacacggcgagcugguucaccgcccucacccagcacggcaaggaggaccugaaguucccgcgcgggcagggcgugcccaucaacaccaacuccagccccgacgaccagaucggguacuaccggcgcgccacgcggcgcauccggggcggggacggcaagaugaaggaccugagcccccgcugguacuucuacuaccucggcaccgggccggaggccggccugcccuacggggccaacaaggacggcaucaucugggucgcgaccgagggcgcccugaacacccccaaggaccacaucgggacgcggaaccccgccaacaacgccgcgaucgugcuccagcugccgcagggcaccacccugcccaagggguucuacgccgagggcucccgcgggggcucccaggccagcucccggagcuccagccgcucccggaacagcucccgcaacagcacccccggcagcucccgggggaucagccccgcccgcauggccggcaacgggggcgacgcggcccucgcccugcugcuccuggaccggcugaaccagcucgaguccaagaugagcgggaagggccagcagcagcagggccagaccgugaccaagaaguccgccgccgaggcgagcaagaagccgcgccagaagcgcaccgccacgaaggccuacaacgucacccaggccuucgggcggcgcggccccgagcagacccaggggaacuucggcgaccaggagcugauccggcaggggaccgacuacaagcacuggccccagaucgcccaguucgcgcccuccgccagcgccuucuucggcaugucccgcaucggcauggaggugacgccgagcgggaccuggcugaccuacaccggcgccaucaagcucgacgacaaggaccccaacuucaaggaccaggugauccugcugaacaagcacaucgacgccuacaagaucuucccgcccaccgagcccaagaaggacaagaagaagaaggcggacgagacccaggcccucccccagcggcagaagaagcagcagaccgucacgcugcugcccgccgccgaccucgacgacuucuccaagcagcugcagcagagcauguccagcgcggacuccacccaggccugaggacuagucccuguucccagagcccacuuuuuuuucuuuuuuugaaauaaaauagccugucuuucagaucucaaaggcucuuuucagagccaccaaaaaaaaaaaaaaaaaaaaaaaaaaaaaaaaaaaaaaaaaaaaaaaaaaaaaaaaaaaaaaaaaaaaaaaaaaaaaaaaaaaaaaaaaaaaaaaaaaaaa

SEQ ID NO: 28167 - RNA, 1529 nt, Artificial Sequence
  SARS-CoV-2/Wuhan-Hu-1__NC_045512.2/MN908947.2/EPI_ISL_402128__nuc leocapsid protein (N) mRNA gc (1-419)(S2Y_D3del_A12G_T205I)
aggagagucccgcagucggcguccagcggcucugcuuguucgugugugugucguugcaggccuuauucaagcuuaccauguacaacggcccccagaaccagcgcaacggcccgcggaucaccuucgggggccccuccgacagcaccggguccaaccagaacggcgagcgcagcggggcccgguccaagcagcgccggccccagggccugcccaacaacacggcgagcugguucaccgcccucacccagcacggcaaggaggaccugaaguucccgcgcgggcagggcgugcccaucaacaccaacuccagccccgacgaccagaucggguacuaccggcgcgccacgcggcgcauccggggcggggacggcaagaugaaggaccugagcccccgcugguacuucuacuaccucggcaccgggccggaggccggccugcccuacggggccaacaaggacggcaucaucugggucgcgaccgagggcgcccugaacacccccaaggaccacaucgggacgcggaaccccgccaacaacgccgcgaucgugcuccagcugccgcagggcaccacccugcccaagggguucuacgccgagggcucccgcgggggcucccaggccagcucccggagcuccagccgcucccggaacagcucccgcaacagcacccccggcagcucccgggggaucagccccgcccgcauggccggcaacgggggcgacgcggcccucgcccugcugcuccuggaccggcugaaccagcucgaguccaagaugagcgggaagggccagcagcagcagggccagaccgugaccaagaaguccgccgccgaggcgagcaagaagccgcgccagaagcgcaccgccacgaaggccuacaacgucacccaggccuucgggcggcgcggccccgagcagacccaggggaacuucggcgaccaggagcugauccggcaggggaccgacuacaagcacuggccccagaucgcccaguucgcgcccuccgccagcgccuucuucggcaugucccgcaucggcauggaggugacgccgagcgggaccuggcugaccuacaccggcgccaucaagcucgacgacaaggaccccaacuucaaggaccaggugauccugcugaacaagcacaucgacgccuacaagacguucccgcccaccgagcccaagaaggacaagaagaagaaggcggacgagacccaggcccucccccagcggcagaagaagcagcagaccgucacgcugcugcccgccgccgaccucgacgacuucuccaagcagcugcagcagagcauguccagcgcggacuccacccaggccugaggacuagucccuguucccagagcccacuuuuuuuucuuuuuuugaaauaaaauagccugucuuucagaucucaaaggcucuuuucagagccaccaaaaaaaaaaaaaaaaaaaaaaaaaaaaaaaaaaaaaaaaaaaaaaaaaaaaaaaaaaaaaaaaaaaaaaaaaaaaaaaaaaaaaaaaaaaaaaaaaaaaa

SEQ ID NO: 28168 - RNA, 1532 nt, Artificial Sequence
  SARS-CoV-2/Wuhan-Hu-1__NC_045512.2/MN908947.2/EPI_ISL_402128__nuc leocapsid protein (N) mRNA gc (1-419)(P13L_R203K_G204R_G214C)
aggagagucccgcagucggcguccagcggcucugcuuguucgugugugugucguugcaggccuuauucaagcuuaccaugagcgacaacggcccccagaaccagcgcaacgcccugcggaucaccuucgggggccccuccgacagcaccggguccaaccagaacggcgagcgcagcggggcccgguccaagcagcgccggccccagggccugcccaacaacacggcgagcugguucaccgcccucacccagcacggcaaggaggaccugaaguucccgcgcgggcagggcgugcccaucaacaccaacuccagccccgacgaccagaucggguacuaccggcgcgccacgcggcgcauccggggcggggacggcaagaugaaggaccugagcccccgcugguacuucuacuaccucggcaccgggccggaggccggccugcccuacggggccaacaaggacggcaucaucugggucgcgaccgagggcgcccugaacacccccaaggaccacaucgggacgcggaaccccgccaacaacgccgcgaucgugcuccagcugccgcagggcaccacccugcccaagggguucuacgccgagggcucccgcgggggcucccaggccagcucccggagcuccagccgcucccggaacagcucccgcaacagcacccccggcagcuccaagcgcacgagccccgcccgcauggccggcaacugcggcgacgcggcccucgcccugcugcuccuggaccggcugaaccagcucgaguccaagaugagcgggaagggccagcagcagcagggccagaccgugaccaagaaguccgccgccgaggcgagcaagaagccgcgccagaagcgcaccgccacgaaggccuacaacgucacccaggccuucgggcggcgcggccccgagcagacccaggggaacuucggcgaccaggagcugauccggcaggggaccgacuacaagcacuggccccagaucgcccaguucgcgcccuccgccagcgccuucuucggcaugucccgcaucggcauggaggugacgccgagcgggaccuggcugaccuacaccggcgccaucaagcucgacgacaaggaccccaacuucaaggaccaggugauccugcugaacaagcacaucgacgccuacaagacguucccgcccaccgagcccaagaaggacaagaagaagaaggcggacgagacccaggcccucccccagcggcagaagaagcagcagaccgucacgcugcugcccgccgccgaccucgacgacuucuccaagcagcugcagcagagcauguccagcgcggacuccacccaggccugaggacuagucccuguucccagagcccacuuuuuuuucuuuuuuugaaauaaaauagccugucuuucagaucucaaaggcucuuuucagagccaccaaaaaaaaaaaaaaaaaaaaaaaaaaaaaaaaaaaaaaaaaaaaaaaaaaaaaaaaaaaaaaaaaaaaaaaaaaaaaaaaaaaaaaaaaaaaaaaaaaaaa

SEQ ID NO: 28169 - RNA, 1532 nt, Artificial Sequence
  SARS-CoV-2/Wuhan-Hu-1__NC_045512.2/MN908947.2/EPI_ISL_402128__nuc leocapsid protein (N) mRNA gc (1-419)(P67S_R203M_D377Y)
aggagagucccgcagucggcguccagcggcucugcuuguucgugugugugucguugcaggccuuauucaagcuuaccaugagcgacaacggcccccagaaccagcgcaacgccccgcggaucaccuucgggggccccuccgacagcaccggguccaaccagaacggcgagcgcagcggggcccgguccaagcagcgccggccccagggccugcccaacaacacggcgagcugguucaccgcccucacccagcacggcaaggaggaccugaaguucagccgcgggcagggcgugcccaucaacaccaacuccagccccgacgaccagaucggguacuaccggcgcgccacgcggcgcauccggggcggggacggcaagaugaaggaccugagcccccgcugguacuucuacuaccucggcaccgggccggaggccggccugcccuacggggccaacaaggacggcaucaucugggucgcgaccgagggcgcccugaacacccccaaggaccacaucgggacgcggaaccccgccaacaacgccgcgaucgugcuccagcugccgcagggcaccacccugcccaagggguucuacgccgagggcucccgcgggggcucccaggccagcucccggagcuccagccgcucccggaacagcucccgcaacagcacccccggcagcuccauggggacgagccccgcccgcauggccggcaacgggggcgacgcggcccucgcccugcugcuccuggaccggcugaaccagcucgaguccaagaugagcgggaagggccagcagcagcagggccagaccgugaccaagaaguccgccgccgaggcgagcaagaagccgcgccagaagcgcaccgccacgaaggccuacaacgucacccaggccuucgggcggcgcggccccgagcagacccaggggaacuucggcgaccaggagcugauccggcaggggaccgacuacaagcacuggccccagaucgcccaguucgcgcccuccgccagcgccuucuucggcaugucccgcaucggcauggaggugacgccgagcgggaccuggcugaccuacaccggcgccaucaagcucgacgacaaggaccccaacuucaaggaccaggugauccugcugaacaagcacaucgacgccuacaagacguucccgcccaccgagcccaagaaggacaagaagaagaaggcguacgagacccaggcccucccccagcggcagaagaagcagcagaccgucacgcugcugcccgccgccgaccucgacgacuucuccaagcagcugcagcagagcauguccagcgcggacuccacccaggccugaggacuagucccuguucccagagcccacuuuuuuuucuuuuuuugaaauaaaauagccugucuuucagaucucaaaggcucuuuucagagccaccaaaaaaaaaaaaaaaaaaaaaaaaaaaaaaaaaaaaaaaaaaaaaaaaaaaaaaaaaaaaaaaaaaaaaaaaaaaaaaaaaaaaaaaaaaaaaaaaaaaaa

SEQ ID NO: 28170 - RNA, 1532 nt, Artificial Sequence
  SARS-CoV-2/Wuhan-Hu-1__NC_045512.2/MN908947.2/EPI_ISL_402128__nuc leocapsid protein (N) mRNA gc (1-419)(I157V_R203K_G204R)
aggagagucccgcagucggcguccagcggcucugcuuguucgugugugugucguugcaggccuuauucaagcuuaccaugagcgacaacggcccccagaaccagcgcaacgccccgcggaucaccuucgggggccccuccgacagcaccggguccaaccagaacggcgagcgcagcggggcccgguccaagcagcgccggccccagggccugcccaacaacacggcgagcugguucaccgcccucacccagcacggcaaggaggaccugaaguucccgcgcgggcagggcgugcccaucaacaccaacuccagccccgacgaccagaucggguacuaccggcgcgccacgcggcgcauccggggcggggacggcaagaugaaggaccugagcccccgcugguacuucuacuaccucggcaccgggccggaggccggccugcccuacggggccaacaaggacggcaucaucugggucgcgaccgagggcgcccugaacacccccaaggaccacaucgggacgcggaaccccgccaacaacgccgcgguggugcuccagcugccgcagggcaccacccugcccaagggguucuacgccgagggcucccgcgggggcucccaggccagcucccggagcuccagccgcucccggaacagcucccgcaacagcacccccggcagcuccaagcgcacgagccccgcccgcauggccggcaacgggggcgacgcggcccucgcccugcugcuccuggaccggcugaaccagcucgaguccaagaugagcgggaagggccagcagcagcagggccagaccgugaccaagaaguccgccgccgaggcgagcaagaagccgcgccagaagcgcaccgccacgaaggccuacaacgucacccaggccuucgggcggcgcggccccgagcagacccaggggaacuucggcgaccaggagcugauccggcaggggaccgacuacaagcacuggccccagaucgcccaguucgcgcccuccgccagcgccuucuucggcaugucccgcaucggcauggaggugacgccgagcgggaccuggcugaccuacaccggcgccaucaagcucgacgacaaggaccccaacuucaaggaccaggugauccugcugaacaagcacaucgacgccuacaagacguucccgcccaccgagcccaagaaggacaagaagaagaaggcggacgagacccaggcccucccccagcggcagaagaagcagcagaccgucacgcugcugcccgccgccgaccucgacgacuucuccaagcagcugcagcagagcauguccagcgcggacuccacccaggccugaggacuagucccuguucccagagcccacuuuuuuuucuuuuuuugaaauaaaauagccugucuuucagaucucaaaggcucuuuucagagccaccaaaaaaaaaaaaaaaaaaaaaaaaaaaaaaaaaaaaaaaaaaaaaaaaaaaaaaaaaaaaaaaaaaaaaaaaaaaaaaaaaaaaaaaaaaaaaaaaaaaaa

SEQ ID NO: 28171 - RNA, 1532 nt, Artificial Sequence
  SARS-CoV-2/Wuhan-Hu-1__NC_045512.2/MN908947.2/EPI_ISL_402128__nuc leocapsid protein (N) mRNA gc (1-419)(A119S_R203K_G204R_M234I)
aggagagucccgcagucggcguccagcggcucugcuuguucgugugugugucguugcaggccuuauucaagcuuaccaugagcgacaacggcccccagaaccagcgcaacgccccgcggaucaccuucgggggccccuccgacagcaccggguccaaccagaacggcgagcgcagcggggcccgguccaagcagcgccggccccagggccugcccaacaacacggcgagcugguucaccgcccucacccagcacggcaaggaggaccugaaguucccgcgcgggcagggcgugcccaucaacaccaacuccagccccgacgaccagaucggguacuaccggcgcgccacgcggcgcauccggggcggggacggcaagaugaaggaccugagcccccgcugguacuucuacuaccucggcaccgggccggagagcggccugcccuacggggccaacaaggacggcaucaucugggucgcgaccgagggcgcccugaacacccccaaggaccacaucgggacgcggaaccccgccaacaacgccgcgaucgugcuccagcugccgcagggcaccacccugcccaagggguucuacgccgagggcucccgcgggggcucccaggccagcucccggagcuccagccgcucccggaacagcucccgcaacagcacccccggcagcuccaagcgcacgagccccgcccgcauggccggcaacgggggcgacgcggcccucgcccugcugcuccuggaccggcugaaccagcucgaguccaagaucagcgggaagggccagcagcagcagggccagaccgugaccaagaaguccgccgccgaggcgagcaagaagccgcgccagaagcgcaccgccacgaaggccuacaacgucacccaggccuucgggcggcgcggccccgagcagacccaggggaacuucggcgaccaggagcugauccggcaggggaccgacuacaagcacuggccccagaucgcccaguucgcgcccuccgccagcgccuucuucggcaugucccgcaucggcauggaggugacgccgagcgggaccuggcugaccuacaccggcgccaucaagcucgacgacaaggaccccaacuucaaggaccaggugauccugcugaacaagcacaucgacgccuacaagacguucccgcccaccgagcccaagaaggacaagaagaagaaggcggacgagacccaggcccucccccagcggcagaagaagcagcagaccgucacgcugcugcccgccgccgaccucgacgacuucuccaagcagcugcagcagagcauguccagcgcggacuccacccaggccugaggacuagucccuguucccagagcccacuuuuuuuucuuuuuuugaaauaaaauagccugucuuucagaucucaaaggcucuuuucagagccaccaaaaaaaaaaaaaaaaaaaaaaaaaaaaaaaaaaaaaaaaaaaaaaaaaaaaaaaaaaaaaaaaaaaaaaaaaaaaaaaaaaaaaaaaaaaaaaaaaaaaa

SEQ ID NO: 28172 - RNA, 1532 nt, Artificial Sequence
  SARS-CoV-2/Wuhan-Hu-1__NC_045512.2/MN908947.2/EPI_ISL_402128__nuc leocapsid protein (N) mRNA gc (1-419)(R203K_G204R)
aggagagucccgcagucggcguccagcggcucugcuuguucgugugugugucguugcaggccuuauucaagcuuaccaugagcgacaacggcccccagaaccagcgcaacgccccgcggaucaccuucgggggccccuccgacagcaccggguccaaccagaacggcgagcgcagcggggcccgguccaagcagcgccggccccagggccugcccaacaacacggcgagcugguucaccgcccucacccagcacggcaaggaggaccugaaguucccgcgcgggcagggcgugcccaucaacaccaacuccagccccgacgaccagaucggguacuaccggcgcgccacgcggcgcauccggggcggggacggcaagaugaaggaccugagcccccgcugguacuucuacuaccucggcaccgggccggaggccggccugcccuacggggccaacaaggacggcaucaucugggucgcgaccgagggcgcccugaacacccccaaggaccacaucgggacgcggaaccccgccaacaacgccgcgaucgugcuccagcugccgcagggcaccacccugcccaagggguucuacgccgagggcucccgcgggggcucccaggccagcucccggagcuccagccgcucccggaacagcucccgcaacagcacccccggcagcuccaagcgcacgagccccgcccgcauggccggcaacgggggcgacgcggcccucgcccugcugcuccuggaccggcugaaccagcucgaguccaagaugagcgggaagggccagcagcagcagggccagaccgugaccaagaaguccgccgccgaggcgagcaagaagccgcgccagaagcgcaccgccacgaaggccuacaacgucacccaggccuucgggcggcgcggccccgagcagacccaggggaacuucggcgaccaggagcugauccggcaggggaccgacuacaagcacuggccccagaucgcccaguucgcgcccuccgccagcgccuucuucggcaugucccgcaucggcauggaggugacgccgagcgggaccuggcugaccuacaccggcgccaucaagcucgacgacaaggaccccaacuucaaggaccaggugauccugcugaacaagcacaucgacgccuacaagacguucccgcccaccgagcccaagaaggacaagaagaagaaggcggacgagacccaggcccucccccagcggcagaagaagcagcagaccgucacgcugcugcccgccgccgaccucgacgacuucuccaagcagcugcagcagagcauguccagcgcggacuccacccaggccugaggacuagucccuguucccagagcccacuuuuuuuucuuuuuuugaaauaaaauagccugucuuucagaucucaaaggcucuuuucagagccaccaaaaaaaaaaaaaaaaaaaaaaaaaaaaaaaaaaaaaaaaaaaaaaaaaaaaaaaaaaaaaaaaaaaaaaaaaaaaaaaaaaaaaaaaaaaaaaaaaaaaa

SEQ ID NO: 28173 - RNA, 1532 nt, Artificial Sequence
  SARS-CoV-2/Wuhan-Hu-1__NC_045512.2/MN908947.2/EPI_ISL_402128__nuc leocapsid protein (N) mRNA gc (1-419)(R203K_G204R_G212V)
aggagagucccgcagucggcguccagcggcucugcuuguucgugugugugucguugcaggccuuauucaagcuuaccaugagcgacaacggcccccagaaccagcgcaacgccccgcggaucaccuucgggggccccuccgacagcaccggguccaaccagaacggcgagcgcagcggggcccgguccaagcagcgccggccccagggccugcccaacaacacggcgagcugguucaccgcccucacccagcacggcaaggaggaccugaaguucccgcgcgggcagggcgugcccaucaacaccaacuccagccccgacgaccagaucggguacuaccggcgcgccacgcggcgcauccggggcggggacggcaagaugaaggaccugagcccccgcugguacuucuacuaccucggcaccgggccggaggccggccugcccuacggggccaacaaggacggcaucaucugggucgcgaccgagggcgcccugaacacccccaaggaccacaucgggacgcggaaccccgccaacaacgccgcgaucgugcuccagcugccgcagggcaccacccugcccaagggguucuacgccgagggcucccgcgggggcucccaggccagcucccggagcuccagccgcucccggaacagcucccgcaacagcacccccggcagcuccaagcgcacgagccccgcccgcauggccgugaacgggggcgacgcggcccucgcccugcugcuccuggaccggcugaaccagcucgaguccaagaugagcgggaagggccagcagcagcagggccagaccgugaccaagaaguccgccgccgaggcgagcaagaagccgcgccagaagcgcaccgccacgaaggccuacaacgucacccaggccuucgggcggcgcggccccgagcagacccaggggaacuucggcgaccaggagcugauccggcaggggaccgacuacaagcacuggccccagaucgcccaguucgcgcccuccgccagcgccuucuucggcaugucccgcaucggcauggaggugacgccgagcgggaccuggcugaccuacaccggcgccaucaagcucgacgacaaggaccccaacuucaaggaccaggugauccugcugaacaagcacaucgacgccuacaagacguucccgcccaccgagcccaagaaggacaagaagaagaaggcggacgagacccaggcccucccccagcggcagaagaagcagcagaccgucacgcugcugcccgccgccgaccucgacgacuucuccaagcagcugcagcagagcauguccagcgcggacuccacccaggccugaggacuagucccuguucccagagcccacuuuuuuuucuuuuuuugaaauaaaauagccugucuuucagaucucaaaggcucuuuucagagccaccaaaaaaaaaaaaaaaaaaaaaaaaaaaaaaaaaaaaaaaaaaaaaaaaaaaaaaaaaaaaaaaaaaaaaaaaaaaaaaaaaaaaaaaaaaaaaaaaaaaaa

SEQ ID NO: 28174 - RNA, 1529 nt, Artificial Sequence
  SARS-CoV-2/Wuhan-Hu-1__NC_045512.2/MN908947.2/EPI_ISL_402128__nuc leocapsid protein (N) mRNA gc (1-419)(R203K_G204R_A208G_R209del)
aggagagucccgcagucggcguccagcggcucugcuuguucgugugugugucguugcaggccuuauucaagcuuaccaugagcgacaacggcccccagaaccagcgcaacgccccgcggaucaccuucgggggccccuccgacagcaccggguccaaccagaacggcgagcgcagcggggcccgguccaagcagcgccggccccagggccugcccaacaacacggcgagcugguucaccgcccucacccagcacggcaaggaggaccugaaguucccgcgcgggcagggcgugcccaucaacaccaacuccagccccgacgaccagaucggguacuaccggcgcgccacgcggcgcauccggggcggggacggcaagaugaaggaccugagcccccgcugguacuucuacuaccucggcaccgggccggaggccggccugcccuacggggccaacaaggacggcaucaucugggucgcgaccgagggcgcccugaacacccccaaggaccacaucgggacgcggaaccccgccaacaacgccgcgaucgugcuccagcugccgcagggcaccacccugcccaagggguucuacgccgagggcucccgcgggggcucccaggccagcucccggagcuccagccgcucccggaacagcucccgcaacagcacccccggcagcuccaagcgcacgagccccggcauggccggcaacgggggcgacgcggcccucgcccugcugcuccuggaccggcugaaccagcucgaguccaagaugagcgggaagggccagcagcagcagggccagaccgugaccaagaaguccgccgccgaggcgagcaagaagccgcgccagaagcgcaccgccacgaaggccuacaacgucacccaggccuucgggcggcgcggccccgagcagacccaggggaacuucggcgaccaggagcugauccggcaggggaccgacuacaagcacuggccccagaucgcccaguucgcgcccuccgccagcgccuucuucggcaugucccgcaucggcauggaggugacgccgagcgggaccuggcugaccuacaccggcgccaucaagcucgacgacaaggaccccaacuucaaggaccaggugauccugcugaacaagcacaucgacgccuacaagacguucccgcccaccgagcccaagaaggacaagaagaagaaggcggacgagacccaggcccucccccagcggcagaagaagcagcagaccgucacgcugcugcccgccgccgaccucgacgacuucuccaagcagcugcagcagagcauguccagcgcggacuccacccaggccugaggacuagucccuguucccagagcccacuuuuuuuucuuuuuuugaaauaaaauagccugucuuucagaucucaaaggcucuuuucagagccaccaaaaaaaaaaaaaaaaaaaaaaaaaaaaaaaaaaaaaaaaaaaaaaaaaaaaaaaaaaaaaaaaaaaaaaaaaaaaaaaaaaaaaaaaaaaaaaaaaaaaa

SEQ ID NO: 28175 - RNA, 1532 nt, Artificial Sequence
  SARS-CoV-2/Wuhan-Hu-1__NC_045512.2/MN908947.2/EPI_ISL_402128__nuc leocapsid protein (N) mRNA gc (1-419)(R203M_D377Y)
aggagagucccgcagucggcguccagcggcucugcuuguucgugugugugucguugcaggccuuauucaagcuuaccaugagcgacaacggcccccagaaccagcgcaacgccccgcggaucaccuucgggggccccuccgacagcaccggguccaaccagaacggcgagcgcagcggggcccgguccaagcagcgccggccccagggccugcccaacaacacggcgagcugguucaccgcccucacccagcacggcaaggaggaccugaaguucccgcgcgggcagggcgugcccaucaacaccaacuccagccccgacgaccagaucggguacuaccggcgcgccacgcggcgcauccggggcggggacggcaagaugaaggaccugagcccccgcugguacuucuacuaccucggcaccgggccggaggccggccugcccuacggggccaacaaggacggcaucaucugggucgcgaccgagggcgcccugaacacccccaaggaccacaucgggacgcggaaccccgccaacaacgccgcgaucgugcuccagcugccgcagggcaccacccugcccaagggguucuacgccgagggcucccgcgggggcucccaggccagcucccggagcuccagccgcucccggaacagcucccgcaacagcacccccggcagcuccauggggacgagccccgcccgcauggccggcaacgggggcgacgcggcccucgcccugcugcuccuggaccggcugaaccagcucgaguccaagaugagcgggaagggccagcagcagcagggccagaccgugaccaagaaguccgccgccgaggcgagcaagaagccgcgccagaagcgcaccgccacgaaggccuacaacgucacccaggccuucgggcggcgcggccccgagcagacccaggggaacuucggcgaccaggagcugauccggcaggggaccgacuacaagcacuggccccagaucgcccaguucgcgcccuccgccagcgccuucuucggcaugucccgcaucggcauggaggugacgccgagcgggaccuggcugaccuacaccggcgccaucaagcucgacgacaaggaccccaacuucaaggaccaggugauccugcugaacaagcacaucgacgccuacaagacguucccgcccaccgagcccaagaaggacaagaagaagaaggcguacgagacccaggcccucccccagcggcagaagaagcagcagaccgucacgcugcugcccgccgccgaccucgacgacuucuccaagcagcugcagcagagcauguccagcgcggacuccacccaggccugaggacuagucccuguucccagagcccacuuuuuuuucuuuuuuugaaauaaaauagccugucuuucagaucucaaaggcucuuuucagagccaccaaaaaaaaaaaaaaaaaaaaaaaaaaaaaaaaaaaaaaaaaaaaaaaaaaaaaaaaaaaaaaaaaaaaaaaaaaaaaaaaaaaaaaaaaaaaaaaaaaaaa

SEQ ID NO: 28176 - RNA, 1532 nt, Artificial Sequence
  SARS-CoV-2/Wuhan-Hu-1__NC_045512.2/MN908947.2/EPI_ISL_402128__nuc leocapsid protein (N) mRNA gc (1-419)(T205I_M234I)
aggagagucccgcagucggcguccagcggcucugcuuguucgugugugugucguugcaggccuuauucaagcuuaccaugagcgacaacggcccccagaaccagcgcaacgccccgcggaucaccuucgggggccccuccgacagcaccggguccaaccagaacggcgagcgcagcggggcccgguccaagcagcgccggccccagggccugcccaacaacacggcgagcugguucaccgcccucacccagcacggcaaggaggaccugaaguucccgcgcgggcagggcgugcccaucaacaccaacuccagccccgacgaccagaucggguacuaccggcgcgccacgcggcgcauccggggcggggacggcaagaugaaggaccugagcccccgcugguacuucuacuaccucggcaccgggccggaggccggccugcccuacggggccaacaaggacggcaucaucugggucgcgaccgagggcgcccugaacacccccaaggaccacaucgggacgcggaaccccgccaacaacgccgcgaucgugcuccagcugccgcagggcaccacccugcccaagggguucuacgccgagggcucccgcgggggcucccaggccagcucccggagcuccagccgcucccggaacagcucccgcaacagcacccccggcagcucccgggggaucagccccgcccgcauggccggcaacgggggcgacgcggcccucgcccugcugcuccuggaccggcugaaccagcucgaguccaagaucagcgggaagggccagcagcagcagggccagaccgugaccaagaaguccgccgccgaggcgagcaagaagccgcgccagaagcgcaccgccacgaaggccuacaacgucacccaggccuucgggcggcgcggccccgagcagacccaggggaacuucggcgaccaggagcugauccggcaggggaccgacuacaagcacuggccccagaucgcccaguucgcgcccuccgccagcgccuucuucggcaugucccgcaucggcauggaggugacgccgagcgggaccuggcugaccuacaccggcgccaucaagcucgacgacaaggaccccaacuucaaggaccaggugauccugcugaacaagcacaucgacgccuacaagacguucccgcccaccgagcccaagaaggacaagaagaagaaggcggacgagacccaggcccucccccagcggcagaagaagcagcagaccgucacgcugcugcccgccgccgaccucgacgacuucuccaagcagcugcagcagagcauguccagcgcggacuccacccaggccugaggacuagucccuguucccagagcccacuuuuuuuucuuuuuuugaaauaaaauagccugucuuucagaucucaaaggcucuuuucagagccaccaaaaaaaaaaaaaaaaaaaaaaaaaaaaaaaaaaaaaaaaaaaaaaaaaaaaaaaaaaaaaaaaaaaaaaaaaaaaaaaaaaaaaaaaaaaaaaaaaaaaa

SEQ ID NO: 28177 - RNA, 1532 nt, Artificial Sequence; identical to SEQ ID NO: 19149
  SARS-CoV-2/Wuhan-Hu-1__NC_045512.2/MN908947.2/EPI_ISL_402128__nuc leocapsid protein (N) mRNA gc (1-419)(M234I)

SEQ ID NO: 28178 - RNA, 1532 nt, Artificial Sequence
  SARS-CoV-2/Wuhan-Hu-1__NC_045512.2/MN908947.2/EPI_ISL_402128__nuc leocapsid protein (N) mRNA gc (1-419)(A12G_T205I)
aggagagucccgcagucggcguccagcggcucugcuuguucgugugugugucguugcaggccuuauucaagcuuaccaugagcgacaacggcccccagaaccagcgcaacggcccgcggaucaccuucgggggccccuccgacagcaccggguccaaccagaacggcgagcgcagcggggcccgguccaagcagcgccggccccagggccugcccaacaacacggcgagcugguucaccgcccucacccagcacggcaaggaggaccugaaguucccgcgcgggcagggcgugcccaucaacaccaacuccagccccgacgaccagaucggguacuaccggcgcgccacgcggcgcauccggggcggggacggcaagaugaaggaccugagcccccgcugguacuucuacuaccucggcaccgggccggaggccggccugcccuacggggccaacaaggacggcaucaucugggucgcgaccgagggcgcccugaacacccccaaggaccacaucgggacgcggaaccccgccaacaacgccgcgaucgugcuccagcugccgcagggcaccacccugcccaagggguucuacgccgagggcucccgcgggggcucccaggccagcucccggagcuccagccgcucccggaacagcucccgcaacagcacccccggcagcucccgggggaucagccccgcccgcauggccggcaacgggggcgacgcggcccucgcccugcugcuccuggaccggcugaaccagcucgaguccaagaugagcgggaagggccagcagcagcagggccagaccgugaccaagaaguccgccgccgaggcgagcaagaagccgcgccagaagcgcaccgccacgaaggccuacaacgucacccaggccuucgggcggcgcggccccgagcagacccaggggaacuucggcgaccaggagcugauccggcaggggaccgacuacaagcacuggccccagaucgcccaguucgcgcccuccgccagcgccuucuucggcaugucccgcaucggcauggaggugacgccgagcgggaccuggcugaccuacaccggcgccaucaagcucgacgacaaggaccccaacuucaaggaccaggugauccugcugaacaagcacaucgacgccuacaagacguucccgcccaccgagcccaagaaggacaagaagaagaaggcggacgagacccaggcccucccccagcggcagaagaagcagcagaccgucacgcugcugcccgccgccgaccucgacgacuucuccaagcagcugcagcagagcauguccagcgcggacuccacccaggccugaggacuagucccuguucccagagcccacuuuuuuuucuuuuuuugaaauaaaauagccugucuuucagaucucaaaggcucuuuucagagccaccaaaaaaaaaaaaaaaaaaaaaaaaaaaaaaaaaaaaaaaaaaaaaaaaaaaaaaaaaaaaaaaaaaaaaaaaaaaaaaaaaaaaaaaaaaaaaaaaaaaaa

SEQ ID NO: 28179 - RNA, 1532 nt, Artificial Sequence
  SARS-CoV-2/Wuhan-Hu-1__NC_045512.2/MN908947.2/EPI_ISL_402128__nuc leocapsid protein (N) mRNA gc (1-419)(P13L_P199L_S202R_T205I_M234I)
aggagagucccgcagucggcguccagcggcucugcuuguucgugugugugucguugcaggccuuauucaagcuuaccaugagcgacaacggcccccagaaccagcgcaacgcccugcggaucaccuucgggggccccuccgacagcaccggguccaaccagaacggcgagcgcagcggggcccgguccaagcagcgccggccccagggccugcccaacaacacggcgagcugguucaccgcccucacccagcacggcaaggaggaccugaaguucccgcgcgggcagggcgugcccaucaacaccaacuccagccccgacgaccagaucggguacuaccggcgcgccacgcggcgcauccggggcggggacggcaagaugaaggaccugagcccccgcugguacuucuacuaccucggcaccgggccggaggccggccugcccuacggggccaacaaggacggcaucaucugggucgcgaccgagggcgcccugaacacccccaaggaccacaucgggacgcggaaccccgccaacaacgccgcgaucgugcuccagcugccgcagggcaccacccugcccaagggguucuacgccgagggcucccgcgggggcucccaggccagcucccggagcuccagccgcucccggaacagcucccgcaacagcacccugggcagccgccgggggaucagccccgcccgcauggccggcaacgggggcgacgcggcccucgcccugcugcuccuggaccggcugaaccagcucgaguccaagaucagcgggaagggccagcagcagcagggccagaccgugaccaagaaguccgccgccgaggcgagcaagaagccgcgccagaagcgcaccgccacgaaggccuacaacgucacccaggccuucgggcggcgcggccccgagcagacccaggggaacuucggcgaccaggagcugauccggcaggggaccgacuacaagcacuggccccagaucgcccaguucgcgcccuccgccagcgccuucuucggcaugucccgcaucggcauggaggugacgccgagcgggaccuggcugaccuacaccggcgccaucaagcucgacgacaaggaccccaacuucaaggaccaggugauccugcugaacaagcacaucgacgccuacaagacguucccgcccaccgagcccaagaaggacaagaagaagaaggcggacgagacccaggcccucccccagcggcagaagaagcagcagaccgucacgcugcugcccgccgccgaccucgacgacuucuccaagcagcugcagcagagcauguccagcgcggacuccacccaggccugaggacuagucccuguucccagagcccacuuuuuuuucuuuuuuugaaauaaaauagccugucuuucagaucucaaaggcucuuuucagagccaccaaaaaaaaaaaaaaaaaaaaaaaaaaaaaaaaaaaaaaaaaaaaaaaaaaaaaaaaaaaaaaaaaaaaaaaaaaaaaaaaaaaaaaaaaaaaaaaaaaaaa

SEQ ID NO: 28180 - RNA, 1532 nt, Artificial Sequence
  SARS-CoV-2/Wuhan-Hu-1__NC_045512.2/MN908947.2/EPI_ISL_402128__nuc leocapsid protein (N) mRNA gc (1-419)(P13L_R203K_G204R_G214C_T366I)
aggagagucccgcagucggcguccagcggcucugcuuguucgugugugugucguugcaggccuuauucaagcuuaccaugagcgacaacggcccccagaaccagcgcaacgcccugcggaucaccuucgggggccccuccgacagcaccggguccaaccagaacggcgagcgcagcggggcccgguccaagcagcgccggccccagggccugcccaacaacacggcgagcugguucaccgcccucacccagcacggcaaggaggaccugaaguucccgcgcgggcagggcgugcccaucaacaccaacuccagccccgacgaccagaucggguacuaccggcgcgccacgcggcgcauccggggcggggacggcaagaugaaggaccugagcccccgcugguacuucuacuaccucggcaccgggccggaggccggccugcccuacggggccaacaaggacggcaucaucugggucgcgaccgagggcgcccugaacacccccaaggaccacaucgggacgcggaaccccgccaacaacgccgcgaucgugcuccagcugccgcagggcaccacccugcccaagggguucuacgccgagggcucccgcgggggcucccaggccagcucccggagcuccagccgcucccggaacagcucccgcaacagcacccccggcagcuccaagcgcacgagccccgcccgcauggccggcaacugcggcgacgcggcccucgcccugcugcuccuggaccggcugaaccagcucgaguccaagaugagcgggaagggccagcagcagcagggccagaccgugaccaagaaguccgccgccgaggcgagcaagaagccgcgccagaagcgcaccgccacgaaggccuacaacgucacccaggccuucgggcggcgcggccccgagcagacccaggggaacuucggcgaccaggagcugauccggcaggggaccgacuacaagcacuggccccagaucgcccaguucgcgcccuccgccagcgccuucuucggcaugucccgcaucggcauggaggugacgccgagcgggaccuggcugaccuacaccggcgccaucaagcucgacgacaaggaccccaacuucaaggaccaggugauccugcugaacaagcacaucgacgccuacaagacguucccgcccaucgagcccaagaaggacaagaagaagaaggcggacgagacccaggcccucccccagcggcagaagaagcagcagaccgucacgcugcugcccgccgccgaccucgacgacuucuccaagcagcugcagcagagcauguccagcgcggacuccacccaggccugaggacuagucccuguucccagagcccacuuuuuuuucuuuuuuugaaauaaaauagccugucuuucagaucucaaaggcucuuuucagagccaccaaaaaaaaaaaaaaaaaaaaaaaaaaaaaaaaaaaaaaaaaaaaaaaaaaaaaaaaaaaaaaaaaaaaaaaaaaaaaaaaaaaaaaaaaaaaaaaaaaaaa

SEQ ID NO: 28181 - RNA, 1529 nt, Artificial Sequence
  SARS-CoV-2/Wuhan-Hu-1__NC_045512.2/MN908947.2/EPI_ISL_402128__nuc leocapsid protein (N) mRNA gc (1-419)(R203K_G204R_A208G_R209del_M234I)
aggagagucccgcagucggcguccagcggcucugcuuguucgugugugugucguugcaggccuuauucaagcuuaccaugagcgacaacggcccccagaaccagcgcaacgccccgcggaucaccuucgggggccccuccgacagcaccggguccaaccagaacggcgagcgcagcggggcccgguccaagcagcgccggccccagggccugcccaacaacacggcgagcugguucaccgcccucacccagcacggcaaggaggaccugaaguucccgcgcgggcagggcgugcccaucaacaccaacuccagccccgacgaccagaucggguacuaccggcgcgccacgcggcgcauccggggcggggacggcaagaugaaggaccugagcccccgcugguacuucuacuaccucggcaccgggccggaggccggccugcccuacggggccaacaaggacggcaucaucugggucgcgaccgagggcgcccugaacacccccaaggaccacaucgggacgcggaaccccgccaacaacgccgcgaucgugcuccagcugccgcagggcaccacccugcccaagggguucuacgccgagggcucccgcgggggcucccaggccagcucccggagcuccagccgcucccggaacagcucccgcaacagcacccccggcagcuccaagcgcacgagccccggcauggccggcaacgggggcgacgcggcccucgcccugcugcuccuggaccggcugaaccagcucgaguccaagaucagcgggaagggccagcagcagcagggccagaccgugaccaagaaguccgccgccgaggcgagcaagaagccgcgccagaagcgcaccgccacgaaggccuacaacgucacccaggccuucgggcggcgcggccccgagcagacccaggggaacuucggcgaccaggagcugauccggcaggggaccgacuacaagcacuggccccagaucgcccaguucgcgcccuccgccagcgccuucuucggcaugucccgcaucggcauggaggugacgccgagcgggaccuggcugaccuacaccggcgccaucaagcucgacgacaaggaccccaacuucaaggaccaggugauccugcugaacaagcacaucgacgccuacaagacguucccgcccaccgagcccaagaaggacaagaagaagaaggcggacgagacccaggcccucccccagcggcagaagaagcagcagaccgucacgcugcugcccgccgccgaccucgacgacuucuccaagcagcugcagcagagcauguccagcgcggacuccacccaggccugaggacuagucccuguucccagagcccacuuuuuuuucuuuuuuugaaauaaaauagccugucuuucagaucucaaaggcucuuuucagagccaccaaaaaaaaaaaaaaaaaaaaaaaaaaaaaaaaaaaaaaaaaaaaaaaaaaaaaaaaaaaaaaaaaaaaaaaaaaaaaaaaaaaaaaaaaaaaaaaaaaaaa

SEQ ID NO: 28182 - RNA, 500 nt, Artificial Sequence
  SARS-CoV-2/Wuhan-Hu-1__NC_045512.2/MN908947.2/EPI_ISL_402128__env elope protein (E) mRNA gc (1-75)(P71L)
aggagagucccgcagucggcguccagcggcucugcuuguucgugugugugucguugcaggccuuauucaagcuuaccauguacagcuucguguccgaggagaccggcacccugaucgucaacagcgugcuccuguuccuggccuucguggucuuccuccuggugacgcuggccauccucaccgcgcugcgccugugcgccuacugcugcaacaucgugaacgucucccucgugaagcccagcuucuacguguacucccgggucaagaaccugaacagcucccgcgugcuggaccugcucgugugaggacuagucccuguucccagagcccacuuuuuuuucuuuuuuugaaauaaaauagccugucuuucagaucucaaaggcucuuuucagagccaccaaaaaaaaaaaaaaaaaaaaaaaaaaaaaaaaaaaaaaaaaaaaaaaaaaaaaaaaaaaaaaaaaaaaaaaaaaaaaaaaaaaaaaaaaaaaaaaaaaaaa

SEQ ID NO: 28183 - RNA, 500 nt, Artificial Sequence
  SARS-CoV-2/Wuhan-Hu-1__NC_045512.2/MN908947.2/EPI_ISL_402128__env elope protein (E) mRNA gc (1-75)(T9I_C43F_V49L_V58F_V62F_L73F)
aggagagucccgcagucggcguccagcggcucugcuuguucgugugugugucguugcaggccuuauucaagcuuaccauguacagcuucguguccgaggagaucggcacccugaucgucaacagcgugcuccuguuccuggccuucguggucuuccuccuggugacgcuggccauccucaccgcgcugcgccugugcgccuacuucugcaacaucgugaaccugucccucgugaagcccagcuucuacuucuacucccgguucaagaaccugaacagcucccgcgugccggacuuccucgugugaggacuagucccuguucccagagcccacuuuuuuuucuuuuuuugaaauaaaauagccugucuuucagaucucaaaggcucuuuucagagccaccaaaaaaaaaaaaaaaaaaaaaaaaaaaaaaaaaaaaaaaaaaaaaaaaaaaaaaaaaaaaaaaaaaaaaaaaaaaaaaaaaaaaaaaaaaaaaaaaaaaaa

SEQ ID NO: 28184 - RNA, 500 nt, Artificial Sequence
  SARS-CoV-2/Wuhan-Hu-1__NC_045512.2/MN908947.2/EPI_ISL_402128__env elope protein (E) mRNA gc (1-75)(T9I_V58F_V62F_S68F_L73F)
aggagagucccgcagucggcguccagcggcucugcuuguucgugugugugucguugcaggccuuauucaagcuuaccauguacagcuucguguccgaggagaucggcacccugaucgucaacagcgugcuccuguuccuggccuucguggucuuccuccuggugacgcuggccauccucaccgcgcugcgccugugcgccuacugcugcaacaucgugaacgucucccucgugaagcccagcuucuacuucuacucccgguucaagaaccugaacagcuuccgcgugccggacuuccucgugugaggacuagucccuguucccagagcccacuuuuuuuucuuuuuuugaaauaaaauagccugucuuucagaucucaaaggcucuuuucagagccaccaaaaaaaaaaaaaaaaaaaaaaaaaaaaaaaaaaaaaaaaaaaaaaaaaaaaaaaaaaaaaaaaaaaaaaaaaaaaaaaaaaaaaaaaaaaaaaaaaaaaa

SEQ ID NO: 28185 - RNA, 500 nt, Artificial Sequence
  SARS-CoV-2/Wuhan-Hu-1__NC_045512.2/MN908947.2/EPI_ISL_402128__env elope protein (E) mRNA gc (1-75)(T9I_V58F_S68A_R69G_P71S)
aggagagucccgcagucggcguccagcggcucugcuuguucgugugugugucguugcaggccuuauucaagcuuaccauguacagcuucguguccgaggagaucggcacccugaucgucaacagcgugcuccuguuccuggccuucguggucuuccuccuggugacgcuggccauccucaccgcgcugcgccugugcgccuacugcugcaacaucgugaacgucucccucgugaagcccagcuucuacuucuacucccgggucaagaaccugaacagcgccggcgugagcgaccugcucgugugaggacuagucccuguucccagagcccacuuuuuuuucuuuuuuugaaauaaaauagccugucuuucagaucucaaaggcucuuuucagagccaccaaaaaaaaaaaaaaaaaaaaaaaaaaaaaaaaaaaaaaaaaaaaaaaaaaaaaaaaaaaaaaaaaaaaaaaaaaaaaaaaaaaaaaaaaaaaaaaaaaaaa

SEQ ID NO: 28186 - RNA, 500 nt, Artificial Sequence
  SARS-CoV-2/Wuhan-Hu-1__NC_045512.2/MN908947.2/EPI_ISL_402128__env elope protein (E) mRNA gc (1-75)(L21F)
aggagagucccgcagucggcguccagcggcucugcuuguucgugugugugucguugcaggccuuauucaagcuuaccauguacagcuucguguccgaggagaccggcacccugaucgucaacagcgugcuccuguucuucgccuucguggucuuccuccuggugacgcuggccauccucaccgcgcugcgccugugcgccuacugcugcaacaucgugaacgucucccucgugaagcccagcuucuacguguacucccgggucaagaaccugaacagcucccgcgugccggaccugcucgugugaggacuagucccuguucccagagcccacuuuuuuuucuuuuuuugaaauaaaauagccugucuuucagaucucaaaggcucuuuucagagccaccaaaaaaaaaaaaaaaaaaaaaaaaaaaaaaaaaaaaaaaaaaaaaaaaaaaaaaaaaaaaaaaaaaaaaaaaaaaaaaaaaaaaaaaaaaaaaaaaaaaaa

SEQ ID NO: 28187 - RNA, 500 nt, Artificial Sequence
  SARS-CoV-2/Wuhan-Hu-1__NC_045512.2/MN908947.2/EPI_ISL_402128__env elope protein (E) mRNA gc (1-75)(T9I_L21F_S55F_V58F_S68F_L73F)
aggagagucccgcagucggcguccagcggcucugcuuguucgugugugugucguugcaggccuuauucaagcuuaccauguacagcuucguguccgaggagaucggcacccugaucgucaacagcgugcuccuguucuucgccuucguggucuuccuccuggugacgcuggccauccucaccgcgcugcgccugugcgccuacugcugcaacaucgugaacgucucccucgugaagcccuucuucuacuucuacucccgggucaagaaccugaacagcuuccgcgugccggacuuccucgugugaggacuagucccuguucccagagcccacuuuuuuuucuuuuuuugaaauaaaauagccugucuuucagaucucaaaggcucuuuucagagccaccaaaaaaaaaaaaaaaaaaaaaaaaaaaaaaaaaaaaaaaaaaaaaaaaaaaaaaaaaaaaaaaaaaaaaaaaaaaaaaaaaaaaaaaaaaaaaaaaaaaaa

SEQ ID NO: 28188 - RNA, 500 nt, Artificial Sequence
  SARS-CoV-2/Wuhan-Hu-1__NC_045512.2/MN908947.2/EPI_ISL_402128__env elope protein (E) mRNA gc (1-75)(T9I_S55F_V58F_S68F_P71L_D72Y_L73F)
aggagagucccgcagucggcguccagcggcucugcuuguucgugugugugucguugcaggccuuauucaagcuuaccauguacagcuucguguccgaggagaucggcacccugaucgucaacagcgugcuccuguuccuggccuucguggucuuccuccuggugacgcuggccauccucaccgcgcugcgccugugcgccuacugcugcaacaucgugaacgucucccucgugaagcccuucuucuacuucuacucccgggucaagaaccugaacagcuuccgcgugcuguacuuccucgugugaggacuagucccuguucccagagcccacuuuuuuuucuuuuuuugaaauaaaauagccugucuuucagaucucaaaggcucuuuucagagccaccaaaaaaaaaaaaaaaaaaaaaaaaaaaaaaaaaaaaaaaaaaaaaaaaaaaaaaaaaaaaaaaaaaaaaaaaaaaaaaaaaaaaaaaaaaaaaaaaaaaaa

SEQ ID NO: 28189 - RNA, 500 nt, Artificial Sequence
  SARS-CoV-2/Wuhan-Hu-1__NC_045512.2/MN908947.2/EPI_ISL_402128__env elope protein (E) mRNA gc (1-75)(T9I_S55F_V58F_S68F_D72Y_L73F)
aggagagucccgcagucggcguccagcggcucugcuuguucgugugugugucguugcaggccuuauucaagcuuaccauguacagcuucguguccgaggagaucggcacccugaucgucaacagcgugcuccuguuccuggccuucguggucuuccuccuggugacgcuggccauccucaccgcgcugcgccugugcgccuacugcugcaacaucgugaacgucucccucgugaagcccuucuucuacuucuacucccgggucaagaaccugaacagcuuccgcgugccguacuuccucgugugaggacuagucccuguucccagagcccacuuuuuuuucuuuuuuugaaauaaaauagccugucuuucagaucucaaaggcucuuuucagagccaccaaaaaaaaaaaaaaaaaaaaaaaaaaaaaaaaaaaaaaaaaaaaaaaaaaaaaaaaaaaaaaaaaaaaaaaaaaaaaaaaaaaaaaaaaaaaaaaaaaaaa

SEQ ID NO: 28190 - RNA, 6113 nt, Artificial Sequence
  SARS-CoV-2/Wuhan-Hu-1__NC_045512.2/MN908947.2__non-structural protein 3 (NSP3) mRNA gc (1-1946)(T184I_A891D_I1413T)
aggagagucccgcagucggcguccagcggcucugcuuguucgugugugugucguugcaggccuuauucaagcuuaccauggcccccaccaaggugaccuucggcgacgacaccgucaucgaggugcagggguacaagagcgugaacaucaccuucgagcuggacgagcgcaucgacaagguccucaacgagaagugcuccgccuacaccguggagcugggcaccgaggugaacgaguucgcgugcgucguggccgacgccgugaucaagacgcugcagccggucagcgagcuccugacgccccuggggaucgaccucgacgagugguccauggccaccuacuaccuguucgacgagagcggcgaguucaagcuggccucccacauguacugcagcuucuacccgcccgacgaggacgaggaggagggggacugcgaggaggaggaguucgagcccuccacccaguacgaguacggcacggaggacgacuaccagggcaagccccucgaguucggggcgaccagcgccgcccugcagcccgaggaggagcaggaggaggacuggcuggacgacgacucccagcagaccgugggccagcaggacgggagcgaggacaaccagaccacgaucauccagaccaucguggagguccagccccagcucgagauggagcugaccccgguggugcagacgaucgaggucaacuccuucagcggcuaccugaagcucaccgacaacguguacaucaagaacgccgacaucguggaggaggcgaagaaggucaagcccaccgugguggucaacgccgccaacguguaccugaagcacgggggcggcguggccggggcccugaacaaggcgaccaacaacgccaugcaggucgaguccgacgacuacaucgccacgaacggcccccucaaggucgggggcagcugcgugcuguccggccacaaccuggccaagcacugccuccacgugguggggcccaacgucaacaagggcgaggacauccagcugcucaagagcgccuacgagaacuucaaccagcacgaggugcugcuggcgccgcugcucuccgccgggaucuucggcgccgaccccauccacagccugcgggugugcgucgacaccgugcgcaccaacguguaccuggccgucuucgacaagaaccucuacgacaagcugguguccagcuuccuggagaugaaguccgagaagcaggucgagcagaagaucgccgagauccccaaggaggaggugaagcccuucaucaccgagagcaagccgagcguggagcagcggaagcaggacgacaagaagaucaaggcgugcguggaggaggucacgaccacccucgaggagaccaaguuccugacggagaaccugcuccuguacaucgacaucaacgggaaccugcaccccgacuccgccacccucgugagcgacaucgacaucaccuuccugaagaaggacgcccccuacaucgugggcgacgucgugcaggagggcgugcugaccgccgucgugauccccacgaagaaggccgggggcaccaccgagaugcucgcgaaggcccugcgcaaggugccgaccgacaacuacaucacgaccuaccccgggcagggccugaacggguacaccgucgaggaggccaagaccgugcucaagaagugcaaguccgccuucuacauccugcccagcaucaucuccaacgagaagcaggagauccugggcaccgugagcuggaaccugcgggagaugcucgcgcacgccgaggagacgcgcaagcugaugcccgucugcguggagaccaaggccaucguguccaccauccagcggaaguacaagggcaucaagauccaggagggggucguggacuacggcgcccgcuucuacuucuacaccagcaagacgaccguggccucccugaucaacacccucaacgaccugaacgagacccuggucacgaugccgcucggguacgugacccacggccugaaccuggaggaggcggcccgguacaugcgcagccucaaggugcccgccaccgucuccgugagcucccccgacgccgugaccgccuacaacggguaccugacgagcuccagcaagacccccgaggagcacuucaucgagaccaucucccuggcgggcagcuacaaggacuggagcuacuccggccagagcacccagcucgggaucgaguuccugaagcggggcgacaaguccgucuacuacacgagcaacccgaccaccuuccaccuggacggggaggugaucaccuucgacaaccucaagacgcugcugucccuccgcgaggugcggaccaucaaggucuucaccaccguggacaacaucaaccugcacacccagguggucgacaugagcaugaccuacggccagcaguucggccccaccuaccuggacggggccgacgugaccaagaucaagccccacaacucccacgagggcaagacguucuacgugcucccgaacgacgacacccugcgcgucgaggccuucgaguacuaccacaccaccgaccccagcuuccuggggcgguacauguccgcccucaaccacacgaagaaguggaaguacccccaggugaacggccugaccagcaucaagugggccgacaacaacugcuaccuggcgaccgcccuccugacccugcagcagaucgagcucaaguucaacccgcccgcccugcaggacgccuacuaccgcgcgcgggccggggaggccgacaacuucugcgcccugauccucgcguacugcaacaagacggugggcgagcugggcgacguccgcgagaccauguccuaccuguuccagcacgccaaccucgacagcugcaagcgggugcugaacgucgugugcaagaccugcgggcagcagcagaccacccugaagggcguggaggccgucauguacauggggacgcucuccuacgagcaguucaagaagggcgugcagauccccugcacgugcgggaagcaggccaccaaguaccuggugcagcaggagagccccuucgucaugauguccgcgcccccggcccaguacgagcugaagcacggcaccuucacgugcgccagcgaguacaccggcaacuaccagugcgggcacuacaagcacaucaccuccaaggagacccucuacugcaucgacggcgcccugcugaccaagagcagcgaguacaaggggcccaucaccgacguguucuacaaggagaacuccuacaccaccacgaucaagcccgugaccuacaagcucgacggcgucgugugcaccgagaucgaccccaagcuggacaacuacuacaagaaggacaacagcuacuucaccgagcagccgaucgaccuggugcccaaccagcccuaccccaacgccuccuucgacaacuucaaguucgucugcgacaacaucaaguucgccgacgaccucaaccagcugacgggguacaagaagccggcgagccgcgagcugaaggugaccuucuuccccgaccucaacggcgacguggucgccaucgacuacaagcacuacacccccuccuucaagaagggcgccaagcugcugcacaagcccaucguguggcacgugaacaacgccaccaacaaggcgacguacaagccgaacaccuggugcauccggugccucuggagcaccaagcccgucgagaccuccaacagcuucgacgugcugaaguccgaggacgcccaggggauggacaaccuggccugcgaggaccucaagcccgugagcgaggaggucguggagaaccccacgauccagaaggacgugcuggagugcaacgucaagaccaccgagguggugggcgacaucauccugaagccggccaacaacucccucaagaucaccgaggaggucgggcacacggaccugauggccgcguacguggacaacagcucccugaccaucaagaagcccaacgagcucagccgcgugcugggccugaagacccucgccacccacgggcuggccgccgucaacuccgugcccugggacacgaucgccaacuacgcgaagccguuccugaacaagguggucagcaccaccaccaacaucgugacgcgcugccucaaccgggugugcaccaacuacaugcccuacuucuucacccugcugcuccagcugugcaccuucacgcgcuccaccaacagccggaucaaggccuccaugcccaccaccaucgccaagaacaccgucaagagcgugggcaaguucugccuggaggccagcuucaacuaccucaagucccccaacuucagcaagcugaucaacaucaccaucugguuccugcuccuguccgugugccugggcagccucaucuacuccacggccgcgcuggggguccugaugagcaaccucggcaugccguccuacugcaccggguaccgcgagggcuaccugaacagcaccaacgugaccaucgccacguacugcaccggcuccauccccugcagcgugugccuguccgggcucgacagccuggacaccuaccccucccuggagaccauccagaucacgaucagcuccuucaagugggaccucaccgccuucggccuggucgccgagugguuccuggccuacauccucuucacccgguucuucuacgugcuggggcuggcggccaucaugcagcuguucuucagcuacuucgccgugcacuucaucuccaacagcuggcucauguggcugaucaucaaccugguccagauggcccccaucuccgcgauggugcgcauguacaucuucuucgccagcuucuacuacguguggaaguccuacguccacgugguggacggcugcaacagcagcacgugcaugaugugcuacaagcggaaccgcgccacgcgggucgagugcaccaccaucgugaacgggguccgccgguccuucuacguguacgccaacggcggcaagggguucugcaagcuccacaacuggaacugcgugaacugcgacaccuucugcgccggcagcacguucaucuccgacgaggucgcgcgcgaccugagccugcaguucaagcggccgaucaaccccaccgaccaguccagcuacaucguggacuccgugaccgucaagaacgggagcauccaccucuacuucgacaaggccggccagaagaccuacgagcgccacucccugagccacuucgugaaccuggacaaccuccgggccaacaacacgaaggggucccugcccaucaacgugaucgucuucgacggcaagagcaagugcgaggaguccagcgccaaguccgccagcguguacuacucccagcugaugugccagcccauccuccugcuggaccaggcgcucgugagcgacgucggcgacagcgccgagguggccgugaagauguucgacgccuacgucaacaccuucuccagcaccuucaacgugccgauggagaagcugaagacccugguggccacggcggaggccgagcucgccaagaacgucucccuggacaacgugcugagcaccuucaucuccgccgcgcgccagggguucguggacagcgacgucgagaccaaggacgugguggagugccucaagcugucccaccagagcgacaucgaggucaccggcgacuccugcaacaacuacaugcugacguacaacaagguggagaacaugacgccccgggaccucggggccugcaucgacugcagcgcccgccacaucaacgcccagguggccaagucccacaacaucgcgcugaucuggaacgucaaggacuucaugagccuguccgagcagcuccggaagcagauccgcagcgccgccaagaagaacaaccugcccuucaagcugaccugcgccaccacccgccagguggugaacgucgugaccaccaagaucgcccucaagggcgggugaggacuagucccuguucccagagcccacuuuuuuuucuuuuuuugaaauaaaauagccugucuuucagaucucaaaggcucuuuucagagccaccaaaaaaaaaaaaaaaaaaaaaaaaaaaaaaaaaaaaaaaaaaaaaaaaaaaaaaaaaaaaaaaaaaaaaaaaaaaaaaaaaaaaaaaaaaaaaaaaaaaaa

SEQ ID NO: 28191 - RNA, 6113 nt, Artificial Sequence
  SARS-CoV-2/Wuhan-Hu-1__NC_045512.2/MN908947.2__non-structural protein 3 (NSP3) mRNA gc (1-1946)(A329T_P823L)
aggagagucccgcagucggcguccagcggcucugcuuguucgugugugugucguugcaggccuuauucaagcuuaccauggcccccaccaaggugaccuucggcgacgacaccgucaucgaggugcagggguacaagagcgugaacaucaccuucgagcuggacgagcgcaucgacaagguccucaacgagaagugcuccgccuacaccguggagcugggcaccgaggugaacgaguucgcgugcgucguggccgacgccgugaucaagacgcugcagccggucagcgagcuccugacgccccuggggaucgaccucgacgagugguccauggccaccuacuaccuguucgacgagagcggcgaguucaagcuggccucccacauguacugcagcuucuacccgcccgacgaggacgaggaggagggggacugcgaggaggaggaguucgagcccuccacccaguacgaguacggcacggaggacgacuaccagggcaagccccucgaguucggggcgaccagcgccgcccugcagcccgaggaggagcaggaggaggacuggcuggacgacgacucccagcagaccgugggccagcaggacgggagcgaggacaaccagaccacgaccauccagaccaucguggagguccagccccagcucgagauggagcugaccccgguggugcagacgaucgaggucaacuccuucagcggcuaccugaagcucaccgacaacguguacaucaagaacgccgacaucguggaggaggcgaagaaggucaagcccaccgugguggucaacgccgccaacguguaccugaagcacgggggcggcguggccggggcccugaacaaggcgaccaacaacgccaugcaggucgaguccgacgacuacaucgccacgaacggcccccucaaggucgggggcagcugcgugcuguccggccacaaccuggccaagcacugccuccacgugguggggcccaacgucaacaagggcgaggacauccagcugcucaagagcgccuacgagaacuucaaccagcacgaggugcugcugaccccgcugcucuccgccgggaucuucggcgccgaccccauccacagccugcgggugugcgucgacaccgugcgcaccaacguguaccuggccgucuucgacaagaaccucuacgacaagcugguguccagcuuccuggagaugaaguccgagaagcaggucgagcagaagaucgccgagauccccaaggaggaggugaagcccuucaucaccgagagcaagccgagcguggagcagcggaagcaggacgacaagaagaucaaggcgugcguggaggaggucacgaccacccucgaggagaccaaguuccugacggagaaccugcuccuguacaucgacaucaacgggaaccugcaccccgacuccgccacccucgugagcgacaucgacaucaccuuccugaagaaggacgcccccuacaucgugggcgacgucgugcaggagggcgugcugaccgccgucgugauccccacgaagaaggccgggggcaccaccgagaugcucgcgaaggcccugcgcaaggugccgaccgacaacuacaucacgaccuaccccgggcagggccugaacggguacaccgucgaggaggccaagaccgugcucaagaagugcaaguccgccuucuacauccugcccagcaucaucuccaacgagaagcaggagauccugggcaccgugagcuggaaccugcgggagaugcucgcgcacgccgaggagacgcgcaagcugaugcccgucugcguggagaccaaggccaucguguccaccauccagcggaaguacaagggcaucaagauccaggagggggucguggacuacggcgcccgcuucuacuucuacaccagcaagacgaccguggccucccugaucaacacccucaacgaccugaacgagacccuggucacgaugccgcucggguacgugacccacggccugaaccuggaggaggcggcccgguacaugcgcagccucaaggugcccgccaccgucuccgugagcucccccgacgccgugaccgccuacaacggguaccugacgagcuccagcaagacccccgaggagcacuucaucgagaccaucucccuggcgggcagcuacaaggacuggagcuacuccggccagagcacccagcucgggaucgaguuccugaagcggggcgacaaguccgucuacuacacgagcaacccgaccaccuuccaccuggacggggaggugaucaccuucgacaaccucaagacgcugcugucccuccgcgaggugcggaccaucaaggucuucaccaccguggacaacaucaaccugcacacccagguggucgacaugagcaugaccuacggccagcaguucggccccaccuaccuggacggggccgacgugaccaagaucaagccccacaacucccacgagggcaagacguucuacgugcucccgaacgacgacacccugcgcgucgaggccuucgaguacuaccacaccaccgaccugagcuuccuggggcgguacauguccgcccucaaccacacgaagaaguggaaguacccccaggugaacggccugaccagcaucaagugggccgacaacaacugcuaccuggcgaccgcccuccugacccugcagcagaucgagcucaaguucaacccgcccgcccugcaggacgccuacuaccgcgcgcgggccggggaggccgccaacuucugcgcccugauccucgcguacugcaacaagacggugggcgagcugggcgacguccgcgagaccauguccuaccuguuccagcacgccaaccucgacagcugcaagcgggugcugaacgucgugugcaagaccugcgggcagcagcagaccacccugaagggcguggaggccgucauguacauggggacgcucuccuacgagcaguucaagaagggcgugcagauccccugcacgugcgggaagcaggccaccaaguaccuggugcagcaggagagccccuucgucaugauguccgcgcccccggcccaguacgagcugaagcacggcaccuucacgugcgccagcgaguacaccggcaacuaccagugcgggcacuacaagcacaucaccuccaaggagacccucuacugcaucgacggcgcccugcugaccaagagcagcgaguacaaggggcccaucaccgacguguucuacaaggagaacuccuacaccaccacgaucaagcccgugaccuacaagcucgacggcgucgugugcaccgagaucgaccccaagcuggacaacuacuacaagaaggacaacagcuacuucaccgagcagccgaucgaccuggugcccaaccagcccuaccccaacgccuccuucgacaacuucaaguucgucugcgacaacaucaaguucgccgacgaccucaaccagcugacgggguacaagaagccggcgagccgcgagcugaaggugaccuucuuccccgaccucaacggcgacguggucgccaucgacuacaagcacuacacccccuccuucaagaagggcgccaagcugcugcacaagcccaucguguggcacgugaacaacgccaccaacaaggcgacguacaagccgaacaccuggugcauccggugccucuggagcaccaagcccgucgagaccuccaacagcuucgacgugcugaaguccgaggacgcccaggggauggacaaccuggccugcgaggaccucaagcccgugagcgaggaggucguggagaaccccacgauccagaaggacgugcuggagugcaacgucaagaccaccgagguggugggcgacaucauccugaagccggccaacaacucccucaagaucaccgaggaggucgggcacacggaccugauggccgcguacguggacaacagcucccugaccaucaagaagcccaacgagcucagccgcgugcugggccugaagacccucgccacccacgggcuggccgccgucaacuccgugcccugggacacgaucgccaacuacgcgaagccguuccugaacaagguggucagcaccaccaccaacaucgugacgcgcugccucaaccgggugugcaccaacuacaugcccuacuucuucacccugcugcuccagcugugcaccuucacgcgcuccaccaacagccggaucaaggccuccaugcccaccaccaucgccaagaacaccgucaagagcgugggcaaguucugccuggaggccagcuucaacuaccucaagucccccaacuucagcaagcugaucaacaucaucaucugguuccugcuccuguccgugugccugggcagccucaucuacuccacggccgcgcuggggguccugaugagcaaccucggcaugccguccuacugcaccggguaccgcgagggcuaccugaacagcaccaacgugaccaucgccacguacugcaccggcuccauccccugcagcgugugccuguccgggcucgacagccuggacaccuaccccucccuggagaccauccagaucacgaucagcuccuucaagugggaccucaccgccuucggccuggucgccgagugguuccuggccuacauccucuucacccgguucuucuacgugcuggggcuggcggccaucaugcagcuguucuucagcuacuucgccgugcacuucaucuccaacagcuggcucauguggcugaucaucaaccugguccagauggcccccaucuccgcgauggugcgcauguacaucuucuucgccagcuucuacuacguguggaaguccuacguccacgugguggacggcugcaacagcagcacgugcaugaugugcuacaagcggaaccgcgccacgcgggucgagugcaccaccaucgugaacgggguccgccgguccuucuacguguacgccaacggcggcaagggguucugcaagcuccacaacuggaacugcgugaacugcgacaccuucugcgccggcagcacguucaucuccgacgaggucgcgcgcgaccugagccugcaguucaagcggccgaucaaccccaccgaccaguccagcuacaucguggacuccgugaccgucaagaacgggagcauccaccucuacuucgacaaggccggccagaagaccuacgagcgccacucccugagccacuucgugaaccuggacaaccuccgggccaacaacacgaaggggucccugcccaucaacgugaucgucuucgacggcaagagcaagugcgaggaguccagcgccaaguccgccagcguguacuacucccagcugaugugccagcccauccuccugcuggaccaggcgcucgugagcgacgucggcgacagcgccgagguggccgugaagauguucgacgccuacgucaacaccuucuccagcaccuucaacgugccgauggagaagcugaagacccugguggccacggcggaggccgagcucgccaagaacgucucccuggacaacgugcugagcaccuucaucuccgccgcgcgccagggguucguggacagcgacgucgagaccaaggacgugguggagugccucaagcugucccaccagagcgacaucgaggucaccggcgacuccugcaacaacuacaugcugacguacaacaagguggagaacaugacgccccgggaccucggggccugcaucgacugcagcgcccgccacaucaacgcccagguggccaagucccacaacaucgcgcugaucuggaacgucaaggacuucaugagccuguccgagcagcuccggaagcagauccgcagcgccgccaagaagaacaaccugcccuucaagcugaccugcgccaccacccgccagguggugaacgucgugaccaccaagaucgcccucaagggcgggugaggacuagucccuguucccagagcccacuuuuuuuucuuuuuuugaaauaaaauagccugucuuucagaucucaaaggcucuuuucagagccaccaaaaaaaaaaaaaaaaaaaaaaaaaaaaaaaaaaaaaaaaaaaaaaaaaaaaaaaaaaaaaaaaaaaaaaaaaaaaaaaaaaaaaaaaaaaaaaaaaaaaa

SEQ ID NO: 28192 - RNA, 6113 nt, Artificial Sequence
  SARS-CoV-2/Wuhan-Hu-1__NC_045512.2/MN908947.2__non-structural protein 3 (NSP3) mRNA gc (1-1946)(S371L_K978Q)
aggagagucccgcagucggcguccagcggcucugcuuguucgugugugugucguugcaggccuuauucaagcuuaccauggcccccaccaaggugaccuucggcgacgacaccgucaucgaggugcagggguacaagagcgugaacaucaccuucgagcuggacgagcgcaucgacaagguccucaacgagaagugcuccgccuacaccguggagcugggcaccgaggugaacgaguucgcgugcgucguggccgacgccgugaucaagacgcugcagccggucagcgagcuccugacgccccuggggaucgaccucgacgagugguccauggccaccuacuaccuguucgacgagagcggcgaguucaagcuggccucccacauguacugcagcuucuacccgcccgacgaggacgaggaggagggggacugcgaggaggaggaguucgagcccuccacccaguacgaguacggcacggaggacgacuaccagggcaagccccucgaguucggggcgaccagcgccgcccugcagcccgaggaggagcaggaggaggacuggcuggacgacgacucccagcagaccgugggccagcaggacgggagcgaggacaaccagaccacgaccauccagaccaucguggagguccagccccagcucgagauggagcugaccccgguggugcagacgaucgaggucaacuccuucagcggcuaccugaagcucaccgacaacguguacaucaagaacgccgacaucguggaggaggcgaagaaggucaagcccaccgugguggucaacgccgccaacguguaccugaagcacgggggcggcguggccggggcccugaacaaggcgaccaacaacgccaugcaggucgaguccgacgacuacaucgccacgaacggcccccucaaggucgggggcagcugcgugcuguccggccacaaccuggccaagcacugccuccacgugguggggcccaacgucaacaagggcgaggacauccagcugcucaagagcgccuacgagaacuucaaccagcacgaggugcugcuggcgccgcugcucuccgccgggaucuucggcgccgaccccauccacagccugcgggugugcgucgacaccgugcgcaccaacguguaccuggccgucuucgacaagaaccucuacgacaagcuggugcugagcuuccuggagaugaaguccgagaagcaggucgagcagaagaucgccgagauccccaaggaggaggugaagcccuucaucaccgagagcaagccgagcguggagcagcggaagcaggacgacaagaagaucaaggcgugcguggaggaggucacgaccacccucgaggagaccaaguuccugacggagaaccugcuccuguacaucgacaucaacgggaaccugcaccccgacuccgccacccucgugagcgacaucgacaucaccuuccugaagaaggacgcccccuacaucgugggcgacgucgugcaggagggcgugcugaccgccgucgugauccccacgaagaaggccgggggcaccaccgagaugcucgcgaaggcccugcgcaaggugccgaccgacaacuacaucacgaccuaccccgggcagggccugaacggguacaccgucgaggaggccaagaccgugcucaagaagugcaaguccgccuucuacauccugcccagcaucaucuccaacgagaagcaggagauccugggcaccgugagcuggaaccugcgggagaugcucgcgcacgccgaggagacgcgcaagcugaugcccgucugcguggagaccaaggccaucguguccaccauccagcggaaguacaagggcaucaagauccaggagggggucguggacuacggcgcccgcuucuacuucuacaccagcaagacgaccguggccucccugaucaacacccucaacgaccugaacgagacccuggucacgaugccgcucggguacgugacccacggccugaaccuggaggaggcggcccgguacaugcgcagccucaaggugcccgccaccgucuccgugagcucccccgacgccgugaccgccuacaacggguaccugacgagcuccagcaagacccccgaggagcacuucaucgagaccaucucccuggcgggcagcuacaaggacuggagcuacuccggccagagcacccagcucgggaucgaguuccugaagcggggcgacaaguccgucuacuacacgagcaacccgaccaccuuccaccuggacggggaggugaucaccuucgacaaccucaagacgcugcugucccuccgcgaggugcggaccaucaaggucuucaccaccguggacaacaucaaccugcacacccagguggucgacaugagcaugaccuacggccagcaguucggccccaccuaccuggacggggccgacgugaccaagaucaagccccacaacucccacgagggcaagacguucuacgugcucccgaacgacgacacccugcgcgucgaggccuucgaguacuaccacaccaccgaccccagcuuccuggggcgguacauguccgcccucaaccacacgaagaaguggaaguacccccaggugaacggccugaccagcaucaagugggccgacaacaacugcuaccuggcgaccgcccuccugacccugcagcagaucgagcucaaguucaacccgcccgcccugcaggacgccuacuaccgcgcgcgggccggggaggccgccaacuucugcgcccugauccucgcguacugcaacaagacggugggcgagcugggcgacguccgcgagaccauguccuaccuguuccagcacgccaaccucgacagcugcaagcgggugcugaacgucgugugcaagaccugcgggcagcagcagaccacccugaagggcguggaggccgucauguacauggggacgcucuccuacgagcaguucaagaagggcgugcagauccccugcacgugcgggaagcaggccacccaguaccuggugcagcaggagagccccuucgucaugauguccgcgcccccggcccaguacgagcugaagcacggcaccuucacgugcgccagcgaguacaccggcaacuaccagugcgggcacuacaagcacaucaccuccaaggagacccucuacugcaucgacggcgcccugcugaccaagagcagcgaguacaaggggcccaucaccgacguguucuacaaggagaacuccuacaccaccacgaucaagcccgugaccuacaagcucgacggcgucgugugcaccgagaucgaccccaagcuggacaacuacuacaagaaggacaacagcuacuucaccgagcagccgaucgaccuggugcccaaccagcccuaccccaacgccuccuucgacaacuucaaguucgucugcgacaacaucaaguucgccgacgaccucaaccagcugacgggguacaagaagccggcgagccgcgagcugaaggugaccuucuuccccgaccucaacggcgacguggucgccaucgacuacaagcacuacacccccuccuucaagaagggcgccaagcugcugcacaagcccaucguguggcacgugaacaacgccaccaacaaggcgacguacaagccgaacaccuggugcauccggugccucuggagcaccaagcccgucgagaccuccaacagcuucgacgugcugaaguccgaggacgcccaggggauggacaaccuggccugcgaggaccucaagcccgugagcgaggaggucguggagaaccccacgauccagaaggacgugcuggagugcaacgucaagaccaccgagguggugggcgacaucauccugaagccggccaacaacucccucaagaucaccgaggaggucgggcacacggaccugauggccgcguacguggacaacagcucccugaccaucaagaagcccaacgagcucagccgcgugcugggccugaagacccucgccacccacgggcuggccgccgucaacuccgugcccugggacacgaucgccaacuacgcgaagccguuccugaacaagguggucagcaccaccaccaacaucgugacgcgcugccucaaccgggugugcaccaacuacaugcccuacuucuucacccugcugcuccagcugugcaccuucacgcgcuccaccaacagccggaucaaggccuccaugcccaccaccaucgccaagaacaccgucaagagcgugggcaaguucugccuggaggccagcuucaacuaccucaagucccccaacuucagcaagcugaucaacaucaucaucugguuccugcuccuguccgugugccugggcagccucaucuacuccacggccgcgcuggggguccugaugagcaaccucggcaugccguccuacugcaccggguaccgcgagggcuaccugaacagcaccaacgugaccaucgccacguacugcaccggcuccauccccugcagcgugugccuguccgggcucgacagccuggacaccuaccccucccuggagaccauccagaucacgaucagcuccuucaagugggaccucaccgccuucggccuggucgccgagugguuccuggccuacauccucuucacccgguucuucuacgugcuggggcuggcggccaucaugcagcuguucuucagcuacuucgccgugcacuucaucuccaacagcuggcucauguggcugaucaucaaccugguccagauggcccccaucuccgcgauggugcgcauguacaucuucuucgccagcuucuacuacguguggaaguccuacguccacgugguggacggcugcaacagcagcacgugcaugaugugcuacaagcggaaccgcgccacgcgggucgagugcaccaccaucgugaacgggguccgccgguccuucuacguguacgccaacggcggcaagggguucugcaagcuccacaacuggaacugcgugaacugcgacaccuucugcgccggcagcacguucaucuccgacgaggucgcgcgcgaccugagccugcaguucaagcggccgaucaaccccaccgaccaguccagcuacaucguggacuccgugaccgucaagaacgggagcauccaccucuacuucgacaaggccggccagaagaccuacgagcgccacucccugagccacuucgugaaccuggacaaccuccgggccaacaacacgaaggggucccugcccaucaacgugaucgucuucgacggcaagagcaagugcgaggaguccagcgccaaguccgccagcguguacuacucccagcugaugugccagcccauccuccugcuggaccaggcgcucgugagcgacgucggcgacagcgccgagguggccgugaagauguucgacgccuacgucaacaccuucuccagcaccuucaacgugccgauggagaagcugaagacccugguggccacggcggaggccgagcucgccaagaacgucucccuggacaacgugcugagcaccuucaucuccgccgcgcgccagggguucguggacagcgacgucgagaccaaggacgugguggagugccucaagcugucccaccagagcgacaucgaggucaccggcgacuccugcaacaacuacaugcugacguacaacaagguggagaacaugacgccccgggaccucggggccugcaucgacugcagcgcccgccacaucaacgcccagguggccaagucccacaacaucgcgcugaucuggaacgucaaggacuucaugagccuguccgagcagcuccggaagcagauccgcagcgccgccaagaagaacaaccugcccuucaagcugaccugcgccaccacccgccagguggugaacgucgugaccaccaagaucgcccucaagggcgggugaggacuagucccuguucccagagcccacuuuuuuuucuuuuuuugaaauaaaauagccugucuuucagaucucaaaggcucuuuucagagccaccaaaaaaaaaaaaaaaaaaaaaaaaaaaaaaaaaaaaaaaaaaaaaaaaaaaaaaaaaaaaaaaaaaaaaaaaaaaaaaaaaaaaaaaaaaaaaaaaaaaaa

SEQ ID NO: 28193 - RNA, 6113 nt, Artificial Sequence
  SARS-CoV-2/Wuhan-Hu-1__NC_045512.2/MN908947.2__non-structural protein 3 (NSP3) mRNA gc (1-1946)(A489S_P1229L_P1470S)
aggagagucccgcagucggcguccagcggcucugcuuguucgugugugugucguugcaggccuuauucaagcuuaccauggcccccaccaaggugaccuucggcgacgacaccgucaucgaggugcagggguacaagagcgugaacaucaccuucgagcuggacgagcgcaucgacaagguccucaacgagaagugcuccgccuacaccguggagcugggcaccgaggugaacgaguucgcgugcgucguggccgacgccgugaucaagacgcugcagccggucagcgagcuccugacgccccuggggaucgaccucgacgagugguccauggccaccuacuaccuguucgacgagagcggcgaguucaagcuggccucccacauguacugcagcuucuacccgcccgacgaggacgaggaggagggggacugcgaggaggaggaguucgagcccuccacccaguacgaguacggcacggaggacgacuaccagggcaagccccucgaguucggggcgaccagcgccgcccugcagcccgaggaggagcaggaggaggacuggcuggacgacgacucccagcagaccgugggccagcaggacgggagcgaggacaaccagaccacgaccauccagaccaucguggagguccagccccagcucgagauggagcugaccccgguggugcagacgaucgaggucaacuccuucagcggcuaccugaagcucaccgacaacguguacaucaagaacgccgacaucguggaggaggcgaagaaggucaagcccaccgugguggucaacgccgccaacguguaccugaagcacgggggcggcguggccggggcccugaacaaggcgaccaacaacgccaugcaggucgaguccgacgacuacaucgccacgaacggcccccucaaggucgggggcagcugcgugcuguccggccacaaccuggccaagcacugccuccacgugguggggcccaacgucaacaagggcgaggacauccagcugcucaagagcgccuacgagaacuucaaccagcacgaggugcugcuggcgccgcugcucuccgccgggaucuucggcgccgaccccauccacagccugcgggugugcgucgacaccgugcgcaccaacguguaccuggccgucuucgacaagaaccucuacgacaagcugguguccagcuuccuggagaugaaguccgagaagcaggucgagcagaagaucgccgagauccccaaggaggaggugaagcccuucaucaccgagagcaagccgagcguggagcagcggaagcaggacgacaagaagaucaaggcgugcguggaggaggucacgaccacccucgaggagaccaaguuccugacggagaaccugcuccuguacaucgacaucaacgggaaccugcaccccgacuccgccacccucgugagcgacaucgacaucaccuuccugaagaaggacgcccccuacaucgugggcgacgucgugcaggagggcgugcugaccgccgucgugauccccacgaagaagagcgggggcaccaccgagaugcucgcgaaggcccugcgcaaggugccgaccgacaacuacaucacgaccuaccccgggcagggccugaacggguacaccgucgaggaggccaagaccgugcucaagaagugcaaguccgccuucuacauccugcccagcaucaucuccaacgagaagcaggagauccugggcaccgugagcuggaaccugcgggagaugcucgcgcacgccgaggagacgcgcaagcugaugcccgucugcguggagaccaaggccaucguguccaccauccagcggaaguacaagggcaucaagauccaggagggggucguggacuacggcgcccgcuucuacuucuacaccagcaagacgaccguggccucccugaucaacacccucaacgaccugaacgagacccuggucacgaugccgcucggguacgugacccacggccugaaccuggaggaggcggcccgguacaugcgcagccucaaggugcccgccaccgucuccgugagcucccccgacgccgugaccgccuacaacggguaccugacgagcuccagcaagacccccgaggagcacuucaucgagaccaucucccuggcgggcagcuacaaggacuggagcuacuccggccagagcacccagcucgggaucgaguuccugaagcggggcgacaaguccgucuacuacacgagcaacccgaccaccuuccaccuggacggggaggugaucaccuucgacaaccucaagacgcugcugucccuccgcgaggugcggaccaucaaggucuucaccaccguggacaacaucaaccugcacacccagguggucgacaugagcaugaccuacggccagcaguucggccccaccuaccuggacggggccgacgugaccaagaucaagccccacaacucccacgagggcaagacguucuacgugcucccgaacgacgacacccugcgcgucgaggccuucgaguacuaccacaccaccgaccccagcuuccuggggcgguacauguccgcccucaaccacacgaagaaguggaaguacccccaggugaacggccugaccagcaucaagugggccgacaacaacugcuaccuggcgaccgcccuccugacccugcagcagaucgagcucaaguucaacccgcccgcccugcaggacgccuacuaccgcgcgcgggccggggaggccgccaacuucugcgcccugauccucgcguacugcaacaagacggugggcgagcugggcgacguccgcgagaccauguccuaccuguuccagcacgccaaccucgacagcugcaagcgggugcugaacgucgugugcaagaccugcgggcagcagcagaccacccugaagggcguggaggccgucauguacauggggacgcucuccuacgagcaguucaagaagggcgugcagauccccugcacgugcgggaagcaggccaccaaguaccuggugcagcaggagagccccuucgucaugauguccgcgcccccggcccaguacgagcugaagcacggcaccuucacgugcgccagcgaguacaccggcaacuaccagugcgggcacuacaagcacaucaccuccaaggagacccucuacugcaucgacggcgcccugcugaccaagagcagcgaguacaaggggcccaucaccgacguguucuacaaggagaacuccuacaccaccacgaucaagcccgugaccuacaagcucgacggcgucgugugcaccgagaucgaccccaagcuggacaacuacuacaagaaggacaacagcuacuucaccgagcagccgaucgaccuggugcccaaccagcccuaccccaacgccuccuucgacaacuucaaguucgucugcgacaacaucaaguucgccgacgaccucaaccagcugacgggguacaagaagccggcgagccgcgagcugaaggugaccuucuuccccgaccucaacggcgacguggucgccaucgacuacaagcacuacacccccuccuucaagaagggcgccaagcugcugcacaagcccaucguguggcacgugaacaacgccaccaacaaggcgacguacaagccgaacaccuggugcauccggugccucuggagcaccaagcccgucgagaccuccaacagcuucgacgugcugaaguccgaggacgcccaggggauggacaaccuggccugcgaggaccucaagcuggugagcgaggaggucguggagaaccccacgauccagaaggacgugcuggagugcaacgucaagaccaccgagguggugggcgacaucauccugaagccggccaacaacucccucaagaucaccgaggaggucgggcacacggaccugauggccgcguacguggacaacagcucccugaccaucaagaagcccaacgagcucagccgcgugcugggccugaagacccucgccacccacgggcuggccgccgucaacuccgugcccugggacacgaucgccaacuacgcgaagccguuccugaacaagguggucagcaccaccaccaacaucgugacgcgcugccucaaccgggugugcaccaacuacaugcccuacuucuucacccugcugcuccagcugugcaccuucacgcgcuccaccaacagccggaucaaggccuccaugcccaccaccaucgccaagaacaccgucaagagcgugggcaaguucugccuggaggccagcuucaacuaccucaagucccccaacuucagcaagcugaucaacaucaucaucugguuccugcuccuguccgugugccugggcagccucaucuacuccacggccgcgcuggggguccugaugagcaaccucggcaugccguccuacugcaccggguaccgcgagggcuaccugaacagcaccaacgugaccaucgccacguacugcaccggcuccaucagcugcagcgugugccuguccgggcucgacagccuggacaccuaccccucccuggagaccauccagaucacgaucagcuccuucaagugggaccucaccgccuucggccuggucgccgagugguuccuggccuacauccucuucacccgguucuucuacgugcuggggcuggcggccaucaugcagcuguucuucagcuacuucgccgugcacuucaucuccaacagcuggcucauguggcugaucaucaaccugguccagauggcccccaucuccgcgauggugcgcauguacaucuucuucgccagcuucuacuacguguggaaguccuacguccacgugguggacggcugcaacagcagcacgugcaugaugugcuacaagcggaaccgcgccacgcgggucgagugcaccaccaucgugaacgggguccgccgguccuucuacguguacgccaacggcggcaagggguucugcaagcuccacaacuggaacugcgugaacugcgacaccuucugcgccggcagcacguucaucuccgacgaggucgcgcgcgaccugagccugcaguucaagcggccgaucaaccccaccgaccaguccagcuacaucguggacuccgugaccgucaagaacgggagcauccaccucuacuucgacaaggccggccagaagaccuacgagcgccacucccugagccacuucgugaaccuggacaaccuccgggccaacaacacgaaggggucccugcccaucaacgugaucgucuucgacggcaagagcaagugcgaggaguccagcgccaaguccgccagcguguacuacucccagcugaugugccagcccauccuccugcuggaccaggcgcucgugagcgacgucggcgacagcgccgagguggccgugaagauguucgacgccuacgucaacaccuucuccagcaccuucaacgugccgauggagaagcugaagacccugguggccacggcggaggccgagcucgccaagaacgucucccuggacaacgugcugagcaccuucaucuccgccgcgcgccagggguucguggacagcgacgucgagaccaaggacgugguggagugccucaagcugucccaccagagcgacaucgaggucaccggcgacuccugcaacaacuacaugcugacguacaacaagguggagaacaugacgccccgggaccucggggccugcaucgacugcagcgcccgccacaucaacgcccagguggccaagucccacaacaucgcgcugaucuggaacgucaaggacuucaugagccuguccgagcagcuccggaagcagauccgcagcgccgccaagaagaacaaccugcccuucaagcugaccugcgccaccacccgccagguggugaacgucgugaccaccaagaucgcccucaagggcgggugaggacuagucccuguucccagagcccacuuuuuuuucuuuuuuugaaauaaaauagccugucuuucagaucucaaaggcucuuuucagagccaccaaaaaaaaaaaaaaaaaaaaaaaaaaaaaaaaaaaaaaaaaaaaaaaaaaaaaaaaaaaaaaaaaaaaaaaaaaaaaaaaaaaaaaaaaaaaaaaaaaaaa

SEQ ID NO: 28194 - RNA, 6113 nt, Artificial Sequence
  SARS-CoV-2/Wuhan-Hu-1__NC_045512.2/MN908947.2__non-structural protein 3 (NSP3) mRNA gc (1-1946)(K838N)
aggagagucccgcagucggcguccagcggcucugcuuguucgugugugugucguugcaggccuuauucaagcuuaccauggcccccaccaaggugaccuucggcgacgacaccgucaucgaggugcagggguacaagagcgugaacaucaccuucgagcuggacgagcgcaucgacaagguccucaacgagaagugcuccgccuacaccguggagcugggcaccgaggugaacgaguucgcgugcgucguggccgacgccgugaucaagacgcugcagccggucagcgagcuccugacgccccuggggaucgaccucgacgagugguccauggccaccuacuaccuguucgacgagagcggcgaguucaagcuggccucccacauguacugcagcuucuacccgcccgacgaggacgaggaggagggggacugcgaggaggaggaguucgagcccuccacccaguacgaguacggcacggaggacgacuaccagggcaagccccucgaguucggggcgaccagcgccgcccugcagcccgaggaggagcaggaggaggacuggcuggacgacgacucccagcagaccgugggccagcaggacgggagcgaggacaaccagaccacgaccauccagaccaucguggagguccagccccagcucgagauggagcugaccccgguggugcagacgaucgaggucaacuccuucagcggcuaccugaagcucaccgacaacguguacaucaagaacgccgacaucguggaggaggcgaagaaggucaagcccaccgugguggucaacgccgccaacguguaccugaagcacgggggcggcguggccggggcccugaacaaggcgaccaacaacgccaugcaggucgaguccgacgacuacaucgccacgaacggcccccucaaggucgggggcagcugcgugcuguccggccacaaccuggccaagcacugccuccacgugguggggcccaacgucaacaagggcgaggacauccagcugcucaagagcgccuacgagaacuucaaccagcacgaggugcugcuggcgccgcugcucuccgccgggaucuucggcgccgaccccauccacagccugcgggugugcgucgacaccgugcgcaccaacguguaccuggccgucuucgacaagaaccucuacgacaagcugguguccagcuuccuggagaugaaguccgagaagcaggucgagcagaagaucgccgagauccccaaggaggaggugaagcccuucaucaccgagagcaagccgagcguggagcagcggaagcaggacgacaagaagaucaaggcgugcguggaggaggucacgaccacccucgaggagaccaaguuccugacggagaaccugcuccuguacaucgacaucaacgggaaccugcaccccgacuccgccacccucgugagcgacaucgacaucaccuuccugaagaaggacgcccccuacaucgugggcgacgucgugcaggagggcgugcugaccgccgucgugauccccacgaagaaggccgggggcaccaccgagaugcucgcgaaggcccugcgcaaggugccgaccgacaacuacaucacgaccuaccccgggcagggccugaacggguacaccgucgaggaggccaagaccgugcucaagaagugcaaguccgccuucuacauccugcccagcaucaucuccaacgagaagcaggagauccugggcaccgugagcuggaaccugcgggagaugcucgcgcacgccgaggagacgcgcaagcugaugcccgucugcguggagaccaaggccaucguguccaccauccagcggaaguacaagggcaucaagauccaggagggggucguggacuacggcgcccgcuucuacuucuacaccagcaagacgaccguggccucccugaucaacacccucaacgaccugaacgagacccuggucacgaugccgcucggguacgugacccacggccugaaccuggaggaggcggcccgguacaugcgcagccucaaggugcccgccaccgucuccgugagcucccccgacgccgugaccgccuacaacggguaccugacgagcuccagcaagacccccgaggagcacuucaucgagaccaucucccuggcgggcagcuacaaggacuggagcuacuccggccagagcacccagcucgggaucgaguuccugaagcggggcgacaaguccgucuacuacacgagcaacccgaccaccuuccaccuggacggggaggugaucaccuucgacaaccucaagacgcugcugucccuccgcgaggugcggaccaucaaggucuucaccaccguggacaacaucaaccugcacacccagguggucgacaugagcaugaccuacggccagcaguucggccccaccuaccuggacggggccgacgugaccaagaucaagccccacaacucccacgagggcaagacguucuacgugcucccgaacgacgacacccugcgcgucgaggccuucgaguacuaccacaccaccgaccccagcuuccuggggcgguacauguccgcccucaaccacacgaagaacuggaaguacccccaggugaacggccugaccagcaucaagugggccgacaacaacugcuaccuggcgaccgcccuccugacccugcagcagaucgagcucaaguucaacccgcccgcccugcaggacgccuacuaccgcgcgcgggccggggaggccgccaacuucugcgcccugauccucgcguacugcaacaagacggugggcgagcugggcgacguccgcgagaccauguccuaccuguuccagcacgccaaccucgacagcugcaagcgggugcugaacgucgugugcaagaccugcgggcagcagcagaccacccugaagggcguggaggccgucauguacauggggacgcucuccuacgagcaguucaagaagggcgugcagauccccugcacgugcgggaagcaggccaccaaguaccuggugcagcaggagagccccuucgucaugauguccgcgcccccggcccaguacgagcugaagcacggcaccuucacgugcgccagcgaguacaccggcaacuaccagugcgggcacuacaagcacaucaccuccaaggagacccucuacugcaucgacggcgcccugcugaccaagagcagcgaguacaaggggcccaucaccgacguguucuacaaggagaacuccuacaccaccacgaucaagcccgugaccuacaagcucgacggcgucgugugcaccgagaucgaccccaagcuggacaacuacuacaagaaggacaacagcuacuucaccgagcagccgaucgaccuggugcccaaccagcccuaccccaacgccuccuucgacaacuucaaguucgucugcgacaacaucaaguucgccgacgaccucaaccagcugacgggguacaagaagccggcgagccgcgagcugaaggugaccuucuuccccgaccucaacggcgacguggucgccaucgacuacaagcacuacacccccuccuucaagaagggcgccaagcugcugcacaagcccaucguguggcacgugaacaacgccaccaacaaggcgacguacaagccgaacaccuggugcauccggugccucuggagcaccaagcccgucgagaccuccaacagcuucgacgugcugaaguccgaggacgcccaggggauggacaaccuggccugcgaggaccucaagcccgugagcgaggaggucguggagaaccccacgauccagaaggacgugcuggagugcaacgucaagaccaccgagguggugggcgacaucauccugaagccggccaacaacucccucaagaucaccgaggaggucgggcacacggaccugauggccgcguacguggacaacagcucccugaccaucaagaagcccaacgagcucagccgcgugcugggccugaagacccucgccacccacgggcuggccgccgucaacuccgugcccugggacacgaucgccaacuacgcgaagccguuccugaacaagguggucagcaccaccaccaacaucgugacgcgcugccucaaccgggugugcaccaacuacaugcccuacuucuucacccugcugcuccagcugugcaccuucacgcgcuccaccaacagccggaucaaggccuccaugcccaccaccaucgccaagaacaccgucaagagcgugggcaaguucugccuggaggccagcuucaacuaccucaagucccccaacuucagcaagcugaucaacaucaucaucugguuccugcuccuguccgugugccugggcagccucaucuacuccacggccgcgcuggggguccugaugagcaaccucggcaugccguccuacugcaccggguaccgcgagggcuaccugaacagcaccaacgugaccaucgccacguacugcaccggcuccauccccugcagcgugugccuguccgggcucgacagccuggacaccuaccccucccuggagaccauccagaucacgaucagcuccuucaagugggaccucaccgccuucggccuggucgccgagugguuccuggccuacauccucuucacccgguucuucuacgugcuggggcuggcggccaucaugcagcuguucuucagcuacuucgccgugcacuucaucuccaacagcuggcucauguggcugaucaucaaccugguccagauggcccccaucuccgcgauggugcgcauguacaucuucuucgccagcuucuacuacguguggaaguccuacguccacgugguggacggcugcaacagcagcacgugcaugaugugcuacaagcggaaccgcgccacgcgggucgagugcaccaccaucgugaacgggguccgccgguccuucuacguguacgccaacggcggcaagggguucugcaagcuccacaacuggaacugcgugaacugcgacaccuucugcgccggcagcacguucaucuccgacgaggucgcgcgcgaccugagccugcaguucaagcggccgaucaaccccaccgaccaguccagcuacaucguggacuccgugaccgucaagaacgggagcauccaccucuacuucgacaaggccggccagaagaccuacgagcgccacucccugagccacuucgugaaccuggacaaccuccgggccaacaacacgaaggggucccugcccaucaacgugaucgucuucgacggcaagagcaagugcgaggaguccagcgccaaguccgccagcguguacuacucccagcugaugugccagcccauccuccugcuggaccaggcgcucgugagcgacgucggcgacagcgccgagguggccgugaagauguucgacgccuacgucaacaccuucuccagcaccuucaacgugccgauggagaagcugaagacccugguggccacggcggaggccgagcucgccaagaacgucucccuggacaacgugcugagcaccuucaucuccgccgcgcgccagggguucguggacagcgacgucgagaccaaggacgugguggagugccucaagcugucccaccagagcgacaucgaggucaccggcgacuccugcaacaacuacaugcugacguacaacaagguggagaacaugacgccccgggaccucggggccugcaucgacugcagcgcccgccacaucaacgcccagguggccaagucccacaacaucgcgcugaucuggaacgucaaggacuucaugagccuguccgagcagcuccggaagcagauccgcagcgccgccaagaagaacaaccugcccuucaagcugaccugcgccaccacccgccagguggugaacgucgugaccaccaagaucgcccucaagggcgggugaggacuagucccuguucccagagcccacuuuuuuuucuuuuuuugaaauaaaauagccugucuuucagaucucaaaggcucuuuucagagccaccaaaaaaaaaaaaaaaaaaaaaaaaaaaaaaaaaaaaaaaaaaaaaaaaaaaaaaaaaaaaaaaaaaaaaaaaaaaaaaaaaaaaaaaaaaaaaaaaaaaaa

SEQ ID NO: 28195 - RNA, 6113 nt, Artificial Sequence
  SARS-CoV-2/Wuhan-Hu-1__NC_045512.2/MN908947.2__non-structural protein 3 (NSP3) mRNA gc (1-1946)(K838N_P1229L_N1779S)
aggagagucccgcagucggcguccagcggcucugcuuguucgugugugugucguugcaggccuuauucaagcuuaccauggcccccaccaaggugaccuucggcgacgacaccgucaucgaggugcagggguacaagagcgugaacaucaccuucgagcuggacgagcgcaucgacaagguccucaacgagaagugcuccgccuacaccguggagcugggcaccgaggugaacgaguucgcgugcgucguggccgacgccgugaucaagacgcugcagccggucagcgagcuccugacgccccuggggaucgaccucgacgagugguccauggccaccuacuaccuguucgacgagagcggcgaguucaagcuggccucccacauguacugcagcuucuacccgcccgacgaggacgaggaggagggggacugcgaggaggaggaguucgagcccuccacccaguacgaguacggcacggaggacgacuaccagggcaagccccucgaguucggggcgaccagcgccgcccugcagcccgaggaggagcaggaggaggacuggcuggacgacgacucccagcagaccgugggccagcaggacgggagcgaggacaaccagaccacgaccauccagaccaucguggagguccagccccagcucgagauggagcugaccccgguggugcagacgaucgaggucaacuccuucagcggcuaccugaagcucaccgacaacguguacaucaagaacgccgacaucguggaggaggcgaagaaggucaagcccaccgugguggucaacgccgccaacguguaccugaagcacgggggcggcguggccggggcccugaacaaggcgaccaacaacgccaugcaggucgaguccgacgacuacaucgccacgaacggcccccucaaggucgggggcagcugcgugcuguccggccacaaccuggccaagcacugccuccacgugguggggcccaacgucaacaagggcgaggacauccagcugcucaagagcgccuacgagaacuucaaccagcacgaggugcugcuggcgccgcugcucuccgccgggaucuucggcgccgaccccauccacagccugcgggugugcgucgacaccgugcgcaccaacguguaccuggccgucuucgacaagaaccucuacgacaagcugguguccagcuuccuggagaugaaguccgagaagcaggucgagcagaagaucgccgagauccccaaggaggaggugaagcccuucaucaccgagagcaagccgagcguggagcagcggaagcaggacgacaagaagaucaaggcgugcguggaggaggucacgaccacccucgaggagaccaaguuccugacggagaaccugcuccuguacaucgacaucaacgggaaccugcaccccgacuccgccacccucgugagcgacaucgacaucaccuuccugaagaaggacgcccccuacaucgugggcgacgucgugcaggagggcgugcugaccgccgucgugauccccacgaagaaggccgggggcaccaccgagaugcucgcgaaggcccugcgcaaggugccgaccgacaacuacaucacgaccuaccccgggcagggccugaacggguacaccgucgaggaggccaagaccgugcucaagaagugcaaguccgccuucuacauccugcccagcaucaucuccaacgagaagcaggagauccugggcaccgugagcuggaaccugcgggagaugcucgcgcacgccgaggagacgcgcaagcugaugcccgucugcguggagaccaaggccaucguguccaccauccagcggaaguacaagggcaucaagauccaggagggggucguggacuacggcgcccgcuucuacuucuacaccagcaagacgaccguggccucccugaucaacacccucaacgaccugaacgagacccuggucacgaugccgcucggguacgugacccacggccugaaccuggaggaggcggcccgguacaugcgcagccucaaggugcccgccaccgucuccgugagcucccccgacgccgugaccgccuacaacggguaccugacgagcuccagcaagacccccgaggagcacuucaucgagaccaucucccuggcgggcagcuacaaggacuggagcuacuccggccagagcacccagcucgggaucgaguuccugaagcggggcgacaaguccgucuacuacacgagcaacccgaccaccuuccaccuggacggggaggugaucaccuucgacaaccucaagacgcugcugucccuccgcgaggugcggaccaucaaggucuucaccaccguggacaacaucaaccugcacacccagguggucgacaugagcaugaccuacggccagcaguucggccccaccuaccuggacggggccgacgugaccaagaucaagccccacaacucccacgagggcaagacguucuacgugcucccgaacgacgacacccugcgcgucgaggccuucgaguacuaccacaccaccgaccccagcuuccuggggcgguacauguccgcccucaaccacacgaagaacuggaaguacccccaggugaacggccugaccagcaucaagugggccgacaacaacugcuaccuggcgaccgcccuccugacccugcagcagaucgagcucaaguucaacccgcccgcccugcaggacgccuacuaccgcgcgcgggccggggaggccgccaacuucugcgcccugauccucgcguacugcaacaagacggugggcgagcugggcgacguccgcgagaccauguccuaccuguuccagcacgccaaccucgacagcugcaagcgggugcugaacgucgugugcaagaccugcgggcagcagcagaccacccugaagggcguggaggccgucauguacauggggacgcucuccuacgagcaguucaagaagggcgugcagauccccugcacgugcgggaagcaggccaccaaguaccuggugcagcaggagagccccuucgucaugauguccgcgcccccggcccaguacgagcugaagcacggcaccuucacgugcgccagcgaguacaccggcaacuaccagugcgggcacuacaagcacaucaccuccaaggagacccucuacugcaucgacggcgcccugcugaccaagagcagcgaguacaaggggcccaucaccgacguguucuacaaggagaacuccuacaccaccacgaucaagcccgugaccuacaagcucgacggcgucgugugcaccgagaucgaccccaagcuggacaacuacuacaagaaggacaacagcuacuucaccgagcagccgaucgaccuggugcccaaccagcccuaccccaacgccuccuucgacaacuucaaguucgucugcgacaacaucaaguucgccgacgaccucaaccagcugacgggguacaagaagccggcgagccgcgagcugaaggugaccuucuuccccgaccucaacggcgacguggucgccaucgacuacaagcacuacacccccuccuucaagaagggcgccaagcugcugcacaagcccaucguguggcacgugaacaacgccaccaacaaggcgacguacaagccgaacaccuggugcauccggugccucuggagcaccaagcccgucgagaccuccaacagcuucgacgugcugaaguccgaggacgcccaggggauggacaaccuggccugcgaggaccucaagcuggugagcgaggaggucguggagaaccccacgauccagaaggacgugcuggagugcaacgucaagaccaccgagguggugggcgacaucauccugaagccggccaacaacucccucaagaucaccgaggaggucgggcacacggaccugauggccgcguacguggacaacagcucccugaccaucaagaagcccaacgagcucagccgcgugcugggccugaagacccucgccacccacgggcuggccgccgucaacuccgugcccugggacacgaucgccaacuacgcgaagccguuccugaacaagguggucagcaccaccaccaacaucgugacgcgcugccucaaccgggugugcaccaacuacaugcccuacuucuucacccugcugcuccagcugugcaccuucacgcgcuccaccaacagccggaucaaggccuccaugcccaccaccaucgccaagaacaccgucaagagcgugggcaaguucugccuggaggccagcuucaacuaccucaagucccccaacuucagcaagcugaucaacaucaucaucugguuccugcuccuguccgugugccugggcagccucaucuacuccacggccgcgcuggggguccugaugagcaaccucggcaugccguccuacugcaccggguaccgcgagggcuaccugaacagcaccaacgugaccaucgccacguacugcaccggcuccauccccugcagcgugugccuguccgggcucgacagccuggacaccuaccccucccuggagaccauccagaucacgaucagcuccuucaagugggaccucaccgccuucggccuggucgccgagugguuccuggccuacauccucuucacccgguucuucuacgugcuggggcuggcggccaucaugcagcuguucuucagcuacuucgccgugcacuucaucuccaacagcuggcucauguggcugaucaucaaccugguccagauggcccccaucuccgcgauggugcgcauguacaucuucuucgccagcuucuacuacguguggaaguccuacguccacgugguggacggcugcaacagcagcacgugcaugaugugcuacaagcggaaccgcgccacgcgggucgagugcaccaccaucgugaacgggguccgccgguccuucuacguguacgccaacggcggcaagggguucugcaagcuccacaacuggaacugcgugaacugcgacaccuucugcgccggcagcacguucaucuccgacgaggucgcgcgcgaccugagccugcaguucaagcggccgaucaaccccaccgaccaguccagcuacaucguggacuccgugaccgucaagaacgggagcauccaccucuacuucgacaaggccggccagaagaccuacgagcgccacucccugagccacuucgugaaccuggacaaccuccgggccaacaacacgaaggggucccugcccaucaacgugaucgucuucgacggcaagagcaagugcgaggaguccagcgccaaguccgccagcguguacuacucccagcugaugugccagcccauccuccugcuggaccaggcgcucgugagcgacgucggcgacagcgccgagguggccgugaagauguucgacgccuacgucagcaccuucuccagcaccuucaacgugccgauggagaagcugaagacccugguggccacggcggaggccgagcucgccaagaacgucucccuggacaacgugcugagcaccuucaucuccgccgcgcgccagggguucguggacagcgacgucgagaccaaggacgugguggagugccucaagcugucccaccagagcgacaucgaggucaccggcgacuccugcaacaacuacaugcugacguacaacaagguggagaacaugacgccccgggaccucggggccugcaucgacugcagcgcccgccacaucaacgcccagguggccaagucccacaacaucgcgcugaucuggaacgucaaggacuucaugagccuguccgagcagcuccggaagcagauccgcagcgccgccaagaagaacaaccugcccuucaagcugaccugcgccaccacccgccagguggugaacgucgugaccaccaagaucgcccucaagggcgggugaggacuagucccuguucccagagcccacuuuuuuuucuuuuuuugaaauaaaauagccugucuuucagaucucaaaggcucuuuucagagccaccaaaaaaaaaaaaaaaaaaaaaaaaaaaaaaaaaaaaaaaaaaaaaaaaaaaaaaaaaaaaaaaaaaaaaaaaaaaaaaaaaaaaaaaaaaaaaaaaaaaaa

SEQ ID NO: 28196 - RNA, 6113 nt, Artificial Sequence
  SARS-CoV-2/Wuhan-Hu-1__NC_045512.2/MN908947.2__non-structural protein 3 (NSP3) mRNA gc (1-1946)(K838N_N1779S)
aggagagucccgcagucggcguccagcggcucugcuuguucgugugugugucguugcaggccuuauucaagcuuaccauggcccccaccaaggugaccuucggcgacgacaccgucaucgaggugcagggguacaagagcgugaacaucaccuucgagcuggacgagcgcaucgacaagguccucaacgagaagugcuccgccuacaccguggagcugggcaccgaggugaacgaguucgcgugcgucguggccgacgccgugaucaagacgcugcagccggucagcgagcuccugacgccccuggggaucgaccucgacgagugguccauggccaccuacuaccuguucgacgagagcggcgaguucaagcuggccucccacauguacugcagcuucuacccgcccgacgaggacgaggaggagggggacugcgaggaggaggaguucgagcccuccacccaguacgaguacggcacggaggacgacuaccagggcaagccccucgaguucggggcgaccagcgccgcccugcagcccgaggaggagcaggaggaggacuggcuggacgacgacucccagcagaccgugggccagcaggacgggagcgaggacaaccagaccacgaccauccagaccaucguggagguccagccccagcucgagauggagcugaccccgguggugcagacgaucgaggucaacuccuucagcggcuaccugaagcucaccgacaacguguacaucaagaacgccgacaucguggaggaggcgaagaaggucaagcccaccgugguggucaacgccgccaacguguaccugaagcacgggggcggcguggccggggcccugaacaaggcgaccaacaacgccaugcaggucgaguccgacgacuacaucgccacgaacggcccccucaaggucgggggcagcugcgugcuguccggccacaaccuggccaagcacugccuccacgugguggggcccaacgucaacaagggcgaggacauccagcugcucaagagcgccuacgagaacuucaaccagcacgaggugcugcuggcgccgcugcucuccgccgggaucuucggcgccgaccccauccacagccugcgggugugcgucgacaccgugcgcaccaacguguaccuggccgucuucgacaagaaccucuacgacaagcugguguccagcuuccuggagaugaaguccgagaagcaggucgagcagaagaucgccgagauccccaaggaggaggugaagcccuucaucaccgagagcaagccgagcguggagcagcggaagcaggacgacaagaagaucaaggcgugcguggaggaggucacgaccacccucgaggagaccaaguuccugacggagaaccugcuccuguacaucgacaucaacgggaaccugcaccccgacuccgccacccucgugagcgacaucgacaucaccuuccugaagaaggacgcccccuacaucgugggcgacgucgugcaggagggcgugcugaccgccgucgugauccccacgaagaaggccgggggcaccaccgagaugcucgcgaaggcccugcgcaaggugccgaccgacaacuacaucacgaccuaccccgggcagggccugaacggguacaccgucgaggaggccaagaccgugcucaagaagugcaaguccgccuucuacauccugcccagcaucaucuccaacgagaagcaggagauccugggcaccgugagcuggaaccugcgggagaugcucgcgcacgccgaggagacgcgcaagcugaugcccgucugcguggagaccaaggccaucguguccaccauccagcggaaguacaagggcaucaagauccaggagggggucguggacuacggcgcccgcuucuacuucuacaccagcaagacgaccguggccucccugaucaacacccucaacgaccugaacgagacccuggucacgaugccgcucggguacgugacccacggccugaaccuggaggaggcggcccgguacaugcgcagccucaaggugcccgccaccgucuccgugagcucccccgacgccgugaccgccuacaacggguaccugacgagcuccagcaagacccccgaggagcacuucaucgagaccaucucccuggcgggcagcuacaaggacuggagcuacuccggccagagcacccagcucgggaucgaguuccugaagcggggcgacaaguccgucuacuacacgagcaacccgaccaccuuccaccuggacggggaggugaucaccuucgacaaccucaagacgcugcugucccuccgcgaggugcggaccaucaaggucuucaccaccguggacaacaucaaccugcacacccagguggucgacaugagcaugaccuacggccagcaguucggccccaccuaccuggacggggccgacgugaccaagaucaagccccacaacucccacgagggcaagacguucuacgugcucccgaacgacgacacccugcgcgucgaggccuucgaguacuaccacaccaccgaccccagcuuccuggggcgguacauguccgcccucaaccacacgaagaacuggaaguacccccaggugaacggccugaccagcaucaagugggccgacaacaacugcuaccuggcgaccgcccuccugacccugcagcagaucgagcucaaguucaacccgcccgcccugcaggacgccuacuaccgcgcgcgggccggggaggccgccaacuucugcgcccugauccucgcguacugcaacaagacggugggcgagcugggcgacguccgcgagaccauguccuaccuguuccagcacgccaaccucgacagcugcaagcgggugcugaacgucgugugcaagaccugcgggcagcagcagaccacccugaagggcguggaggccgucauguacauggggacgcucuccuacgagcaguucaagaagggcgugcagauccccugcacgugcgggaagcaggccaccaaguaccuggugcagcaggagagccccuucgucaugauguccgcgcccccggcccaguacgagcugaagcacggcaccuucacgugcgccagcgaguacaccggcaacuaccagugcgggcacuacaagcacaucaccuccaaggagacccucuacugcaucgacggcgcccugcugaccaagagcagcgaguacaaggggcccaucaccgacguguucuacaaggagaacuccuacaccaccacgaucaagcccgugaccuacaagcucgacggcgucgugugcaccgagaucgaccccaagcuggacaacuacuacaagaaggacaacagcuacuucaccgagcagccgaucgaccuggugcccaaccagcccuaccccaacgccuccuucgacaacuucaaguucgucugcgacaacaucaaguucgccgacgaccucaaccagcugacgggguacaagaagccggcgagccgcgagcugaaggugaccuucuuccccgaccucaacggcgacguggucgccaucgacuacaagcacuacacccccuccuucaagaagggcgccaagcugcugcacaagcccaucguguggcacgugaacaacgccaccaacaaggcgacguacaagccgaacaccuggugcauccggugccucuggagcaccaagcccgucgagaccuccaacagcuucgacgugcugaaguccgaggacgcccaggggauggacaaccuggccugcgaggaccucaagcccgugagcgaggaggucguggagaaccccacgauccagaaggacgugcuggagugcaacgucaagaccaccgagguggugggcgacaucauccugaagccggccaacaacucccucaagaucaccgaggaggucgggcacacggaccugauggccgcguacguggacaacagcucccugaccaucaagaagcccaacgagcucagccgcgugcugggccugaagacccucgccacccacgggcuggccgccgucaacuccgugcccugggacacgaucgccaacuacgcgaagccguuccugaacaagguggucagcaccaccaccaacaucgugacgcgcugccucaaccgggugugcaccaacuacaugcccuacuucuucacccugcugcuccagcugugcaccuucacgcgcuccaccaacagccggaucaaggccuccaugcccaccaccaucgccaagaacaccgucaagagcgugggcaaguucugccuggaggccagcuucaacuaccucaagucccccaacuucagcaagcugaucaacaucaucaucugguuccugcuccuguccgugugccugggcagccucaucuacuccacggccgcgcuggggguccugaugagcaaccucggcaugccguccuacugcaccggguaccgcgagggcuaccugaacagcaccaacgugaccaucgccacguacugcaccggcuccauccccugcagcgugugccuguccgggcucgacagccuggacaccuaccccucccuggagaccauccagaucacgaucagcuccuucaagugggaccucaccgccuucggccuggucgccgagugguuccuggccuacauccucuucacccgguucuucuacgugcuggggcuggcggccaucaugcagcuguucuucagcuacuucgccgugcacuucaucuccaacagcuggcucauguggcugaucaucaaccugguccagauggcccccaucuccgcgauggugcgcauguacaucuucuucgccagcuucuacuacguguggaaguccuacguccacgugguggacggcugcaacagcagcacgugcaugaugugcuacaagcggaaccgcgccacgcgggucgagugcaccaccaucgugaacgggguccgccgguccuucuacguguacgccaacggcggcaagggguucugcaagcuccacaacuggaacugcgugaacugcgacaccuucugcgccggcagcacguucaucuccgacgaggucgcgcgcgaccugagccugcaguucaagcggccgaucaaccccaccgaccaguccagcuacaucguggacuccgugaccgucaagaacgggagcauccaccucuacuucgacaaggccggccagaagaccuacgagcgccacucccugagccacuucgugaaccuggacaaccuccgggccaacaacacgaaggggucccugcccaucaacgugaucgucuucgacggcaagagcaagugcgaggaguccagcgccaaguccgccagcguguacuacucccagcugaugugccagcccauccuccugcuggaccaggcgcucgugagcgacgucggcgacagcgccgagguggccgugaagauguucgacgccuacgucagcaccuucuccagcaccuucaacgugccgauggagaagcugaagacccugguggccacggcggaggccgagcucgccaagaacgucucccuggacaacgugcugagcaccuucaucuccgccgcgcgccagggguucguggacagcgacgucgagaccaaggacgugguggagugccucaagcugucccaccagagcgacaucgaggucaccggcgacuccugcaacaacuacaugcugacguacaacaagguggagaacaugacgccccgggaccucggggccugcaucgacugcagcgcccgccacaucaacgcccagguggccaagucccacaacaucgcgcugaucuggaacgucaaggacuucaugagccuguccgagcagcuccggaagcagauccgcagcgccgccaagaagaacaaccugcccuucaagcugaccugcgccaccacccgccagguggugaacgucgugaccaccaagaucgcccucaagggcgggugaggacuagucccuguucccagagcccacuuuuuuuucuuuuuuugaaauaaaauagccugucuuucagaucucaaaggcucuuuucagagccaccaaaaaaaaaaaaaaaaaaaaaaaaaaaaaaaaaaaaaaaaaaaaaaaaaaaaaaaaaaaaaaaaaaaaaaaaaaaaaaaaaaaaaaaaaaaaaaaaaaaaa

SEQ ID NO: 28197 - RNA, 6113 nt, Artificial Sequence
  SARS-CoV-2/Wuhan-Hu-1__NC_045512.2/MN908947.2__non-structural protein 3 (NSP3) mRNA gc (1-1946)(A489S_P1229L_P1470S_A1712V)
aggagagucccgcagucggcguccagcggcucugcuuguucgugugugugucguugcaggccuuauucaagcuuaccauggcccccaccaaggugaccuucggcgacgacaccgucaucgaggugcagggguacaagagcgugaacaucaccuucgagcuggacgagcgcaucgacaagguccucaacgagaagugcuccgccuacaccguggagcugggcaccgaggugaacgaguucgcgugcgucguggccgacgccgugaucaagacgcugcagccggucagcgagcuccugacgccccuggggaucgaccucgacgagugguccauggccaccuacuaccuguucgacgagagcggcgaguucaagcuggccucccacauguacugcagcuucuacccgcccgacgaggacgaggaggagggggacugcgaggaggaggaguucgagcccuccacccaguacgaguacggcacggaggacgacuaccagggcaagccccucgaguucggggcgaccagcgccgcccugcagcccgaggaggagcaggaggaggacuggcuggacgacgacucccagcagaccgugggccagcaggacgggagcgaggacaaccagaccacgaccauccagaccaucguggagguccagccccagcucgagauggagcugaccccgguggugcagacgaucgaggucaacuccuucagcggcuaccugaagcucaccgacaacguguacaucaagaacgccgacaucguggaggaggcgaagaaggucaagcccaccgugguggucaacgccgccaacguguaccugaagcacgggggcggcguggccggggcccugaacaaggcgaccaacaacgccaugcaggucgaguccgacgacuacaucgccacgaacggcccccucaaggucgggggcagcugcgugcuguccggccacaaccuggccaagcacugccuccacgugguggggcccaacgucaacaagggcgaggacauccagcugcucaagagcgccuacgagaacuucaaccagcacgaggugcugcuggcgccgcugcucuccgccgggaucuucggcgccgaccccauccacagccugcgggugugcgucgacaccgugcgcaccaacguguaccuggccgucuucgacaagaaccucuacgacaagcugguguccagcuuccuggagaugaaguccgagaagcaggucgagcagaagaucgccgagauccccaaggaggaggugaagcccuucaucaccgagagcaagccgagcguggagcagcggaagcaggacgacaagaagaucaaggcgugcguggaggaggucacgaccacccucgaggagaccaaguuccugacggagaaccugcuccuguacaucgacaucaacgggaaccugcaccccgacuccgccacccucgugagcgacaucgacaucaccuuccugaagaaggacgcccccuacaucgugggcgacgucgugcaggagggcgugcugaccgccgucgugauccccacgaagaagagcgggggcaccaccgagaugcucgcgaaggcccugcgcaaggugccgaccgacaacuacaucacgaccuaccccgggcagggccugaacggguacaccgucgaggaggccaagaccgugcucaagaagugcaaguccgccuucuacauccugcccagcaucaucuccaacgagaagcaggagauccugggcaccgugagcuggaaccugcgggagaugcucgcgcacgccgaggagacgcgcaagcugaugcccgucugcguggagaccaaggccaucguguccaccauccagcggaaguacaagggcaucaagauccaggagggggucguggacuacggcgcccgcuucuacuucuacaccagcaagacgaccguggccucccugaucaacacccucaacgaccugaacgagacccuggucacgaugccgcucggguacgugacccacggccugaaccuggaggaggcggcccgguacaugcgcagccucaaggugcccgccaccgucuccgugagcucccccgacgccgugaccgccuacaacggguaccugacgagcuccagcaagacccccgaggagcacuucaucgagaccaucucccuggcgggcagcuacaaggacuggagcuacuccggccagagcacccagcucgggaucgaguuccugaagcggggcgacaaguccgucuacuacacgagcaacccgaccaccuuccaccuggacggggaggugaucaccuucgacaaccucaagacgcugcugucccuccgcgaggugcggaccaucaaggucuucaccaccguggacaacaucaaccugcacacccagguggucgacaugagcaugaccuacggccagcaguucggccccaccuaccuggacggggccgacgugaccaagaucaagccccacaacucccacgagggcaagacguucuacgugcucccgaacgacgacacccugcgcgucgaggccuucgaguacuaccacaccaccgaccccagcuuccuggggcgguacauguccgcccucaaccacacgaagaaguggaaguacccccaggugaacggccugaccagcaucaagugggccgacaacaacugcuaccuggcgaccgcccuccugacccugcagcagaucgagcucaaguucaacccgcccgcccugcaggacgccuacuaccgcgcgcgggccggggaggccgccaacuucugcgcccugauccucgcguacugcaacaagacggugggcgagcugggcgacguccgcgagaccauguccuaccuguuccagcacgccaaccucgacagcugcaagcgggugcugaacgucgugugcaagaccugcgggcagcagcagaccacccugaagggcguggaggccgucauguacauggggacgcucuccuacgagcaguucaagaagggcgugcagauccccugcacgugcgggaagcaggccaccaaguaccuggugcagcaggagagccccuucgucaugauguccgcgcccccggcccaguacgagcugaagcacggcaccuucacgugcgccagcgaguacaccggcaacuaccagugcgggcacuacaagcacaucaccuccaaggagacccucuacugcaucgacggcgcccugcugaccaagagcagcgaguacaaggggcccaucaccgacguguucuacaaggagaacuccuacaccaccacgaucaagcccgugaccuacaagcucgacggcgucgugugcaccgagaucgaccccaagcuggacaacuacuacaagaaggacaacagcuacuucaccgagcagccgaucgaccuggugcccaaccagcccuaccccaacgccuccuucgacaacuucaaguucgucugcgacaacaucaaguucgccgacgaccucaaccagcugacgggguacaagaagccggcgagccgcgagcugaaggugaccuucuuccccgaccucaacggcgacguggucgccaucgacuacaagcacuacacccccuccuucaagaagggcgccaagcugcugcacaagcccaucguguggcacgugaacaacgccaccaacaaggcgacguacaagccgaacaccuggugcauccggugccucuggagcaccaagcccgucgagaccuccaacagcuucgacgugcugaaguccgaggacgcccaggggauggacaaccuggccugcgaggaccucaagcuggugagcgaggaggucguggagaaccccacgauccagaaggacgugcuggagugcaacgucaagaccaccgagguggugggcgacaucauccugaagccggccaacaacucccucaagaucaccgaggaggucgggcacacggaccugauggccgcguacguggacaacagcucccugaccaucaagaagcccaacgagcucagccgcgugcugggccugaagacccucgccacccacgggcuggccgccgucaacuccgugcccugggacacgaucgccaacuacgcgaagccguuccugaacaagguggucagcaccaccaccaacaucgugacgcgcugccucaaccgggugugcaccaacuacaugcccuacuucuucacccugcugcuccagcugugcaccuucacgcgcuccaccaacagccggaucaaggccuccaugcccaccaccaucgccaagaacaccgucaagagcgugggcaaguucugccuggaggccagcuucaacuaccucaagucccccaacuucagcaagcugaucaacaucaucaucugguuccugcuccuguccgugugccugggcagccucaucuacuccacggccgcgcuggggguccugaugagcaaccucggcaugccguccuacugcaccggguaccgcgagggcuaccugaacagcaccaacgugaccaucgccacguacugcaccggcuccaucagcugcagcgugugccuguccgggcucgacagccuggacaccuaccccucccuggagaccauccagaucacgaucagcuccuucaagugggaccucaccgccuucggccuggucgccgagugguuccuggccuacauccucuucacccgguucuucuacgugcuggggcuggcggccaucaugcagcuguucuucagcuacuucgccgugcacuucaucuccaacagcuggcucauguggcugaucaucaaccugguccagauggcccccaucuccgcgauggugcgcauguacaucuucuucgccagcuucuacuacguguggaaguccuacguccacgugguggacggcugcaacagcagcacgugcaugaugugcuacaagcggaaccgcgccacgcgggucgagugcaccaccaucgugaacgggguccgccgguccuucuacguguacgccaacggcggcaagggguucugcaagcuccacaacuggaacugcgugaacugcgacaccuucugcgccggcagcacguucaucuccgacgaggucgcgcgcgaccugagccugcaguucaagcggccgaucaaccccaccgaccaguccagcuacaucguggacuccgugaccgucaagaacgggagcauccaccucuacuucgacaaggccggccagaagaccuacgagcgccacucccugagccacuucgugaaccuggacaaccuccgggugaacaacacgaaggggucccugcccaucaacgugaucgucuucgacggcaagagcaagugcgaggaguccagcgccaaguccgccagcguguacuacucccagcugaugugccagcccauccuccugcuggaccaggcgcucgugagcgacgucggcgacagcgccgagguggccgugaagauguucgacgccuacgucaacaccuucuccagcaccuucaacgugccgauggagaagcugaagacccugguggccacggcggaggccgagcucgccaagaacgucucccuggacaacgugcugagcaccuucaucuccgccgcgcgccagggguucguggacagcgacgucgagaccaaggacgugguggagugccucaagcugucccaccagagcgacaucgaggucaccggcgacuccugcaacaacuacaugcugacguacaacaagguggagaacaugacgccccgggaccucggggccugcaucgacugcagcgcccgccacaucaacgcccagguggccaagucccacaacaucgcgcugaucuggaacgucaaggacuucaugagccuguccgagcagcuccggaagcagauccgcagcgccgccaagaagaacaaccugcccuucaagcugaccugcgccaccacccgccagguggugaacgucgugaccaccaagaucgcccucaagggcgggugaggacuagucccuguucccagagcccacuuuuuuuucuuuuuuugaaauaaaauagccugucuuucagaucucaaaggcucuuuucagagccaccaaaaaaaaaaaaaaaaaaaaaaaaaaaaaaaaaaaaaaaaaaaaaaaaaaaaaaaaaaaaaaaaaaaaaaaaaaaaaaaaaaaaaaaaaaaaaaaaaaaaa

SEQ ID NO: 28198 - RNA, 6113 nt, Artificial Sequence
  SARS-CoV-2/Wuhan-Hu-1__NC_045512.2/MN908947.2__non-structural protein 3 (NSP3) mRNA gc (1-1946)(S795L_K838N)
aggagagucccgcagucggcguccagcggcucugcuuguucgugugugugucguugcaggccuuauucaagcuuaccauggcccccaccaaggugaccuucggcgacgacaccgucaucgaggugcagggguacaagagcgugaacaucaccuucgagcuggacgagcgcaucgacaagguccucaacgagaagugcuccgccuacaccguggagcugggcaccgaggugaacgaguucgcgugcgucguggccgacgccgugaucaagacgcugcagccggucagcgagcuccugacgccccuggggaucgaccucgacgagugguccauggccaccuacuaccuguucgacgagagcggcgaguucaagcuggccucccacauguacugcagcuucuacccgcccgacgaggacgaggaggagggggacugcgaggaggaggaguucgagcccuccacccaguacgaguacggcacggaggacgacuaccagggcaagccccucgaguucggggcgaccagcgccgcccugcagcccgaggaggagcaggaggaggacuggcuggacgacgacucccagcagaccgugggccagcaggacgggagcgaggacaaccagaccacgaccauccagaccaucguggagguccagccccagcucgagauggagcugaccccgguggugcagacgaucgaggucaacuccuucagcggcuaccugaagcucaccgacaacguguacaucaagaacgccgacaucguggaggaggcgaagaaggucaagcccaccgugguggucaacgccgccaacguguaccugaagcacgggggcggcguggccggggcccugaacaaggcgaccaacaacgccaugcaggucgaguccgacgacuacaucgccacgaacggcccccucaaggucgggggcagcugcgugcuguccggccacaaccuggccaagcacugccuccacgugguggggcccaacgucaacaagggcgaggacauccagcugcucaagagcgccuacgagaacuucaaccagcacgaggugcugcuggcgccgcugcucuccgccgggaucuucggcgccgaccccauccacagccugcgggugugcgucgacaccgugcgcaccaacguguaccuggccgucuucgacaagaaccucuacgacaagcugguguccagcuuccuggagaugaaguccgagaagcaggucgagcagaagaucgccgagauccccaaggaggaggugaagcccuucaucaccgagagcaagccgagcguggagcagcggaagcaggacgacaagaagaucaaggcgugcguggaggaggucacgaccacccucgaggagaccaaguuccugacggagaaccugcuccuguacaucgacaucaacgggaaccugcaccccgacuccgccacccucgugagcgacaucgacaucaccuuccugaagaaggacgcccccuacaucgugggcgacgucgugcaggagggcgugcugaccgccgucgugauccccacgaagaaggccgggggcaccaccgagaugcucgcgaaggcccugcgcaaggugccgaccgacaacuacaucacgaccuaccccgggcagggccugaacggguacaccgucgaggaggccaagaccgugcucaagaagugcaaguccgccuucuacauccugcccagcaucaucuccaacgagaagcaggagauccugggcaccgugagcuggaaccugcgggagaugcucgcgcacgccgaggagacgcgcaagcugaugcccgucugcguggagaccaaggccaucguguccaccauccagcggaaguacaagggcaucaagauccaggagggggucguggacuacggcgcccgcuucuacuucuacaccagcaagacgaccguggccucccugaucaacacccucaacgaccugaacgagacccuggucacgaugccgcucggguacgugacccacggccugaaccuggaggaggcggcccgguacaugcgcagccucaaggugcccgccaccgucuccgugagcucccccgacgccgugaccgccuacaacggguaccugacgagcuccagcaagacccccgaggagcacuucaucgagaccaucucccuggcgggcagcuacaaggacuggagcuacuccggccagagcacccagcucgggaucgaguuccugaagcggggcgacaaguccgucuacuacacgagcaacccgaccaccuuccaccuggacggggaggugaucaccuucgacaaccucaagacgcugcugucccuccgcgaggugcggaccaucaaggucuucaccaccguggacaacaucaaccugcacacccagguggucgacaugagcaugaccuacggccagcaguucggccccaccuaccuggacggggccgacgugaccaagaucaagccccacaaccugcacgagggcaagacguucuacgugcucccgaacgacgacacccugcgcgucgaggccuucgaguacuaccacaccaccgaccccagcuuccuggggcgguacauguccgcccucaaccacacgaagaacuggaaguacccccaggugaacggccugaccagcaucaagugggccgacaacaacugcuaccuggcgaccgcccuccugacccugcagcagaucgagcucaaguucaacccgcccgcccugcaggacgccuacuaccgcgcgcgggccggggaggccgccaacuucugcgcccugauccucgcguacugcaacaagacggugggcgagcugggcgacguccgcgagaccauguccuaccuguuccagcacgccaaccucgacagcugcaagcgggugcugaacgucgugugcaagaccugcgggcagcagcagaccacccugaagggcguggaggccgucauguacauggggacgcucuccuacgagcaguucaagaagggcgugcagauccccugcacgugcgggaagcaggccaccaaguaccuggugcagcaggagagccccuucgucaugauguccgcgcccccggcccaguacgagcugaagcacggcaccuucacgugcgccagcgaguacaccggcaacuaccagugcgggcacuacaagcacaucaccuccaaggagacccucuacugcaucgacggcgcccugcugaccaagagcagcgaguacaaggggcccaucaccgacguguucuacaaggagaacuccuacaccaccacgaucaagcccgugaccuacaagcucgacggcgucgugugcaccgagaucgaccccaagcuggacaacuacuacaagaaggacaacagcuacuucaccgagcagccgaucgaccuggugcccaaccagcccuaccccaacgccuccuucgacaacuucaaguucgucugcgacaacaucaaguucgccgacgaccucaaccagcugacgggguacaagaagccggcgagccgcgagcugaaggugaccuucuuccccgaccucaacggcgacguggucgccaucgacuacaagcacuacacccccuccuucaagaagggcgccaagcugcugcacaagcccaucguguggcacgugaacaacgccaccaacaaggcgacguacaagccgaacaccuggugcauccggugccucuggagcaccaagcccgucgagaccuccaacagcuucgacgugcugaaguccgaggacgcccaggggauggacaaccuggccugcgaggaccucaagcccgugagcgaggaggucguggagaaccccacgauccagaaggacgugcuggagugcaacgucaagaccaccgagguggugggcgacaucauccugaagccggccaacaacucccucaagaucaccgaggaggucgggcacacggaccugauggccgcguacguggacaacagcucccugaccaucaagaagcccaacgagcucagccgcgugcugggccugaagacccucgccacccacgggcuggccgccgucaacuccgugcccugggacacgaucgccaacuacgcgaagccguuccugaacaagguggucagcaccaccaccaacaucgugacgcgcugccucaaccgggugugcaccaacuacaugcccuacuucuucacccugcugcuccagcugugcaccuucacgcgcuccaccaacagccggaucaaggccuccaugcccaccaccaucgccaagaacaccgucaagagcgugggcaaguucugccuggaggccagcuucaacuaccucaagucccccaacuucagcaagcugaucaacaucaucaucugguuccugcuccuguccgugugccugggcagccucaucuacuccacggccgcgcuggggguccugaugagcaaccucggcaugccguccuacugcaccggguaccgcgagggcuaccugaacagcaccaacgugaccaucgccacguacugcaccggcuccauccccugcagcgugugccuguccgggcucgacagccuggacaccuaccccucccuggagaccauccagaucacgaucagcuccuucaagugggaccucaccgccuucggccuggucgccgagugguuccuggccuacauccucuucacccgguucuucuacgugcuggggcuggcggccaucaugcagcuguucuucagcuacuucgccgugcacuucaucuccaacagcuggcucauguggcugaucaucaaccugguccagauggcccccaucuccgcgauggugcgcauguacaucuucuucgccagcuucuacuacguguggaaguccuacguccacgugguggacggcugcaacagcagcacgugcaugaugugcuacaagcggaaccgcgccacgcgggucgagugcaccaccaucgugaacgggguccgccgguccuucuacguguacgccaacggcggcaagggguucugcaagcuccacaacuggaacugcgugaacugcgacaccuucugcgccggcagcacguucaucuccgacgaggucgcgcgcgaccugagccugcaguucaagcggccgaucaaccccaccgaccaguccagcuacaucguggacuccgugaccgucaagaacgggagcauccaccucuacuucgacaaggccggccagaagaccuacgagcgccacucccugagccacuucgugaaccuggacaaccuccgggccaacaacacgaaggggucccugcccaucaacgugaucgucuucgacggcaagagcaagugcgaggaguccagcgccaaguccgccagcguguacuacucccagcugaugugccagcccauccuccugcuggaccaggcgcucgugagcgacgucggcgacagcgccgagguggccgugaagauguucgacgccuacgucaacaccuucuccagcaccuucaacgugccgauggagaagcugaagacccugguggccacggcggaggccgagcucgccaagaacgucucccuggacaacgugcugagcaccuucaucuccgccgcgcgccagggguucguggacagcgacgucgagaccaaggacgugguggagugccucaagcugucccaccagagcgacaucgaggucaccggcgacuccugcaacaacuacaugcugacguacaacaagguggagaacaugacgccccgggaccucggggccugcaucgacugcagcgcccgccacaucaacgcccagguggccaagucccacaacaucgcgcugaucuggaacgucaaggacuucaugagccuguccgagcagcuccggaagcagauccgcagcgccgccaagaagaacaaccugcccuucaagcugaccugcgccaccacccgccagguggugaacgucgugaccaccaagaucgcccucaagggcgggugaggacuagucccuguucccagagcccacuuuuuuuucuuuuuuugaaauaaaauagccugucuuucagaucucaaaggcucuuuucagagccaccaaaaaaaaaaaaaaaaaaaaaaaaaaaaaaaaaaaaaaaaaaaaaaaaaaaaaaaaaaaaaaaaaaaaaaaaaaaaaaaaaaaaaaaaaaaaaaaaaaaaa

SEQ ID NO: 28199 - RNA, 6113 nt, Artificial Sequence
  SARS-CoV-2/Wuhan-Hu-1__NC_045512.2/MN908947.2__non-structural protein 3 (NSP3) mRNA gc (1-1946)(A42V_T429I_D822N_P1470S)
aggagagucccgcagucggcguccagcggcucugcuuguucgugugugugucguugcaggccuuauucaagcuuaccauggcccccaccaaggugaccuucggcgacgacaccgucaucgaggugcagggguacaagagcgugaacaucaccuucgagcuggacgagcgcaucgacaagguccucaacgagaagugcuccguguacaccguggagcugggcaccgaggugaacgaguucgcgugcgucguggccgacgccgugaucaagacgcugcagccggucagcgagcuccugacgccccuggggaucgaccucgacgagugguccauggccaccuacuaccuguucgacgagagcggcgaguucaagcuggccucccacauguacugcagcuucuacccgcccgacgaggacgaggaggagggggacugcgaggaggaggaguucgagcccuccacccaguacgaguacggcacggaggacgacuaccagggcaagccccucgaguucggggcgaccagcgccgcccugcagcccgaggaggagcaggaggaggacuggcuggacgacgacucccagcagaccgugggccagcaggacgggagcgaggacaaccagaccacgaccauccagaccaucguggagguccagccccagcucgagauggagcugaccccgguggugcagacgaucgaggucaacuccuucagcggcuaccugaagcucaccgacaacguguacaucaagaacgccgacaucguggaggaggcgaagaaggucaagcccaccgugguggucaacgccgccaacguguaccugaagcacgggggcggcguggccggggcccugaacaaggcgaccaacaacgccaugcaggucgaguccgacgacuacaucgccacgaacggcccccucaaggucgggggcagcugcgugcuguccggccacaaccuggccaagcacugccuccacgugguggggcccaacgucaacaagggcgaggacauccagcugcucaagagcgccuacgagaacuucaaccagcacgaggugcugcuggcgccgcugcucuccgccgggaucuucggcgccgaccccauccacagccugcgggugugcgucgacaccgugcgcaccaacguguaccuggccgucuucgacaagaaccucuacgacaagcugguguccagcuuccuggagaugaaguccgagaagcaggucgagcagaagaucgccgagauccccaaggaggaggugaagcccuucaucaccgagagcaagccgagcguggagcagcggaagcaggacgacaagaagaucaaggcgugcguggaggaggucacgaccacccucgaggagaucaaguuccugacggagaaccugcuccuguacaucgacaucaacgggaaccugcaccccgacuccgccacccucgugagcgacaucgacaucaccuuccugaagaaggacgcccccuacaucgugggcgacgucgugcaggagggcgugcugaccgccgucgugauccccacgaagaaggccgggggcaccaccgagaugcucgcgaaggcccugcgcaaggugccgaccgacaacuacaucacgaccuaccccgggcagggccugaacggguacaccgucgaggaggccaagaccgugcucaagaagugcaaguccgccuucuacauccugcccagcaucaucuccaacgagaagcaggagauccugggcaccgugagcuggaaccugcgggagaugcucgcgcacgccgaggagacgcgcaagcugaugcccgucugcguggagaccaaggccaucguguccaccauccagcggaaguacaagggcaucaagauccaggagggggucguggacuacggcgcccgcuucuacuucuacaccagcaagacgaccguggccucccugaucaacacccucaacgaccugaacgagacccuggucacgaugccgcucggguacgugacccacggccugaaccuggaggaggcggcccgguacaugcgcagccucaaggugcccgccaccgucuccgugagcucccccgacgccgugaccgccuacaacggguaccugacgagcuccagcaagacccccgaggagcacuucaucgagaccaucucccuggcgggcagcuacaaggacuggagcuacuccggccagagcacccagcucgggaucgaguuccugaagcggggcgacaaguccgucuacuacacgagcaacccgaccaccuuccaccuggacggggaggugaucaccuucgacaaccucaagacgcugcugucccuccgcgaggugcggaccaucaaggucuucaccaccguggacaacaucaaccugcacacccagguggucgacaugagcaugaccuacggccagcaguucggccccaccuaccuggacggggccgacgugaccaagaucaagccccacaacucccacgagggcaagacguucuacgugcucccgaacgacgacacccugcgcgucgaggccuucgaguacuaccacaccaccaaccccagcuuccuggggcgguacauguccgcccucaaccacacgaagaaguggaaguacccccaggugaacggccugaccagcaucaagugggccgacaacaacugcuaccuggcgaccgcccuccugacccugcagcagaucgagcucaaguucaacccgcccgcccugcaggacgccuacuaccgcgcgcgggccggggaggccgccaacuucugcgcccugauccucgcguacugcaacaagacggugggcgagcugggcgacguccgcgagaccauguccuaccuguuccagcacgccaaccucgacagcugcaagcgggugcugaacgucgugugcaagaccugcgggcagcagcagaccacccugaagggcguggaggccgucauguacauggggacgcucuccuacgagcaguucaagaagggcgugcagauccccugcacgugcgggaagcaggccaccaaguaccuggugcagcaggagagccccuucgucaugauguccgcgcccccggcccaguacgagcugaagcacggcaccuucacgugcgccagcgaguacaccggcaacuaccagugcgggcacuacaagcacaucaccuccaaggagacccucuacugcaucgacggcgcccugcugaccaagagcagcgaguacaaggggcccaucaccgacguguucuacaaggagaacuccuacaccaccacgaucaagcccgugaccuacaagcucgacggcgucgugugcaccgagaucgaccccaagcuggacaacuacuacaagaaggacaacagcuacuucaccgagcagccgaucgaccuggugcccaaccagcccuaccccaacgccuccuucgacaacuucaaguucgucugcgacaacaucaaguucgccgacgaccucaaccagcugacgggguacaagaagccggcgagccgcgagcugaaggugaccuucuuccccgaccucaacggcgacguggucgccaucgacuacaagcacuacacccccuccuucaagaagggcgccaagcugcugcacaagcccaucguguggcacgugaacaacgccaccaacaaggcgacguacaagccgaacaccuggugcauccggugccucuggagcaccaagcccgucgagaccuccaacagcuucgacgugcugaaguccgaggacgcccaggggauggacaaccuggccugcgaggaccucaagcccgugagcgaggaggucguggagaaccccacgauccagaaggacgugcuggagugcaacgucaagaccaccgagguggugggcgacaucauccugaagccggccaacaacucccucaagaucaccgaggaggucgggcacacggaccugauggccgcguacguggacaacagcucccugaccaucaagaagcccaacgagcucagccgcgugcugggccugaagacccucgccacccacgggcuggccgccgucaacuccgugcccugggacacgaucgccaacuacgcgaagccguuccugaacaagguggucagcaccaccaccaacaucgugacgcgcugccucaaccgggugugcaccaacuacaugcccuacuucuucacccugcugcuccagcugugcaccuucacgcgcuccaccaacagccggaucaaggccuccaugcccaccaccaucgccaagaacaccgucaagagcgugggcaaguucugccuggaggccagcuucaacuaccucaagucccccaacuucagcaagcugaucaacaucaucaucugguuccugcuccuguccgugugccugggcagccucaucuacuccacggccgcgcuggggguccugaugagcaaccucggcaugccguccuacugcaccggguaccgcgagggcuaccugaacagcaccaacgugaccaucgccacguacugcaccggcuccaucagcugcagcgugugccuguccgggcucgacagccuggacaccuaccccucccuggagaccauccagaucacgaucagcuccuucaagugggaccucaccgccuucggccuggucgccgagugguuccuggccuacauccucuucacccgguucuucuacgugcuggggcuggcggccaucaugcagcuguucuucagcuacuucgccgugcacuucaucuccaacagcuggcucauguggcugaucaucaaccugguccagauggcccccaucuccgcgauggugcgcauguacaucuucuucgccagcuucuacuacguguggaaguccuacguccacgugguggacggcugcaacagcagcacgugcaugaugugcuacaagcggaaccgcgccacgcgggucgagugcaccaccaucgugaacgggguccgccgguccuucuacguguacgccaacggcggcaagggguucugcaagcuccacaacuggaacugcgugaacugcgacaccuucugcgccggcagcacguucaucuccgacgaggucgcgcgcgaccugagccugcaguucaagcggccgaucaaccccaccgaccaguccagcuacaucguggacuccgugaccgucaagaacgggagcauccaccucuacuucgacaaggccggccagaagaccuacgagcgccacucccugagccacuucgugaaccuggacaaccuccgggccaacaacacgaaggggucccugcccaucaacgugaucgucuucgacggcaagagcaagugcgaggaguccagcgccaaguccgccagcguguacuacucccagcugaugugccagcccauccuccugcuggaccaggcgcucgugagcgacgucggcgacagcgccgagguggccgugaagauguucgacgccuacgucaacaccuucuccagcaccuucaacgugccgauggagaagcugaagacccugguggccacggcggaggccgagcucgccaagaacgucucccuggacaacgugcugagcaccuucaucuccgccgcgcgccagggguucguggacagcgacgucgagaccaaggacgugguggagugccucaagcugucccaccagagcgacaucgaggucaccggcgacuccugcaacaacuacaugcugacguacaacaagguggagaacaugacgccccgggaccucggggccugcaucgacugcagcgcccgccacaucaacgcccagguggccaagucccacaacaucgcgcugaucuggaacgucaaggacuucaugagccuguccgagcagcuccggaagcagauccgcagcgccgccaagaagaacaaccugcccuucaagcugaccugcgccaccacccgccagguggugaacgucgugaccaccaagaucgcccucaagggcgggugaggacuagucccuguucccagagcccacuuuuuuuucuuuuuuugaaauaaaauagccugucuuucagaucucaaaggcucuuuucagagccaccaaaaaaaaaaaaaaaaaaaaaaaaaaaaaaaaaaaaaaaaaaaaaaaaaaaaaaaaaaaaaaaaaaaaaaaaaaaaaaaaaaaaaaaaaaaaaaaaaaaaa

SEQ ID NO: 28200 - RNA, 6113 nt, Artificial Sequence
  SARS-CoV-2/Wuhan-Hu-1__NC_045512.2/MN908947.2__non-structural protein 3 (NSP3) mRNA gc (1-1946)(T238A_T721I_N1330D)
aggagagucccgcagucggcguccagcggcucugcuuguucgugugugugucguugcaggccuuauucaagcuuaccauggcccccaccaaggugaccuucggcgacgacaccgucaucgaggugcagggguacaagagcgugaacaucaccuucgagcuggacgagcgcaucgacaagguccucaacgagaagugcuccgccuacaccguggagcugggcaccgaggugaacgaguucgcgugcgucguggccgacgccgugaucaagacgcugcagccggucagcgagcuccugacgccccuggggaucgaccucgacgagugguccauggccaccuacuaccuguucgacgagagcggcgaguucaagcuggccucccacauguacugcagcuucuacccgcccgacgaggacgaggaggagggggacugcgaggaggaggaguucgagcccuccacccaguacgaguacggcacggaggacgacuaccagggcaagccccucgaguucggggcgaccagcgccgcccugcagcccgaggaggagcaggaggaggacuggcuggacgacgacucccagcagaccgugggccagcaggacgggagcgaggacaaccagaccacgaccauccagaccaucguggagguccagccccagcucgagauggagcugaccccgguggugcagacgaucgaggucaacuccuucagcggcuaccugaagcucaccgacaacguguacaucaagaacgccgacaucguggaggaggcgaagaaggucaagcccgccgugguggucaacgccgccaacguguaccugaagcacgggggcggcguggccggggcccugaacaaggcgaccaacaacgccaugcaggucgaguccgacgacuacaucgccacgaacggcccccucaaggucgggggcagcugcgugcuguccggccacaaccuggccaagcacugccuccacgugguggggcccaacgucaacaagggcgaggacauccagcugcucaagagcgccuacgagaacuucaaccagcacgaggugcugcuggcgccgcugcucuccgccgggaucuucggcgccgaccccauccacagccugcgggugugcgucgacaccgugcgcaccaacguguaccuggccgucuucgacaagaaccucuacgacaagcugguguccagcuuccuggagaugaaguccgagaagcaggucgagcagaagaucgccgagauccccaaggaggaggugaagcccuucaucaccgagagcaagccgagcguggagcagcggaagcaggacgacaagaagaucaaggcgugcguggaggaggucacgaccacccucgaggagaccaaguuccugacggagaaccugcuccuguacaucgacaucaacgggaaccugcaccccgacuccgccacccucgugagcgacaucgacaucaccuuccugaagaaggacgcccccuacaucgugggcgacgucgugcaggagggcgugcugaccgccgucgugauccccacgaagaaggccgggggcaccaccgagaugcucgcgaaggcccugcgcaaggugccgaccgacaacuacaucacgaccuaccccgggcagggccugaacggguacaccgucgaggaggccaagaccgugcucaagaagugcaaguccgccuucuacauccugcccagcaucaucuccaacgagaagcaggagauccugggcaccgugagcuggaaccugcgggagaugcucgcgcacgccgaggagacgcgcaagcugaugcccgucugcguggagaccaaggccaucguguccaccauccagcggaaguacaagggcaucaagauccaggagggggucguggacuacggcgcccgcuucuacuucuacaccagcaagacgaccguggccucccugaucaacacccucaacgaccugaacgagacccuggucacgaugccgcucggguacgugacccacggccugaaccuggaggaggcggcccgguacaugcgcagccucaaggugcccgccaccgucuccgugagcucccccgacgccgugaccgccuacaacggguaccugacgagcuccagcaagacccccgaggagcacuucaucgagaccaucucccuggcgggcagcuacaaggacuggagcuacuccggccagagcacccagcucgggaucgaguuccugaagcggggcgacaaguccgucuacuacaucagcaacccgaccaccuuccaccuggacggggaggugaucaccuucgacaaccucaagacgcugcugucccuccgcgaggugcggaccaucaaggucuucaccaccguggacaacaucaaccugcacacccagguggucgacaugagcaugaccuacggccagcaguucggccccaccuaccuggacggggccgacgugaccaagaucaagccccacaacucccacgagggcaagacguucuacgugcucccgaacgacgacacccugcgcgucgaggccuucgaguacuaccacaccaccgaccccagcuuccuggggcgguacauguccgcccucaaccacacgaagaaguggaaguacccccaggugaacggccugaccagcaucaagugggccgacaacaacugcuaccuggcgaccgcccuccugacccugcagcagaucgagcucaaguucaacccgcccgcccugcaggacgccuacuaccgcgcgcgggccggggaggccgccaacuucugcgcccugauccucgcguacugcaacaagacggugggcgagcugggcgacguccgcgagaccauguccuaccuguuccagcacgccaaccucgacagcugcaagcgggugcugaacgucgugugcaagaccugcgggcagcagcagaccacccugaagggcguggaggccgucauguacauggggacgcucuccuacgagcaguucaagaagggcgugcagauccccugcacgugcgggaagcaggccaccaaguaccuggugcagcaggagagccccuucgucaugauguccgcgcccccggcccaguacgagcugaagcacggcaccuucacgugcgccagcgaguacaccggcaacuaccagugcgggcacuacaagcacaucaccuccaaggagacccucuacugcaucgacggcgcccugcugaccaagagcagcgaguacaaggggcccaucaccgacguguucuacaaggagaacuccuacaccaccacgaucaagcccgugaccuacaagcucgacggcgucgugugcaccgagaucgaccccaagcuggacaacuacuacaagaaggacaacagcuacuucaccgagcagccgaucgaccuggugcccaaccagcccuaccccaacgccuccuucgacaacuucaaguucgucugcgacaacaucaaguucgccgacgaccucaaccagcugacgggguacaagaagccggcgagccgcgagcugaaggugaccuucuuccccgaccucaacggcgacguggucgccaucgacuacaagcacuacacccccuccuucaagaagggcgccaagcugcugcacaagcccaucguguggcacgugaacaacgccaccaacaaggcgacguacaagccgaacaccuggugcauccggugccucuggagcaccaagcccgucgagaccuccaacagcuucgacgugcugaaguccgaggacgcccaggggauggacaaccuggccugcgaggaccucaagcccgugagcgaggaggucguggagaaccccacgauccagaaggacgugcuggagugcaacgucaagaccaccgagguggugggcgacaucauccugaagccggccaacaacucccucaagaucaccgaggaggucgggcacacggaccugauggccgcguacguggacaacagcucccugaccaucaagaagcccaacgagcucagccgcgugcugggccugaagacccucgccacccacgggcuggccgccgucaacuccgugcccugggacacgaucgccaacuacgcgaagccguuccuggacaagguggucagcaccaccaccaacaucgugacgcgcugccucaaccgggugugcaccaacuacaugcccuacuucuucacccugcugcuccagcugugcaccuucacgcgcuccaccaacagccggaucaaggccuccaugcccaccaccaucgccaagaacaccgucaagagcgugggcaaguucugccuggaggccagcuucaacuaccucaagucccccaacuucagcaagcugaucaacaucaucaucugguuccugcuccuguccgugugccugggcagccucaucuacuccacggccgcgcuggggguccugaugagcaaccucggcaugccguccuacugcaccggguaccgcgagggcuaccugaacagcaccaacgugaccaucgccacguacugcaccggcuccauccccugcagcgugugccuguccgggcucgacagccuggacaccuaccccucccuggagaccauccagaucacgaucagcuccuucaagugggaccucaccgccuucggccuggucgccgagugguuccuggccuacauccucuucacccgguucuucuacgugcuggggcuggcggccaucaugcagcuguucuucagcuacuucgccgugcacuucaucuccaacagcuggcucauguggcugaucaucaaccugguccagauggcccccaucuccgcgauggugcgcauguacaucuucuucgccagcuucuacuacguguggaaguccuacguccacgugguggacggcugcaacagcagcacgugcaugaugugcuacaagcggaaccgcgccacgcgggucgagugcaccaccaucgugaacgggguccgccgguccuucuacguguacgccaacggcggcaagggguucugcaagcuccacaacuggaacugcgugaacugcgacaccuucugcgccggcagcacguucaucuccgacgaggucgcgcgcgaccugagccugcaguucaagcggccgaucaaccccaccgaccaguccagcuacaucguggacuccgugaccgucaagaacgggagcauccaccucuacuucgacaaggccggccagaagaccuacgagcgccacucccugagccacuucgugaaccuggacaaccuccgggccaacaacacgaaggggucccugcccaucaacgugaucgucuucgacggcaagagcaagugcgaggaguccagcgccaaguccgccagcguguacuacucccagcugaugugccagcccauccuccugcuggaccaggcgcucgugagcgacgucggcgacagcgccgagguggccgugaagauguucgacgccuacgucaacaccuucuccagcaccuucaacgugccgauggagaagcugaagacccugguggccacggcggaggccgagcucgccaagaacgucucccuggacaacgugcugagcaccuucaucuccgccgcgcgccagggguucguggacagcgacgucgagaccaaggacgugguggagugccucaagcugucccaccagagcgacaucgaggucaccggcgacuccugcaacaacuacaugcugacguacaacaagguggagaacaugacgccccgggaccucggggccugcaucgacugcagcgcccgccacaucaacgcccagguggccaagucccacaacaucgcgcugaucuggaacgucaaggacuucaugagccuguccgagcagcuccggaagcagauccgcagcgccgccaagaagaacaaccugcccuucaagcugaccugcgccaccacccgccagguggugaacgucgugaccaccaagaucgcccucaagggcgggugaggacuagucccuguucccagagcccacuuuuuuuucuuuuuuugaaauaaaauagccugucuuucagaucucaaaggcucuuuucagagccaccaaaaaaaaaaaaaaaaaaaaaaaaaaaaaaaaaaaaaaaaaaaaaaaaaaaaaaaaaaaaaaaaaaaaaaaaaaaaaaaaaaaaaaaaaaaaaaaaaaaaa

SEQ ID NO: 28201 - RNA, 6113 nt, Artificial Sequence
  SARS-CoV-2/Wuhan-Hu-1__NC_045512.2/MN908947.2__non-structural protein 3 (NSP3) mRNA gc (1-1946)(H343Y_P823L_K928I_N1588S)
aggagagucccgcagucggcguccagcggcucugcuuguucgugugugugucguugcaggccuuauucaagcuuaccauggcccccaccaaggugaccuucggcgacgacaccgucaucgaggugcagggguacaagagcgugaacaucaccuucgagcuggacgagcgcaucgacaagguccucaacgagaagugcuccgccuacaccguggagcugggcaccgaggugaacgaguucgcgugcgucguggccgacgccgugaucaagacgcugcagccggucagcgagcuccugacgccccuggggaucgaccucgacgagugguccauggccaccuacuaccuguucgacgagagcggcgaguucaagcuggccucccacauguacugcagcuucuacccgcccgacgaggacgaggaggagggggacugcgaggaggaggaguucgagcccuccacccaguacgaguacggcacggaggacgacuaccagggcaagccccucgaguucggggcgaccagcgccgcccugcagcccgaggaggagcaggaggaggacuggcuggacgacgacucccagcagaccgugggccagcaggacgggagcgaggacaaccagaccacgaccauccagaccaucguggagguccagccccagcucgagauggagcugaccccgguggugcagacgaucgaggucaacuccuucagcggcuaccugaagcucaccgacaacguguacaucaagaacgccgacaucguggaggaggcgaagaaggucaagcccaccgugguggucaacgccgccaacguguaccugaagcacgggggcggcguggccggggcccugaacaaggcgaccaacaacgccaugcaggucgaguccgacgacuacaucgccacgaacggcccccucaaggucgggggcagcugcgugcuguccggccacaaccuggccaagcacugccuccacgugguggggcccaacgucaacaagggcgaggacauccagcugcucaagagcgccuacgagaacuucaaccagcacgaggugcugcuggcgccgcugcucuccgccgggaucuucggcgccgaccccaucuacagccugcgggugugcgucgacaccgugcgcaccaacguguaccuggccgucuucgacaagaaccucuacgacaagcugguguccagcuuccuggagaugaaguccgagaagcaggucgagcagaagaucgccgagauccccaaggaggaggugaagcccuucaucaccgagagcaagccgagcguggagcagcggaagcaggacgacaagaagaucaaggcgugcguggaggaggucacgaccacccucgaggagaccaaguuccugacggagaaccugcuccuguacaucgacaucaacgggaaccugcaccccgacuccgccacccucgugagcgacaucgacaucaccuuccugaagaaggacgcccccuacaucgugggcgacgucgugcaggagggcgugcugaccgccgucgugauccccacgaagaaggccgggggcaccaccgagaugcucgcgaaggcccugcgcaaggugccgaccgacaacuacaucacgaccuaccccgggcagggccugaacggguacaccgucgaggaggccaagaccgugcucaagaagugcaaguccgccuucuacauccugcccagcaucaucuccaacgagaagcaggagauccugggcaccgugagcuggaaccugcgggagaugcucgcgcacgccgaggagacgcgcaagcugaugcccgucugcguggagaccaaggccaucguguccaccauccagcggaaguacaagggcaucaagauccaggagggggucguggacuacggcgcccgcuucuacuucuacaccagcaagacgaccguggccucccugaucaacacccucaacgaccugaacgagacccuggucacgaugccgcucggguacgugacccacggccugaaccuggaggaggcggcccgguacaugcgcagccucaaggugcccgccaccgucuccgugagcucccccgacgccgugaccgccuacaacggguaccugacgagcuccagcaagacccccgaggagcacuucaucgagaccaucucccuggcgggcagcuacaaggacuggagcuacuccggccagagcacccagcucgggaucgaguuccugaagcggggcgacaaguccgucuacuacacgagcaacccgaccaccuuccaccuggacggggaggugaucaccuucgacaaccucaagacgcugcugucccuccgcgaggugcggaccaucaaggucuucaccaccguggacaacaucaaccugcacacccagguggucgacaugagcaugaccuacggccagcaguucggccccaccuaccuggacggggccgacgugaccaagaucaagccccacaacucccacgagggcaagacguucuacgugcucccgaacgacgacacccugcgcgucgaggccuucgaguacuaccacaccaccgaccugagcuuccuggggcgguacauguccgcccucaaccacacgaagaaguggaaguacccccaggugaacggccugaccagcaucaagugggccgacaacaacugcuaccuggcgaccgcccuccugacccugcagcagaucgagcucaaguucaacccgcccgcccugcaggacgccuacuaccgcgcgcgggccggggaggccgccaacuucugcgcccugauccucgcguacugcaacaagacggugggcgagcugggcgacguccgcgagaccauguccuaccuguuccagcacgccaaccucgacagcugcauccgggugcugaacgucgugugcaagaccugcgggcagcagcagaccacccugaagggcguggaggccgucauguacauggggacgcucuccuacgagcaguucaagaagggcgugcagauccccugcacgugcgggaagcaggccaccaaguaccuggugcagcaggagagccccuucgucaugauguccgcgcccccggcccaguacgagcugaagcacggcaccuucacgugcgccagcgaguacaccggcaacuaccagugcgggcacuacaagcacaucaccuccaaggagacccucuacugcaucgacggcgcccugcugaccaagagcagcgaguacaaggggcccaucaccgacguguucuacaaggagaacuccuacaccaccacgaucaagcccgugaccuacaagcucgacggcgucgugugcaccgagaucgaccccaagcuggacaacuacuacaagaaggacaacagcuacuucaccgagcagccgaucgaccuggugcccaaccagcccuaccccaacgccuccuucgacaacuucaaguucgucugcgacaacaucaaguucgccgacgaccucaaccagcugacgggguacaagaagccggcgagccgcgagcugaaggugaccuucuuccccgaccucaacggcgacguggucgccaucgacuacaagcacuacacccccuccuucaagaagggcgccaagcugcugcacaagcccaucguguggcacgugaacaacgccaccaacaaggcgacguacaagccgaacaccuggugcauccggugccucuggagcaccaagcccgucgagaccuccaacagcuucgacgugcugaaguccgaggacgcccaggggauggacaaccuggccugcgaggaccucaagcccgugagcgaggaggucguggagaaccccacgauccagaaggacgugcuggagugcaacgucaagaccaccgagguggugggcgacaucauccugaagccggccaacaacucccucaagaucaccgaggaggucgggcacacggaccugauggccgcguacguggacaacagcucccugaccaucaagaagcccaacgagcucagccgcgugcugggccugaagacccucgccacccacgggcuggccgccgucaacuccgugcccugggacacgaucgccaacuacgcgaagccguuccugaacaagguggucagcaccaccaccaacaucgugacgcgcugccucaaccgggugugcaccaacuacaugcccuacuucuucacccugcugcuccagcugugcaccuucacgcgcuccaccaacagccggaucaaggccuccaugcccaccaccaucgccaagaacaccgucaagagcgugggcaaguucugccuggaggccagcuucaacuaccucaagucccccaacuucagcaagcugaucaacaucaucaucugguuccugcuccuguccgugugccugggcagccucaucuacuccacggccgcgcuggggguccugaugagcaaccucggcaugccguccuacugcaccggguaccgcgagggcuaccugaacagcaccaacgugaccaucgccacguacugcaccggcuccauccccugcagcgugugccuguccgggcucgacagccuggacaccuaccccucccuggagaccauccagaucacgaucagcuccuucaagugggaccucaccgccuucggccuggucgccgagugguuccuggccuacauccucuucacccgguucuucuacgugcuggggcuggcggccaucaugcagcuguucuucagcuacuucgccgugcacuucaucuccaacagcuggcucauguggcugaucaucaaccugguccagauggcccccaucuccgcgauggugcgcauguacaucuucuucgccagcuucuacuacguguggaaguccuacguccacgugguggacggcugcagcagcagcacgugcaugaugugcuacaagcggaaccgcgccacgcgggucgagugcaccaccaucgugaacgggguccgccgguccuucuacguguacgccaacggcggcaagggguucugcaagcuccacaacuggaacugcgugaacugcgacaccuucugcgccggcagcacguucaucuccgacgaggucgcgcgcgaccugagccugcaguucaagcggccgaucaaccccaccgaccaguccagcuacaucguggacuccgugaccgucaagaacgggagcauccaccucuacuucgacaaggccggccagaagaccuacgagcgccacucccugagccacuucgugaaccuggacaaccuccgggccaacaacacgaaggggucccugcccaucaacgugaucgucuucgacggcaagagcaagugcgaggaguccagcgccaaguccgccagcguguacuacucccagcugaugugccagcccauccuccugcuggaccaggcgcucgugagcgacgucggcgacagcgccgagguggccgugaagauguucgacgccuacgucaacaccuucuccagcaccuucaacgugccgauggagaagcugaagacccugguggccacggcggaggccgagcucgccaagaacgucucccuggacaacgugcugagcaccuucaucuccgccgcgcgccagggguucguggacagcgacgucgagaccaaggacgugguggagugccucaagcugucccaccagagcgacaucgaggucaccggcgacuccugcaacaacuacaugcugacguacaacaagguggagaacaugacgccccgggaccucggggccugcaucgacugcagcgcccgccacaucaacgcccagguggccaagucccacaacaucgcgcugaucuggaacgucaaggacuucaugagccuguccgagcagcuccggaagcagauccgcagcgccgccaagaagaacaaccugcccuucaagcugaccugcgccaccacccgccagguggugaacgucgugaccaccaagaucgcccucaagggcgggugaggacuagucccuguucccagagcccacuuuuuuuucuuuuuuugaaauaaaauagccugucuuucagaucucaaaggcucuuuucagagccaccaaaaaaaaaaaaaaaaaaaaaaaaaaaaaaaaaaaaaaaaaaaaaaaaaaaaaaaaaaaaaaaaaaaaaaaaaaaaaaaaaaaaaaaaaaaaaaaaaaaaa

SEQ ID NO: 28202 - RNA, 6113 nt, Artificial Sequence
  SARS-CoV-2/Wuhan-Hu-1__NC_045512.2/MN908947.2__non-structural protein 3 (NSP3) mRNA gc (1-1946)(E379V_K1694N)
aggagagucccgcagucggcguccagcggcucugcuuguucgugugugugucguugcaggccuuauucaagcuuaccauggcccccaccaaggugaccuucggcgacgacaccgucaucgaggugcagggguacaagagcgugaacaucaccuucgagcuggacgagcgcaucgacaagguccucaacgagaagugcuccgccuacaccguggagcugggcaccgaggugaacgaguucgcgugcgucguggccgacgccgugaucaagacgcugcagccggucagcgagcuccugacgccccuggggaucgaccucgacgagugguccauggccaccuacuaccuguucgacgagagcggcgaguucaagcuggccucccacauguacugcagcuucuacccgcccgacgaggacgaggaggagggggacugcgaggaggaggaguucgagcccuccacccaguacgaguacggcacggaggacgacuaccagggcaagccccucgaguucggggcgaccagcgccgcccugcagcccgaggaggagcaggaggaggacuggcuggacgacgacucccagcagaccgugggccagcaggacgggagcgaggacaaccagaccacgaccauccagaccaucguggagguccagccccagcucgagauggagcugaccccgguggugcagacgaucgaggucaacuccuucagcggcuaccugaagcucaccgacaacguguacaucaagaacgccgacaucguggaggaggcgaagaaggucaagcccaccgugguggucaacgccgccaacguguaccugaagcacgggggcggcguggccggggcccugaacaaggcgaccaacaacgccaugcaggucgaguccgacgacuacaucgccacgaacggcccccucaaggucgggggcagcugcgugcuguccggccacaaccuggccaagcacugccuccacgugguggggcccaacgucaacaagggcgaggacauccagcugcucaagagcgccuacgagaacuucaaccagcacgaggugcugcuggcgccgcugcucuccgccgggaucuucggcgccgaccccauccacagccugcgggugugcgucgacaccgugcgcaccaacguguaccuggccgucuucgacaagaaccucuacgacaagcugguguccagcuuccuggagaugaaguccgugaagcaggucgagcagaagaucgccgagauccccaaggaggaggugaagcccuucaucaccgagagcaagccgagcguggagcagcggaagcaggacgacaagaagaucaaggcgugcguggaggaggucacgaccacccucgaggagaccaaguuccugacggagaaccugcuccuguacaucgacaucaacgggaaccugcaccccgacuccgccacccucgugagcgacaucgacaucaccuuccugaagaaggacgcccccuacaucgugggcgacgucgugcaggagggcgugcugaccgccgucgugauccccacgaagaaggccgggggcaccaccgagaugcucgcgaaggcccugcgcaaggugccgaccgacaacuacaucacgaccuaccccgggcagggccugaacggguacaccgucgaggaggccaagaccgugcucaagaagugcaaguccgccuucuacauccugcccagcaucaucuccaacgagaagcaggagauccugggcaccgugagcuggaaccugcgggagaugcucgcgcacgccgaggagacgcgcaagcugaugcccgucugcguggagaccaaggccaucguguccaccauccagcggaaguacaagggcaucaagauccaggagggggucguggacuacggcgcccgcuucuacuucuacaccagcaagacgaccguggccucccugaucaacacccucaacgaccugaacgagacccuggucacgaugccgcucggguacgugacccacggccugaaccuggaggaggcggcccgguacaugcgcagccucaaggugcccgccaccgucuccgugagcucccccgacgccgugaccgccuacaacggguaccugacgagcuccagcaagacccccgaggagcacuucaucgagaccaucucccuggcgggcagcuacaaggacuggagcuacuccggccagagcacccagcucgggaucgaguuccugaagcggggcgacaaguccgucuacuacacgagcaacccgaccaccuuccaccuggacggggaggugaucaccuucgacaaccucaagacgcugcugucccuccgcgaggugcggaccaucaaggucuucaccaccguggacaacaucaaccugcacacccagguggucgacaugagcaugaccuacggccagcaguucggccccaccuaccuggacggggccgacgugaccaagaucaagccccacaacucccacgagggcaagacguucuacgugcucccgaacgacgacacccugcgcgucgaggccuucgaguacuaccacaccaccgaccccagcuuccuggggcgguacauguccgcccucaaccacacgaagaaguggaaguacccccaggugaacggccugaccagcaucaagugggccgacaacaacugcuaccuggcgaccgcccuccugacccugcagcagaucgagcucaaguucaacccgcccgcccugcaggacgccuacuaccgcgcgcgggccggggaggccgccaacuucugcgcccugauccucgcguacugcaacaagacggugggcgagcugggcgacguccgcgagaccauguccuaccuguuccagcacgccaaccucgacagcugcaagcgggugcugaacgucgugugcaagaccugcgggcagcagcagaccacccugaagggcguggaggccgucauguacauggggacgcucuccuacgagcaguucaagaagggcgugcagauccccugcacgugcgggaagcaggccaccaaguaccuggugcagcaggagagccccuucgucaugauguccgcgcccccggcccaguacgagcugaagcacggcaccuucacgugcgccagcgaguacaccggcaacuaccagugcgggcacuacaagcacaucaccuccaaggagacccucuacugcaucgacggcgcccugcugaccaagagcagcgaguacaaggggcccaucaccgacguguucuacaaggagaacuccuacaccaccacgaucaagcccgugaccuacaagcucgacggcgucgugugcaccgagaucgaccccaagcuggacaacuacuacaagaaggacaacagcuacuucaccgagcagccgaucgaccuggugcccaaccagcccuaccccaacgccuccuucgacaacuucaaguucgucugcgacaacaucaaguucgccgacgaccucaaccagcugacgggguacaagaagccggcgagccgcgagcugaaggugaccuucuuccccgaccucaacggcgacguggucgccaucgacuacaagcacuacacccccuccuucaagaagggcgccaagcugcugcacaagcccaucguguggcacgugaacaacgccaccaacaaggcgacguacaagccgaacaccuggugcauccggugccucuggagcaccaagcccgucgagaccuccaacagcuucgacgugcugaaguccgaggacgcccaggggauggacaaccuggccugcgaggaccucaagcccgugagcgaggaggucguggagaaccccacgauccagaaggacgugcuggagugcaacgucaagaccaccgagguggugggcgacaucauccugaagccggccaacaacucccucaagaucaccgaggaggucgggcacacggaccugauggccgcguacguggacaacagcucccugaccaucaagaagcccaacgagcucagccgcgugcugggccugaagacccucgccacccacgggcuggccgccgucaacuccgugcccugggacacgaucgccaacuacgcgaagccguuccugaacaagguggucagcaccaccaccaacaucgugacgcgcugccucaaccgggugugcaccaacuacaugcccuacuucuucacccugcugcuccagcugugcaccuucacgcgcuccaccaacagccggaucaaggccuccaugcccaccaccaucgccaagaacaccgucaagagcgugggcaaguucugccuggaggccagcuucaacuaccucaagucccccaacuucagcaagcugaucaacaucaucaucugguuccugcuccuguccgugugccugggcagccucaucuacuccacggccgcgcuggggguccugaugagcaaccucggcaugccguccuacugcaccggguaccgcgagggcuaccugaacagcaccaacgugaccaucgccacguacugcaccggcuccauccccugcagcgugugccuguccgggcucgacagccuggacaccuaccccucccuggagaccauccagaucacgaucagcuccuucaagugggaccucaccgccuucggccuggucgccgagugguuccuggccuacauccucuucacccgguucuucuacgugcuggggcuggcggccaucaugcagcuguucuucagcuacuucgccgugcacuucaucuccaacagcuggcucauguggcugaucaucaaccugguccagauggcccccaucuccgcgauggugcgcauguacaucuucuucgccagcuucuacuacguguggaaguccuacguccacgugguggacggcugcaacagcagcacgugcaugaugugcuacaagcggaaccgcgccacgcgggucgagugcaccaccaucgugaacgggguccgccgguccuucuacguguacgccaacggcggcaagggguucugcaagcuccacaacuggaacugcgugaacugcgacaccuucugcgccggcagcacguucaucuccgacgaggucgcgcgcgaccugagccugcaguucaagcggccgaucaaccccaccgaccaguccagcuacaucguggacuccgugaccgucaagaacgggagcauccaccucuacuucgacaaggccggccagaacaccuacgagcgccacucccugagccacuucgugaaccuggacaaccuccgggccaacaacacgaaggggucccugcccaucaacgugaucgucuucgacggcaagagcaagugcgaggaguccagcgccaaguccgccagcguguacuacucccagcugaugugccagcccauccuccugcuggaccaggcgcucgugagcgacgucggcgacagcgccgagguggccgugaagauguucgacgccuacgucaacaccuucuccagcaccuucaacgugccgauggagaagcugaagacccugguggccacggcggaggccgagcucgccaagaacgucucccuggacaacgugcugagcaccuucaucuccgccgcgcgccagggguucguggacagcgacgucgagaccaaggacgugguggagugccucaagcugucccaccagagcgacaucgaggucaccggcgacuccugcaacaacuacaugcugacguacaacaagguggagaacaugacgccccgggaccucggggccugcaucgacugcagcgcccgccacaucaacgcccagguggccaagucccacaacaucgcgcugaucuggaacgucaaggacuucaugagccuguccgagcagcuccggaagcagauccgcagcgccgccaagaagaacaaccugcccuucaagcugaccugcgccaccacccgccagguggugaacgucgugaccaccaagaucgcccucaagggcgggugaggacuagucccuguucccagagcccacuuuuuuuucuuuuuuugaaauaaaauagccugucuuucagaucucaaaggcucuuuucagagccaccaaaaaaaaaaaaaaaaaaaaaaaaaaaaaaaaaaaaaaaaaaaaaaaaaaaaaaaaaaaaaaaaaaaaaaaaaaaaaaaaaaaaaaaaaaaaaaaaaaaaa

SEQ ID NO: 28203 - RNA, 6113 nt, Artificial Sequence
  SARS-CoV-2/Wuhan-Hu-1__NC_045512.2/MN908947.2__non-structural protein 3 (NSP3) mRNA gc (1-1946)(T429I_P1470S_F1570V)
aggagagucccgcagucggcguccagcggcucugcuuguucgugugugugucguugcaggccuuauucaagcuuaccauggcccccaccaaggugaccuucggcgacgacaccgucaucgaggugcagggguacaagagcgugaacaucaccuucgagcuggacgagcgcaucgacaagguccucaacgagaagugcuccgccuacaccguggagcugggcaccgaggugaacgaguucgcgugcgucguggccgacgccgugaucaagacgcugcagccggucagcgagcuccugacgccccuggggaucgaccucgacgagugguccauggccaccuacuaccuguucgacgagagcggcgaguucaagcuggccucccacauguacugcagcuucuacccgcccgacgaggacgaggaggagggggacugcgaggaggaggaguucgagcccuccacccaguacgaguacggcacggaggacgacuaccagggcaagccccucgaguucggggcgaccagcgccgcccugcagcccgaggaggagcaggaggaggacuggcuggacgacgacucccagcagaccgugggccagcaggacgggagcgaggacaaccagaccacgaccauccagaccaucguggagguccagccccagcucgagauggagcugaccccgguggugcagacgaucgaggucaacuccuucagcggcuaccugaagcucaccgacaacguguacaucaagaacgccgacaucguggaggaggcgaagaaggucaagcccaccgugguggucaacgccgccaacguguaccugaagcacgggggcggcguggccggggcccugaacaaggcgaccaacaacgccaugcaggucgaguccgacgacuacaucgccacgaacggcccccucaaggucgggggcagcugcgugcuguccggccacaaccuggccaagcacugccuccacgugguggggcccaacgucaacaagggcgaggacauccagcugcucaagagcgccuacgagaacuucaaccagcacgaggugcugcuggcgccgcugcucuccgccgggaucuucggcgccgaccccauccacagccugcgggugugcgucgacaccgugcgcaccaacguguaccuggccgucuucgacaagaaccucuacgacaagcugguguccagcuuccuggagaugaaguccgagaagcaggucgagcagaagaucgccgagauccccaaggaggaggugaagcccuucaucaccgagagcaagccgagcguggagcagcggaagcaggacgacaagaagaucaaggcgugcguggaggaggucacgaccacccucgaggagaucaaguuccugacggagaaccugcuccuguacaucgacaucaacgggaaccugcaccccgacuccgccacccucgugagcgacaucgacaucaccuuccugaagaaggacgcccccuacaucgugggcgacgucgugcaggagggcgugcugaccgccgucgugauccccacgaagaaggccgggggcaccaccgagaugcucgcgaaggcccugcgcaaggugccgaccgacaacuacaucacgaccuaccccgggcagggccugaacggguacaccgucgaggaggccaagaccgugcucaagaagugcaaguccgccuucuacauccugcccagcaucaucuccaacgagaagcaggagauccugggcaccgugagcuggaaccugcgggagaugcucgcgcacgccgaggagacgcgcaagcugaugcccgucugcguggagaccaaggccaucguguccaccauccagcggaaguacaagggcaucaagauccaggagggggucguggacuacggcgcccgcuucuacuucuacaccagcaagacgaccguggccucccugaucaacacccucaacgaccugaacgagacccuggucacgaugccgcucggguacgugacccacggccugaaccuggaggaggcggcccgguacaugcgcagccucaaggugcccgccaccgucuccgugagcucccccgacgccgugaccgccuacaacggguaccugacgagcuccagcaagacccccgaggagcacuucaucgagaccaucucccuggcgggcagcuacaaggacuggagcuacuccggccagagcacccagcucgggaucgaguuccugaagcggggcgacaaguccgucuacuacacgagcaacccgaccaccuuccaccuggacggggaggugaucaccuucgacaaccucaagacgcugcugucccuccgcgaggugcggaccaucaaggucuucaccaccguggacaacaucaaccugcacacccagguggucgacaugagcaugaccuacggccagcaguucggccccaccuaccuggacggggccgacgugaccaagaucaagccccacaacucccacgagggcaagacguucuacgugcucccgaacgacgacacccugcgcgucgaggccuucgaguacuaccacaccaccgaccccagcuuccuggggcgguacauguccgcccucaaccacacgaagaaguggaaguacccccaggugaacggccugaccagcaucaagugggccgacaacaacugcuaccuggcgaccgcccuccugacccugcagcagaucgagcucaaguucaacccgcccgcccugcaggacgccuacuaccgcgcgcgggccggggaggccgccaacuucugcgcccugauccucgcguacugcaacaagacggugggcgagcugggcgacguccgcgagaccauguccuaccuguuccagcacgccaaccucgacagcugcaagcgggugcugaacgucgugugcaagaccugcgggcagcagcagaccacccugaagggcguggaggccgucauguacauggggacgcucuccuacgagcaguucaagaagggcgugcagauccccugcacgugcgggaagcaggccaccaaguaccuggugcagcaggagagccccuucgucaugauguccgcgcccccggcccaguacgagcugaagcacggcaccuucacgugcgccagcgaguacaccggcaacuaccagugcgggcacuacaagcacaucaccuccaaggagacccucuacugcaucgacggcgcccugcugaccaagagcagcgaguacaaggggcccaucaccgacguguucuacaaggagaacuccuacaccaccacgaucaagcccgugaccuacaagcucgacggcgucgugugcaccgagaucgaccccaagcuggacaacuacuacaagaaggacaacagcuacuucaccgagcagccgaucgaccuggugcccaaccagcccuaccccaacgccuccuucgacaacuucaaguucgucugcgacaacaucaaguucgccgacgaccucaaccagcugacgggguacaagaagccggcgagccgcgagcugaaggugaccuucuuccccgaccucaacggcgacguggucgccaucgacuacaagcacuacacccccuccuucaagaagggcgccaagcugcugcacaagcccaucguguggcacgugaacaacgccaccaacaaggcgacguacaagccgaacaccuggugcauccggugccucuggagcaccaagcccgucgagaccuccaacagcuucgacgugcugaaguccgaggacgcccaggggauggacaaccuggccugcgaggaccucaagcccgugagcgaggaggucguggagaaccccacgauccagaaggacgugcuggagugcaacgucaagaccaccgagguggugggcgacaucauccugaagccggccaacaacucccucaagaucaccgaggaggucgggcacacggaccugauggccgcguacguggacaacagcucccugaccaucaagaagcccaacgagcucagccgcgugcugggccugaagacccucgccacccacgggcuggccgccgucaacuccgugcccugggacacgaucgccaacuacgcgaagccguuccugaacaagguggucagcaccaccaccaacaucgugacgcgcugccucaaccgggugugcaccaacuacaugcccuacuucuucacccugcugcuccagcugugcaccuucacgcgcuccaccaacagccggaucaaggccuccaugcccaccaccaucgccaagaacaccgucaagagcgugggcaaguucugccuggaggccagcuucaacuaccucaagucccccaacuucagcaagcugaucaacaucaucaucugguuccugcuccuguccgugugccugggcagccucaucuacuccacggccgcgcuggggguccugaugagcaaccucggcaugccguccuacugcaccggguaccgcgagggcuaccugaacagcaccaacgugaccaucgccacguacugcaccggcuccaucagcugcagcgugugccuguccgggcucgacagccuggacaccuaccccucccuggagaccauccagaucacgaucagcuccuucaagugggaccucaccgccuucggccuggucgccgagugguuccuggccuacauccucuucacccgguucuucuacgugcuggggcuggcggccaucaugcagcuguucuucagcuacuucgccgugcacuucaucuccaacagcuggcucauguggcugaucaucaaccugguccagauggcccccaucuccgcgauggugcgcauguacaucuucguggccagcuucuacuacguguggaaguccuacguccacgugguggacggcugcaacagcagcacgugcaugaugugcuacaagcggaaccgcgccacgcgggucgagugcaccaccaucgugaacgggguccgccgguccuucuacguguacgccaacggcggcaagggguucugcaagcuccacaacuggaacugcgugaacugcgacaccuucugcgccggcagcacguucaucuccgacgaggucgcgcgcgaccugagccugcaguucaagcggccgaucaaccccaccgaccaguccagcuacaucguggacuccgugaccgucaagaacgggagcauccaccucuacuucgacaaggccggccagaagaccuacgagcgccacucccugagccacuucgugaaccuggacaaccuccgggccaacaacacgaaggggucccugcccaucaacgugaucgucuucgacggcaagagcaagugcgaggaguccagcgccaaguccgccagcguguacuacucccagcugaugugccagcccauccuccugcuggaccaggcgcucgugagcgacgucggcgacagcgccgagguggccgugaagauguucgacgccuacgucaacaccuucuccagcaccuucaacgugccgauggagaagcugaagacccugguggccacggcggaggccgagcucgccaagaacgucucccuggacaacgugcugagcaccuucaucuccgccgcgcgccagggguucguggacagcgacgucgagaccaaggacgugguggagugccucaagcugucccaccagagcgacaucgaggucaccggcgacuccugcaacaacuacaugcugacguacaacaagguggagaacaugacgccccgggaccucggggccugcaucgacugcagcgcccgccacaucaacgcccagguggccaagucccacaacaucgcgcugaucuggaacgucaaggacuucaugagccuguccgagcagcuccggaagcagauccgcagcgccgccaagaagaacaaccugcccuucaagcugaccugcgccaccacccgccagguggugaacgucgugaccaccaagaucgcccucaagggcgggugaggacuagucccuguucccagagcccacuuuuuuuucuuuuuuugaaauaaaauagccugucuuucagaucucaaaggcucuuuucagagccaccaaaaaaaaaaaaaaaaaaaaaaaaaaaaaaaaaaaaaaaaaaaaaaaaaaaaaaaaaaaaaaaaaaaaaaaaaaaaaaaaaaaaaaaaaaaaaaaaaaaaa

SEQ ID NO: 28204 - RNA, 6113 nt, Artificial Sequence
  SARS-CoV-2/Wuhan-Hu-1__NC_045512.2/MN908947.2__non-structural protein 3 (NSP3) mRNA gc (1-1946)(D737G_S1808F)
aggagagucccgcagucggcguccagcggcucugcuuguucgugugugugucguugcaggccuuauucaagcuuaccauggcccccaccaaggugaccuucggcgacgacaccgucaucgaggugcagggguacaagagcgugaacaucaccuucgagcuggacgagcgcaucgacaagguccucaacgagaagugcuccgccuacaccguggagcugggcaccgaggugaacgaguucgcgugcgucguggccgacgccgugaucaagacgcugcagccggucagcgagcuccugacgccccuggggaucgaccucgacgagugguccauggccaccuacuaccuguucgacgagagcggcgaguucaagcuggccucccacauguacugcagcuucuacccgcccgacgaggacgaggaggagggggacugcgaggaggaggaguucgagcccuccacccaguacgaguacggcacggaggacgacuaccagggcaagccccucgaguucggggcgaccagcgccgcccugcagcccgaggaggagcaggaggaggacuggcuggacgacgacucccagcagaccgugggccagcaggacgggagcgaggacaaccagaccacgaccauccagaccaucguggagguccagccccagcucgagauggagcugaccccgguggugcagacgaucgaggucaacuccuucagcggcuaccugaagcucaccgacaacguguacaucaagaacgccgacaucguggaggaggcgaagaaggucaagcccaccgugguggucaacgccgccaacguguaccugaagcacgggggcggcguggccggggcccugaacaaggcgaccaacaacgccaugcaggucgaguccgacgacuacaucgccacgaacggcccccucaaggucgggggcagcugcgugcuguccggccacaaccuggccaagcacugccuccacgugguggggcccaacgucaacaagggcgaggacauccagcugcucaagagcgccuacgagaacuucaaccagcacgaggugcugcuggcgccgcugcucuccgccgggaucuucggcgccgaccccauccacagccugcgggugugcgucgacaccgugcgcaccaacguguaccuggccgucuucgacaagaaccucuacgacaagcugguguccagcuuccuggagaugaaguccgagaagcaggucgagcagaagaucgccgagauccccaaggaggaggugaagcccuucaucaccgagagcaagccgagcguggagcagcggaagcaggacgacaagaagaucaaggcgugcguggaggaggucacgaccacccucgaggagaccaaguuccugacggagaaccugcuccuguacaucgacaucaacgggaaccugcaccccgacuccgccacccucgugagcgacaucgacaucaccuuccugaagaaggacgcccccuacaucgugggcgacgucgugcaggagggcgugcugaccgccgucgugauccccacgaagaaggccgggggcaccaccgagaugcucgcgaaggcccugcgcaaggugccgaccgacaacuacaucacgaccuaccccgggcagggccugaacggguacaccgucgaggaggccaagaccgugcucaagaagugcaaguccgccuucuacauccugcccagcaucaucuccaacgagaagcaggagauccugggcaccgugagcuggaaccugcgggagaugcucgcgcacgccgaggagacgcgcaagcugaugcccgucugcguggagaccaaggccaucguguccaccauccagcggaaguacaagggcaucaagauccaggagggggucguggacuacggcgcccgcuucuacuucuacaccagcaagacgaccguggccucccugaucaacacccucaacgaccugaacgagacccuggucacgaugccgcucggguacgugacccacggccugaaccuggaggaggcggcccgguacaugcgcagccucaaggugcccgccaccgucuccgugagcucccccgacgccgugaccgccuacaacggguaccugacgagcuccagcaagacccccgaggagcacuucaucgagaccaucucccuggcgggcagcuacaaggacuggagcuacuccggccagagcacccagcucgggaucgaguuccugaagcggggcgacaaguccgucuacuacacgagcaacccgaccaccuuccaccuggacggggaggugaucaccuucggcaaccucaagacgcugcugucccuccgcgaggugcggaccaucaaggucuucaccaccguggacaacaucaaccugcacacccagguggucgacaugagcaugaccuacggccagcaguucggccccaccuaccuggacggggccgacgugaccaagaucaagccccacaacucccacgagggcaagacguucuacgugcucccgaacgacgacacccugcgcgucgaggccuucgaguacuaccacaccaccgaccccagcuuccuggggcgguacauguccgcccucaaccacacgaagaaguggaaguacccccaggugaacggccugaccagcaucaagugggccgacaacaacugcuaccuggcgaccgcccuccugacccugcagcagaucgagcucaaguucaacccgcccgcccugcaggacgccuacuaccgcgcgcgggccggggaggccgccaacuucugcgcccugauccucgcguacugcaacaagacggugggcgagcugggcgacguccgcgagaccauguccuaccuguuccagcacgccaaccucgacagcugcaagcgggugcugaacgucgugugcaagaccugcgggcagcagcagaccacccugaagggcguggaggccgucauguacauggggacgcucuccuacgagcaguucaagaagggcgugcagauccccugcacgugcgggaagcaggccaccaaguaccuggugcagcaggagagccccuucgucaugauguccgcgcccccggcccaguacgagcugaagcacggcaccuucacgugcgccagcgaguacaccggcaacuaccagugcgggcacuacaagcacaucaccuccaaggagacccucuacugcaucgacggcgcccugcugaccaagagcagcgaguacaaggggcccaucaccgacguguucuacaaggagaacuccuacaccaccacgaucaagcccgugaccuacaagcucgacggcgucgugugcaccgagaucgaccccaagcuggacaacuacuacaagaaggacaacagcuacuucaccgagcagccgaucgaccuggugcccaaccagcccuaccccaacgccuccuucgacaacuucaaguucgucugcgacaacaucaaguucgccgacgaccucaaccagcugacgggguacaagaagccggcgagccgcgagcugaaggugaccuucuuccccgaccucaacggcgacguggucgccaucgacuacaagcacuacacccccuccuucaagaagggcgccaagcugcugcacaagcccaucguguggcacgugaacaacgccaccaacaaggcgacguacaagccgaacaccuggugcauccggugccucuggagcaccaagcccgucgagaccuccaacagcuucgacgugcugaaguccgaggacgcccaggggauggacaaccuggccugcgaggaccucaagcccgugagcgaggaggucguggagaaccccacgauccagaaggacgugcuggagugcaacgucaagaccaccgagguggugggcgacaucauccugaagccggccaacaacucccucaagaucaccgaggaggucgggcacacggaccugauggccgcguacguggacaacagcucccugaccaucaagaagcccaacgagcucagccgcgugcugggccugaagacccucgccacccacgggcuggccgccgucaacuccgugcccugggacacgaucgccaacuacgcgaagccguuccugaacaagguggucagcaccaccaccaacaucgugacgcgcugccucaaccgggugugcaccaacuacaugcccuacuucuucacccugcugcuccagcugugcaccuucacgcgcuccaccaacagccggaucaaggccuccaugcccaccaccaucgccaagaacaccgucaagagcgugggcaaguucugccuggaggccagcuucaacuaccucaagucccccaacuucagcaagcugaucaacaucaucaucugguuccugcuccuguccgugugccugggcagccucaucuacuccacggccgcgcuggggguccugaugagcaaccucggcaugccguccuacugcaccggguaccgcgagggcuaccugaacagcaccaacgugaccaucgccacguacugcaccggcuccauccccugcagcgugugccuguccgggcucgacagccuggacaccuaccccucccuggagaccauccagaucacgaucagcuccuucaagugggaccucaccgccuucggccuggucgccgagugguuccuggccuacauccucuucacccgguucuucuacgugcuggggcuggcggccaucaugcagcuguucuucagcuacuucgccgugcacuucaucuccaacagcuggcucauguggcugaucaucaaccugguccagauggcccccaucuccgcgauggugcgcauguacaucuucuucgccagcuucuacuacguguggaaguccuacguccacgugguggacggcugcaacagcagcacgugcaugaugugcuacaagcggaaccgcgccacgcgggucgagugcaccaccaucgugaacgggguccgccgguccuucuacguguacgccaacggcggcaagggguucugcaagcuccacaacuggaacugcgugaacugcgacaccuucugcgccggcagcacguucaucuccgacgaggucgcgcgcgaccugagccugcaguucaagcggccgaucaaccccaccgaccaguccagcuacaucguggacuccgugaccgucaagaacgggagcauccaccucuacuucgacaaggccggccagaagaccuacgagcgccacucccugagccacuucgugaaccuggacaaccuccgggccaacaacacgaaggggucccugcccaucaacgugaucgucuucgacggcaagagcaagugcgaggaguccagcgccaaguccgccagcguguacuacucccagcugaugugccagcccauccuccugcuggaccaggcgcucgugagcgacgucggcgacagcgccgagguggccgugaagauguucgacgccuacgucaacaccuucuccagcaccuucaacgugccgauggagaagcugaagacccugguggccacggcggaggccgagcucgccaagaacgucuuccuggacaacgugcugagcaccuucaucuccgccgcgcgccagggguucguggacagcgacgucgagaccaaggacgugguggagugccucaagcugucccaccagagcgacaucgaggucaccggcgacuccugcaacaacuacaugcugacguacaacaagguggagaacaugacgccccgggaccucggggccugcaucgacugcagcgcccgccacaucaacgcccagguggccaagucccacaacaucgcgcugaucuggaacgucaaggacuucaugagccuguccgagcagcuccggaagcagauccgcagcgccgccaagaagaacaaccugcccuucaagcugaccugcgccaccacccgccagguggugaacgucgugaccaccaagaucgcccucaagggcgggugaggacuagucccuguucccagagcccacuuuuuuuucuuuuuuugaaauaaaauagccugucuuucagaucucaaaggcucuuuucagagccaccaaaaaaaaaaaaaaaaaaaaaaaaaaaaaaaaaaaaaaaaaaaaaaaaaaaaaaaaaaaaaaaaaaaaaaaaaaaaaaaaaaaaaaaaaaaaaaaaaaaaa

SEQ ID NO: 28205 - RNA, 6113 nt, Artificial Sequence
  SARS-CoV-2/Wuhan-Hu-1__NC_045512.2/MN908947.2__non-structural protein 3 (NSP3) mRNA gc (1-1946)(T750I)
aggagagucccgcagucggcguccagcggcucugcuuguucgugugugugucguugcaggccuuauucaagcuuaccauggcccccaccaaggugaccuucggcgacgacaccgucaucgaggugcagggguacaagagcgugaacaucaccuucgagcuggacgagcgcaucgacaagguccucaacgagaagugcuccgccuacaccguggagcugggcaccgaggugaacgaguucgcgugcgucguggccgacgccgugaucaagacgcugcagccggucagcgagcuccugacgccccuggggaucgaccucgacgagugguccauggccaccuacuaccuguucgacgagagcggcgaguucaagcuggccucccacauguacugcagcuucuacccgcccgacgaggacgaggaggagggggacugcgaggaggaggaguucgagcccuccacccaguacgaguacggcacggaggacgacuaccagggcaagccccucgaguucggggcgaccagcgccgcccugcagcccgaggaggagcaggaggaggacuggcuggacgacgacucccagcagaccgugggccagcaggacgggagcgaggacaaccagaccacgaccauccagaccaucguggagguccagccccagcucgagauggagcugaccccgguggugcagacgaucgaggucaacuccuucagcggcuaccugaagcucaccgacaacguguacaucaagaacgccgacaucguggaggaggcgaagaaggucaagcccaccgugguggucaacgccgccaacguguaccugaagcacgggggcggcguggccggggcccugaacaaggcgaccaacaacgccaugcaggucgaguccgacgacuacaucgccacgaacggcccccucaaggucgggggcagcugcgugcuguccggccacaaccuggccaagcacugccuccacgugguggggcccaacgucaacaagggcgaggacauccagcugcucaagagcgccuacgagaacuucaaccagcacgaggugcugcuggcgccgcugcucuccgccgggaucuucggcgccgaccccauccacagccugcgggugugcgucgacaccgugcgcaccaacguguaccuggccgucuucgacaagaaccucuacgacaagcugguguccagcuuccuggagaugaaguccgagaagcaggucgagcagaagaucgccgagauccccaaggaggaggugaagcccuucaucaccgagagcaagccgagcguggagcagcggaagcaggacgacaagaagaucaaggcgugcguggaggaggucacgaccacccucgaggagaccaaguuccugacggagaaccugcuccuguacaucgacaucaacgggaaccugcaccccgacuccgccacccucgugagcgacaucgacaucaccuuccugaagaaggacgcccccuacaucgugggcgacgucgugcaggagggcgugcugaccgccgucgugauccccacgaagaaggccgggggcaccaccgagaugcucgcgaaggcccugcgcaaggugccgaccgacaacuacaucacgaccuaccccgggcagggccugaacggguacaccgucgaggaggccaagaccgugcucaagaagugcaaguccgccuucuacauccugcccagcaucaucuccaacgagaagcaggagauccugggcaccgugagcuggaaccugcgggagaugcucgcgcacgccgaggagacgcgcaagcugaugcccgucugcguggagaccaaggccaucguguccaccauccagcggaaguacaagggcaucaagauccaggagggggucguggacuacggcgcccgcuucuacuucuacaccagcaagacgaccguggccucccugaucaacacccucaacgaccugaacgagacccuggucacgaugccgcucggguacgugacccacggccugaaccuggaggaggcggcccgguacaugcgcagccucaaggugcccgccaccgucuccgugagcucccccgacgccgugaccgccuacaacggguaccugacgagcuccagcaagacccccgaggagcacuucaucgagaccaucucccuggcgggcagcuacaaggacuggagcuacuccggccagagcacccagcucgggaucgaguuccugaagcggggcgacaaguccgucuacuacacgagcaacccgaccaccuuccaccuggacggggaggugaucaccuucgacaaccucaagacgcugcugucccuccgcgaggugcggaucaucaaggucuucaccaccguggacaacaucaaccugcacacccagguggucgacaugagcaugaccuacggccagcaguucggccccaccuaccuggacggggccgacgugaccaagaucaagccccacaacucccacgagggcaagacguucuacgugcucccgaacgacgacacccugcgcgucgaggccuucgaguacuaccacaccaccgaccccagcuuccuggggcgguacauguccgcccucaaccacacgaagaaguggaaguacccccaggugaacggccugaccagcaucaagugggccgacaacaacugcuaccuggcgaccgcccuccugacccugcagcagaucgagcucaaguucaacccgcccgcccugcaggacgccuacuaccgcgcgcgggccggggaggccgccaacuucugcgcccugauccucgcguacugcaacaagacggugggcgagcugggcgacguccgcgagaccauguccuaccuguuccagcacgccaaccucgacagcugcaagcgggugcugaacgucgugugcaagaccugcgggcagcagcagaccacccugaagggcguggaggccgucauguacauggggacgcucuccuacgagcaguucaagaagggcgugcagauccccugcacgugcgggaagcaggccaccaaguaccuggugcagcaggagagccccuucgucaugauguccgcgcccccggcccaguacgagcugaagcacggcaccuucacgugcgccagcgaguacaccggcaacuaccagugcgggcacuacaagcacaucaccuccaaggagacccucuacugcaucgacggcgcccugcugaccaagagcagcgaguacaaggggcccaucaccgacguguucuacaaggagaacuccuacaccaccacgaucaagcccgugaccuacaagcucgacggcgucgugugcaccgagaucgaccccaagcuggacaacuacuacaagaaggacaacagcuacuucaccgagcagccgaucgaccuggugcccaaccagcccuaccccaacgccuccuucgacaacuucaaguucgucugcgacaacaucaaguucgccgacgaccucaaccagcugacgggguacaagaagccggcgagccgcgagcugaaggugaccuucuuccccgaccucaacggcgacguggucgccaucgacuacaagcacuacacccccuccuucaagaagggcgccaagcugcugcacaagcccaucguguggcacgugaacaacgccaccaacaaggcgacguacaagccgaacaccuggugcauccggugccucuggagcaccaagcccgucgagaccuccaacagcuucgacgugcugaaguccgaggacgcccaggggauggacaaccuggccugcgaggaccucaagcccgugagcgaggaggucguggagaaccccacgauccagaaggacgugcuggagugcaacgucaagaccaccgagguggugggcgacaucauccugaagccggccaacaacucccucaagaucaccgaggaggucgggcacacggaccugauggccgcguacguggacaacagcucccugaccaucaagaagcccaacgagcucagccgcgugcugggccugaagacccucgccacccacgggcuggccgccgucaacuccgugcccugggacacgaucgccaacuacgcgaagccguuccugaacaagguggucagcaccaccaccaacaucgugacgcgcugccucaaccgggugugcaccaacuacaugcccuacuucuucacccugcugcuccagcugugcaccuucacgcgcuccaccaacagccggaucaaggccuccaugcccaccaccaucgccaagaacaccgucaagagcgugggcaaguucugccuggaggccagcuucaacuaccucaagucccccaacuucagcaagcugaucaacaucaucaucugguuccugcuccuguccgugugccugggcagccucaucuacuccacggccgcgcuggggguccugaugagcaaccucggcaugccguccuacugcaccggguaccgcgagggcuaccugaacagcaccaacgugaccaucgccacguacugcaccggcuccauccccugcagcgugugccuguccgggcucgacagccuggacaccuaccccucccuggagaccauccagaucacgaucagcuccuucaagugggaccucaccgccuucggccuggucgccgagugguuccuggccuacauccucuucacccgguucuucuacgugcuggggcuggcggccaucaugcagcuguucuucagcuacuucgccgugcacuucaucuccaacagcuggcucauguggcugaucaucaaccugguccagauggcccccaucuccgcgauggugcgcauguacaucuucuucgccagcuucuacuacguguggaaguccuacguccacgugguggacggcugcaacagcagcacgugcaugaugugcuacaagcggaaccgcgccacgcgggucgagugcaccaccaucgugaacgggguccgccgguccuucuacguguacgccaacggcggcaagggguucugcaagcuccacaacuggaacugcgugaacugcgacaccuucugcgccggcagcacguucaucuccgacgaggucgcgcgcgaccugagccugcaguucaagcggccgaucaaccccaccgaccaguccagcuacaucguggacuccgugaccgucaagaacgggagcauccaccucuacuucgacaaggccggccagaagaccuacgagcgccacucccugagccacuucgugaaccuggacaaccuccgggccaacaacacgaaggggucccugcccaucaacgugaucgucuucgacggcaagagcaagugcgaggaguccagcgccaaguccgccagcguguacuacucccagcugaugugccagcccauccuccugcuggaccaggcgcucgugagcgacgucggcgacagcgccgagguggccgugaagauguucgacgccuacgucaacaccuucuccagcaccuucaacgugccgauggagaagcugaagacccugguggccacggcggaggccgagcucgccaagaacgucucccuggacaacgugcugagcaccuucaucuccgccgcgcgccagggguucguggacagcgacgucgagaccaaggacgugguggagugccucaagcugucccaccagagcgacaucgaggucaccggcgacuccugcaacaacuacaugcugacguacaacaagguggagaacaugacgccccgggaccucggggccugcaucgacugcagcgcccgccacaucaacgcccagguggccaagucccacaacaucgcgcugaucuggaacgucaaggacuucaugagccuguccgagcagcuccggaagcagauccgcagcgccgccaagaagaacaaccugcccuucaagcugaccugcgccaccacccgccagguggugaacgucgugaccaccaagaucgcccucaagggcgggugaggacuagucccuguucccagagcccacuuuuuuuucuuuuuuugaaauaaaauagccugucuuucagaucucaaaggcucuuuucagagccaccaaaaaaaaaaaaaaaaaaaaaaaaaaaaaaaaaaaaaaaaaaaaaaaaaaaaaaaaaaaaaaaaaaaaaaaaaaaaaaaaaaaaaaaaaaaaaaaaaaaaa

SEQ ID NO: 28206 - RNA, 6113 nt, Artificial Sequence
  SARS-CoV-2/Wuhan-Hu-1__NC_045512.2/MN908947.2__non-structural protein 3 (NSP3) mRNA gc (1-1946)(T1190I)
aggagagucccgcagucggcguccagcggcucugcuuguucgugugugugucguugcaggccuuauucaagcuuaccauggcccccaccaaggugaccuucggcgacgacaccgucaucgaggugcagggguacaagagcgugaacaucaccuucgagcuggacgagcgcaucgacaagguccucaacgagaagugcuccgccuacaccguggagcugggcaccgaggugaacgaguucgcgugcgucguggccgacgccgugaucaagacgcugcagccggucagcgagcuccugacgccccuggggaucgaccucgacgagugguccauggccaccuacuaccuguucgacgagagcggcgaguucaagcuggccucccacauguacugcagcuucuacccgcccgacgaggacgaggaggagggggacugcgaggaggaggaguucgagcccuccacccaguacgaguacggcacggaggacgacuaccagggcaagccccucgaguucggggcgaccagcgccgcccugcagcccgaggaggagcaggaggaggacuggcuggacgacgacucccagcagaccgugggccagcaggacgggagcgaggacaaccagaccacgaccauccagaccaucguggagguccagccccagcucgagauggagcugaccccgguggugcagacgaucgaggucaacuccuucagcggcuaccugaagcucaccgacaacguguacaucaagaacgccgacaucguggaggaggcgaagaaggucaagcccaccgugguggucaacgccgccaacguguaccugaagcacgggggcggcguggccggggcccugaacaaggcgaccaacaacgccaugcaggucgaguccgacgacuacaucgccacgaacggcccccucaaggucgggggcagcugcgugcuguccggccacaaccuggccaagcacugccuccacgugguggggcccaacgucaacaagggcgaggacauccagcugcucaagagcgccuacgagaacuucaaccagcacgaggugcugcuggcgccgcugcucuccgccgggaucuucggcgccgaccccauccacagccugcgggugugcgucgacaccgugcgcaccaacguguaccuggccgucuucgacaagaaccucuacgacaagcugguguccagcuuccuggagaugaaguccgagaagcaggucgagcagaagaucgccgagauccccaaggaggaggugaagcccuucaucaccgagagcaagccgagcguggagcagcggaagcaggacgacaagaagaucaaggcgugcguggaggaggucacgaccacccucgaggagaccaaguuccugacggagaaccugcuccuguacaucgacaucaacgggaaccugcaccccgacuccgccacccucgugagcgacaucgacaucaccuuccugaagaaggacgcccccuacaucgugggcgacgucgugcaggagggcgugcugaccgccgucgugauccccacgaagaaggccgggggcaccaccgagaugcucgcgaaggcccugcgcaaggugccgaccgacaacuacaucacgaccuaccccgggcagggccugaacggguacaccgucgaggaggccaagaccgugcucaagaagugcaaguccgccuucuacauccugcccagcaucaucuccaacgagaagcaggagauccugggcaccgugagcuggaaccugcgggagaugcucgcgcacgccgaggagacgcgcaagcugaugcccgucugcguggagaccaaggccaucguguccaccauccagcggaaguacaagggcaucaagauccaggagggggucguggacuacggcgcccgcuucuacuucuacaccagcaagacgaccguggccucccugaucaacacccucaacgaccugaacgagacccuggucacgaugccgcucggguacgugacccacggccugaaccuggaggaggcggcccgguacaugcgcagccucaaggugcccgccaccgucuccgugagcucccccgacgccgugaccgccuacaacggguaccugacgagcuccagcaagacccccgaggagcacuucaucgagaccaucucccuggcgggcagcuacaaggacuggagcuacuccggccagagcacccagcucgggaucgaguuccugaagcggggcgacaaguccgucuacuacacgagcaacccgaccaccuuccaccuggacggggaggugaucaccuucgacaaccucaagacgcugcugucccuccgcgaggugcggaccaucaaggucuucaccaccguggacaacaucaaccugcacacccagguggucgacaugagcaugaccuacggccagcaguucggccccaccuaccuggacggggccgacgugaccaagaucaagccccacaacucccacgagggcaagacguucuacgugcucccgaacgacgacacccugcgcgucgaggccuucgaguacuaccacaccaccgaccccagcuuccuggggcgguacauguccgcccucaaccacacgaagaaguggaaguacccccaggugaacggccugaccagcaucaagugggccgacaacaacugcuaccuggcgaccgcccuccugacccugcagcagaucgagcucaaguucaacccgcccgcccugcaggacgccuacuaccgcgcgcgggccggggaggccgccaacuucugcgcccugauccucgcguacugcaacaagacggugggcgagcugggcgacguccgcgagaccauguccuaccuguuccagcacgccaaccucgacagcugcaagcgggugcugaacgucgugugcaagaccugcgggcagcagcagaccacccugaagggcguggaggccgucauguacauggggacgcucuccuacgagcaguucaagaagggcgugcagauccccugcacgugcgggaagcaggccaccaaguaccuggugcagcaggagagccccuucgucaugauguccgcgcccccggcccaguacgagcugaagcacggcaccuucacgugcgccagcgaguacaccggcaacuaccagugcgggcacuacaagcacaucaccuccaaggagacccucuacugcaucgacggcgcccugcugaccaagagcagcgaguacaaggggcccaucaccgacguguucuacaaggagaacuccuacaccaccacgaucaagcccgugaccuacaagcucgacggcgucgugugcaccgagaucgaccccaagcuggacaacuacuacaagaaggacaacagcuacuucaccgagcagccgaucgaccuggugcccaaccagcccuaccccaacgccuccuucgacaacuucaaguucgucugcgacaacaucaaguucgccgacgaccucaaccagcugacgggguacaagaagccggcgagccgcgagcugaaggugaccuucuuccccgaccucaacggcgacguggucgccaucgacuacaagcacuacacccccuccuucaagaagggcgccaagcugcugcacaagcccaucguguggcacgugaacaacgccaccaacaaggcgacguacaagccgaacaucuggugcauccggugccucuggagcaccaagcccgucgagaccuccaacagcuucgacgugcugaaguccgaggacgcccaggggauggacaaccuggccugcgaggaccucaagcccgugagcgaggaggucguggagaaccccacgauccagaaggacgugcuggagugcaacgucaagaccaccgagguggugggcgacaucauccugaagccggccaacaacucccucaagaucaccgaggaggucgggcacacggaccugauggccgcguacguggacaacagcucccugaccaucaagaagcccaacgagcucagccgcgugcugggccugaagacccucgccacccacgggcuggccgccgucaacuccgugcccugggacacgaucgccaacuacgcgaagccguuccugaacaagguggucagcaccaccaccaacaucgugacgcgcugccucaaccgggugugcaccaacuacaugcccuacuucuucacccugcugcuccagcugugcaccuucacgcgcuccaccaacagccggaucaaggccuccaugcccaccaccaucgccaagaacaccgucaagagcgugggcaaguucugccuggaggccagcuucaacuaccucaagucccccaacuucagcaagcugaucaacaucaucaucugguuccugcuccuguccgugugccugggcagccucaucuacuccacggccgcgcuggggguccugaugagcaaccucggcaugccguccuacugcaccggguaccgcgagggcuaccugaacagcaccaacgugaccaucgccacguacugcaccggcuccauccccugcagcgugugccuguccgggcucgacagccuggacaccuaccccucccuggagaccauccagaucacgaucagcuccuucaagugggaccucaccgccuucggccuggucgccgagugguuccuggccuacauccucuucacccgguucuucuacgugcuggggcuggcggccaucaugcagcuguucuucagcuacuucgccgugcacuucaucuccaacagcuggcucauguggcugaucaucaaccugguccagauggcccccaucuccgcgauggugcgcauguacaucuucuucgccagcuucuacuacguguggaaguccuacguccacgugguggacggcugcaacagcagcacgugcaugaugugcuacaagcggaaccgcgccacgcgggucgagugcaccaccaucgugaacgggguccgccgguccuucuacguguacgccaacggcggcaagggguucugcaagcuccacaacuggaacugcgugaacugcgacaccuucugcgccggcagcacguucaucuccgacgaggucgcgcgcgaccugagccugcaguucaagcggccgaucaaccccaccgaccaguccagcuacaucguggacuccgugaccgucaagaacgggagcauccaccucuacuucgacaaggccggccagaagaccuacgagcgccacucccugagccacuucgugaaccuggacaaccuccgggccaacaacacgaaggggucccugcccaucaacgugaucgucuucgacggcaagagcaagugcgaggaguccagcgccaaguccgccagcguguacuacucccagcugaugugccagcccauccuccugcuggaccaggcgcucgugagcgacgucggcgacagcgccgagguggccgugaagauguucgacgccuacgucaacaccuucuccagcaccuucaacgugccgauggagaagcugaagacccugguggccacggcggaggccgagcucgccaagaacgucucccuggacaacgugcugagcaccuucaucuccgccgcgcgccagggguucguggacagcgacgucgagaccaaggacgugguggagugccucaagcugucccaccagagcgacaucgaggucaccggcgacuccugcaacaacuacaugcugacguacaacaagguggagaacaugacgccccgggaccucggggccugcaucgacugcagcgcccgccacaucaacgcccagguggccaagucccacaacaucgcgcugaucuggaacgucaaggacuucaugagccuguccgagcagcuccggaagcagauccgcagcgccgccaagaagaacaaccugcccuucaagcugaccugcgccaccacccgccagguggugaacgucgugaccaccaagaucgcccucaagggcgggugaggacuagucccuguucccagagcccacuuuuuuuucuuuuuuugaaauaaaauagccugucuuucagaucucaaaggcucuuuucagagccaccaaaaaaaaaaaaaaaaaaaaaaaaaaaaaaaaaaaaaaaaaaaaaaaaaaaaaaaaaaaaaaaaaaaaaaaaaaaaaaaaaaaaaaaaaaaaaaaaaaaaa

SEQ ID NO: 28207 - RNA, 6113 nt, Artificial Sequence
  SARS-CoV-2/Wuhan-Hu-1__NC_045512.2/MN908947.2__non-structural protein 3 (NSP3) mRNA gc (1-1946)(A1527V_T1831I)
aggagagucccgcagucggcguccagcggcucugcuuguucgugugugugucguugcaggccuuauucaagcuuaccauggcccccaccaaggugaccuucggcgacgacaccgucaucgaggugcagggguacaagagcgugaacaucaccuucgagcuggacgagcgcaucgacaagguccucaacgagaagugcuccgccuacaccguggagcugggcaccgaggugaacgaguucgcgugcgucguggccgacgccgugaucaagacgcugcagccggucagcgagcuccugacgccccuggggaucgaccucgacgagugguccauggccaccuacuaccuguucgacgagagcggcgaguucaagcuggccucccacauguacugcagcuucuacccgcccgacgaggacgaggaggagggggacugcgaggaggaggaguucgagcccuccacccaguacgaguacggcacggaggacgacuaccagggcaagccccucgaguucggggcgaccagcgccgcccugcagcccgaggaggagcaggaggaggacuggcuggacgacgacucccagcagaccgugggccagcaggacgggagcgaggacaaccagaccacgaccauccagaccaucguggagguccagccccagcucgagauggagcugaccccgguggugcagacgaucgaggucaacuccuucagcggcuaccugaagcucaccgacaacguguacaucaagaacgccgacaucguggaggaggcgaagaaggucaagcccaccgugguggucaacgccgccaacguguaccugaagcacgggggcggcguggccggggcccugaacaaggcgaccaacaacgccaugcaggucgaguccgacgacuacaucgccacgaacggcccccucaaggucgggggcagcugcgugcuguccggccacaaccuggccaagcacugccuccacgugguggggcccaacgucaacaagggcgaggacauccagcugcucaagagcgccuacgagaacuucaaccagcacgaggugcugcuggcgccgcugcucuccgccgggaucuucggcgccgaccccauccacagccugcgggugugcgucgacaccgugcgcaccaacguguaccuggccgucuucgacaagaaccucuacgacaagcugguguccagcuuccuggagaugaaguccgagaagcaggucgagcagaagaucgccgagauccccaaggaggaggugaagcccuucaucaccgagagcaagccgagcguggagcagcggaagcaggacgacaagaagaucaaggcgugcguggaggaggucacgaccacccucgaggagaccaaguuccugacggagaaccugcuccuguacaucgacaucaacgggaaccugcaccccgacuccgccacccucgugagcgacaucgacaucaccuuccugaagaaggacgcccccuacaucgugggcgacgucgugcaggagggcgugcugaccgccgucgugauccccacgaagaaggccgggggcaccaccgagaugcucgcgaaggcccugcgcaaggugccgaccgacaacuacaucacgaccuaccccgggcagggccugaacggguacaccgucgaggaggccaagaccgugcucaagaagugcaaguccgccuucuacauccugcccagcaucaucuccaacgagaagcaggagauccugggcaccgugagcuggaaccugcgggagaugcucgcgcacgccgaggagacgcgcaagcugaugcccgucugcguggagaccaaggccaucguguccaccauccagcggaaguacaagggcaucaagauccaggagggggucguggacuacggcgcccgcuucuacuucuacaccagcaagacgaccguggccucccugaucaacacccucaacgaccugaacgagacccuggucacgaugccgcucggguacgugacccacggccugaaccuggaggaggcggcccgguacaugcgcagccucaaggugcccgccaccgucuccgugagcucccccgacgccgugaccgccuacaacggguaccugacgagcuccagcaagacccccgaggagcacuucaucgagaccaucucccuggcgggcagcuacaaggacuggagcuacuccggccagagcacccagcucgggaucgaguuccugaagcggggcgacaaguccgucuacuacacgagcaacccgaccaccuuccaccuggacggggaggugaucaccuucgacaaccucaagacgcugcugucccuccgcgaggugcggaccaucaaggucuucaccaccguggacaacaucaaccugcacacccagguggucgacaugagcaugaccuacggccagcaguucggccccaccuaccuggacggggccgacgugaccaagaucaagccccacaacucccacgagggcaagacguucuacgugcucccgaacgacgacacccugcgcgucgaggccuucgaguacuaccacaccaccgaccccagcuuccuggggcgguacauguccgcccucaaccacacgaagaaguggaaguacccccaggugaacggccugaccagcaucaagugggccgacaacaacugcuaccuggcgaccgcccuccugacccugcagcagaucgagcucaaguucaacccgcccgcccugcaggacgccuacuaccgcgcgcgggccggggaggccgccaacuucugcgcccugauccucgcguacugcaacaagacggugggcgagcugggcgacguccgcgagaccauguccuaccuguuccagcacgccaaccucgacagcugcaagcgggugcugaacgucgugugcaagaccugcgggcagcagcagaccacccugaagggcguggaggccgucauguacauggggacgcucuccuacgagcaguucaagaagggcgugcagauccccugcacgugcgggaagcaggccaccaaguaccuggugcagcaggagagccccuucgucaugauguccgcgcccccggcccaguacgagcugaagcacggcaccuucacgugcgccagcgaguacaccggcaacuaccagugcgggcacuacaagcacaucaccuccaaggagacccucuacugcaucgacggcgcccugcugaccaagagcagcgaguacaaggggcccaucaccgacguguucuacaaggagaacuccuacaccaccacgaucaagcccgugaccuacaagcucgacggcgucgugugcaccgagaucgaccccaagcuggacaacuacuacaagaaggacaacagcuacuucaccgagcagccgaucgaccuggugcccaaccagcccuaccccaacgccuccuucgacaacuucaaguucgucugcgacaacaucaaguucgccgacgaccucaaccagcugacgggguacaagaagccggcgagccgcgagcugaaggugaccuucuuccccgaccucaacggcgacguggucgccaucgacuacaagcacuacacccccuccuucaagaagggcgccaagcugcugcacaagcccaucguguggcacgugaacaacgccaccaacaaggcgacguacaagccgaacaccuggugcauccggugccucuggagcaccaagcccgucgagaccuccaacagcuucgacgugcugaaguccgaggacgcccaggggauggacaaccuggccugcgaggaccucaagcccgugagcgaggaggucguggagaaccccacgauccagaaggacgugcuggagugcaacgucaagaccaccgagguggugggcgacaucauccugaagccggccaacaacucccucaagaucaccgaggaggucgggcacacggaccugauggccgcguacguggacaacagcucccugaccaucaagaagcccaacgagcucagccgcgugcugggccugaagacccucgccacccacgggcuggccgccgucaacuccgugcccugggacacgaucgccaacuacgcgaagccguuccugaacaagguggucagcaccaccaccaacaucgugacgcgcugccucaaccgggugugcaccaacuacaugcccuacuucuucacccugcugcuccagcugugcaccuucacgcgcuccaccaacagccggaucaaggccuccaugcccaccaccaucgccaagaacaccgucaagagcgugggcaaguucugccuggaggccagcuucaacuaccucaagucccccaacuucagcaagcugaucaacaucaucaucugguuccugcuccuguccgugugccugggcagccucaucuacuccacggccgcgcuggggguccugaugagcaaccucggcaugccguccuacugcaccggguaccgcgagggcuaccugaacagcaccaacgugaccaucgccacguacugcaccggcuccauccccugcagcgugugccuguccgggcucgacagccuggacaccuaccccucccuggagaccauccagaucacgaucagcuccuucaagugggaccucaccgccuucggccuggucgccgagugguuccuggccuacauccucuucacccgguucuucuacgugcuggggcugguggccaucaugcagcuguucuucagcuacuucgccgugcacuucaucuccaacagcuggcucauguggcugaucaucaaccugguccagauggcccccaucuccgcgauggugcgcauguacaucuucuucgccagcuucuacuacguguggaaguccuacguccacgugguggacggcugcaacagcagcacgugcaugaugugcuacaagcggaaccgcgccacgcgggucgagugcaccaccaucgugaacgggguccgccgguccuucuacguguacgccaacggcggcaagggguucugcaagcuccacaacuggaacugcgugaacugcgacaccuucugcgccggcagcacguucaucuccgacgaggucgcgcgcgaccugagccugcaguucaagcggccgaucaaccccaccgaccaguccagcuacaucguggacuccgugaccgucaagaacgggagcauccaccucuacuucgacaaggccggccagaagaccuacgagcgccacucccugagccacuucgugaaccuggacaaccuccgggccaacaacacgaaggggucccugcccaucaacgugaucgucuucgacggcaagagcaagugcgaggaguccagcgccaaguccgccagcguguacuacucccagcugaugugccagcccauccuccugcuggaccaggcgcucgugagcgacgucggcgacagcgccgagguggccgugaagauguucgacgccuacgucaacaccuucuccagcaccuucaacgugccgauggagaagcugaagacccugguggccacggcggaggccgagcucgccaagaacgucucccuggacaacgugcugagcaccuucaucuccgccgcgcgccagggguucguggacagcgacgucgagaucaaggacgugguggagugccucaagcugucccaccagagcgacaucgaggucaccggcgacuccugcaacaacuacaugcugacguacaacaagguggagaacaugacgccccgggaccucggggccugcaucgacugcagcgcccgccacaucaacgcccagguggccaagucccacaacaucgcgcugaucuggaacgucaaggacuucaugagccuguccgagcagcuccggaagcagauccgcagcgccgccaagaagaacaaccugcccuucaagcugaccugcgccaccacccgccagguggugaacgucgugaccaccaagaucgcccucaagggcgggugaggacuagucccuguucccagagcccacuuuuuuuucuuuuuuugaaauaaaauagccugucuuucagaucucaaaggcucuuuucagagccaccaaaaaaaaaaaaaaaaaaaaaaaaaaaaaaaaaaaaaaaaaaaaaaaaaaaaaaaaaaaaaaaaaaaaaaaaaaaaaaaaaaaaaaaaaaaaaaaaaaaaa

SEQ ID NO: 28208 - RNA, 6113 nt, Artificial Sequence
  SARS-CoV-2/Wuhan-Hu-1__NC_045512.2/MN908947.2__non-structural protein 3 (NSP3) mRNA gc (1-1946)(A86V_A656V_I1022V_E1847D)
aggagagucccgcagucggcguccagcggcucugcuuguucgugugugugucguugcaggccuuauucaagcuuaccauggcccccaccaaggugaccuucggcgacgacaccgucaucgaggugcagggguacaagagcgugaacaucaccuucgagcuggacgagcgcaucgacaagguccucaacgagaagugcuccgccuacaccguggagcugggcaccgaggugaacgaguucgcgugcgucguggccgacgccgugaucaagacgcugcagccggucagcgagcuccugacgccccuggggaucgaccucgacgagugguccauggugaccuacuaccuguucgacgagagcggcgaguucaagcuggccucccacauguacugcagcuucuacccgcccgacgaggacgaggaggagggggacugcgaggaggaggaguucgagcccuccacccaguacgaguacggcacggaggacgacuaccagggcaagccccucgaguucggggcgaccagcgccgcccugcagcccgaggaggagcaggaggaggacuggcuggacgacgacucccagcagaccgugggccagcaggacgggagcgaggacaaccagaccacgaccauccagaccaucguggagguccagccccagcucgagauggagcugaccccgguggugcagacgaucgaggucaacuccuucagcggcuaccugaagcucaccgacaacguguacaucaagaacgccgacaucguggaggaggcgaagaaggucaagcccaccgugguggucaacgccgccaacguguaccugaagcacgggggcggcguggccggggcccugaacaaggcgaccaacaacgccaugcaggucgaguccgacgacuacaucgccacgaacggcccccucaaggucgggggcagcugcgugcuguccggccacaaccuggccaagcacugccuccacgugguggggcccaacgucaacaagggcgaggacauccagcugcucaagagcgccuacgagaacuucaaccagcacgaggugcugcuggcgccgcugcucuccgccgggaucuucggcgccgaccccauccacagccugcgggugugcgucgacaccgugcgcaccaacguguaccuggccgucuucgacaagaaccucuacgacaagcugguguccagcuuccuggagaugaaguccgagaagcaggucgagcagaagaucgccgagauccccaaggaggaggugaagcccuucaucaccgagagcaagccgagcguggagcagcggaagcaggacgacaagaagaucaaggcgugcguggaggaggucacgaccacccucgaggagaccaaguuccugacggagaaccugcuccuguacaucgacaucaacgggaaccugcaccccgacuccgccacccucgugagcgacaucgacaucaccuuccugaagaaggacgcccccuacaucgugggcgacgucgugcaggagggcgugcugaccgccgucgugauccccacgaagaaggccgggggcaccaccgagaugcucgcgaaggcccugcgcaaggugccgaccgacaacuacaucacgaccuaccccgggcagggccugaacggguacaccgucgaggaggccaagaccgugcucaagaagugcaaguccgccuucuacauccugcccagcaucaucuccaacgagaagcaggagauccugggcaccgugagcuggaaccugcgggagaugcucgcgcacgccgaggagacgcgcaagcugaugcccgucugcguggagaccaaggccaucguguccaccauccagcggaaguacaagggcaucaagauccaggagggggucguggacuacggcgcccgcuucuacuucuacaccagcaagacgaccguggccucccugaucaacacccucaacgaccugaacgagacccuggucacgaugccgcucggguacgugacccacggccugaaccuggaggaggcggcccgguacaugcgcagccucaaggugcccgugaccgucuccgugagcucccccgacgccgugaccgccuacaacggguaccugacgagcuccagcaagacccccgaggagcacuucaucgagaccaucucccuggcgggcagcuacaaggacuggagcuacuccggccagagcacccagcucgggaucgaguuccugaagcggggcgacaaguccgucuacuacacgagcaacccgaccaccuuccaccuggacggggaggugaucaccuucgacaaccucaagacgcugcugucccuccgcgaggugcggaccaucaaggucuucaccaccguggacaacaucaaccugcacacccagguggucgacaugagcaugaccuacggccagcaguucggccccaccuaccuggacggggccgacgugaccaagaucaagccccacaacucccacgagggcaagacguucuacgugcucccgaacgacgacacccugcgcgucgaggccuucgaguacuaccacaccaccgaccccagcuuccuggggcgguacauguccgcccucaaccacacgaagaaguggaaguacccccaggugaacggccugaccagcaucaagugggccgacaacaacugcuaccuggcgaccgcccuccugacccugcagcagaucgagcucaaguucaacccgcccgcccugcaggacgccuacuaccgcgcgcgggccggggaggccgccaacuucugcgcccugauccucgcguacugcaacaagacggugggcgagcugggcgacguccgcgagaccauguccuaccuguuccagcacgccaaccucgacagcugcaagcgggugcugaacgucgugugcaagaccugcgggcagcagcagaccacccugaagggcguggaggccgucauguacauggggacgcucuccuacgagcaguucaagaagggcgugcagauccccugcacgugcgggaagcaggccaccaaguaccuggugcagcaggagagccccuucgucaugauguccgcgcccccggcccaguacgagcugaagcacggcaccuucacgugcgccagcgaguacaccggcaacuaccagugcgggcacuacaagcacgugaccuccaaggagacccucuacugcaucgacggcgcccugcugaccaagagcagcgaguacaaggggcccaucaccgacguguucuacaaggagaacuccuacaccaccacgaucaagcccgugaccuacaagcucgacggcgucgugugcaccgagaucgaccccaagcuggacaacuacuacaagaaggacaacagcuacuucaccgagcagccgaucgaccuggugcccaaccagcccuaccccaacgccuccuucgacaacuucaaguucgucugcgacaacaucaaguucgccgacgaccucaaccagcugacgggguacaagaagccggcgagccgcgagcugaaggugaccuucuuccccgaccucaacggcgacguggucgccaucgacuacaagcacuacacccccuccuucaagaagggcgccaagcugcugcacaagcccaucguguggcacgugaacaacgccaccaacaaggcgacguacaagccgaacaccuggugcauccggugccucuggagcaccaagcccgucgagaccuccaacagcuucgacgugcugaaguccgaggacgcccaggggauggacaaccuggccugcgaggaccucaagcccgugagcgaggaggucguggagaaccccacgauccagaaggacgugcuggagugcaacgucaagaccaccgagguggugggcgacaucauccugaagccggccaacaacucccucaagaucaccgaggaggucgggcacacggaccugauggccgcguacguggacaacagcucccugaccaucaagaagcccaacgagcucagccgcgugcugggccugaagacccucgccacccacgggcuggccgccgucaacuccgugcccugggacacgaucgccaacuacgcgaagccguuccugaacaagguggucagcaccaccaccaacaucgugacgcgcugccucaaccgggugugcaccaacuacaugcccuacuucuucacccugcugcuccagcugugcaccuucacgcgcuccaccaacagccggaucaaggccuccaugcccaccaccaucgccaagaacaccgucaagagcgugggcaaguucugccuggaggccagcuucaacuaccucaagucccccaacuucagcaagcugaucaacaucaucaucugguuccugcuccuguccgugugccugggcagccucaucuacuccacggccgcgcuggggguccugaugagcaaccucggcaugccguccuacugcaccggguaccgcgagggcuaccugaacagcaccaacgugaccaucgccacguacugcaccggcuccauccccugcagcgugugccuguccgggcucgacagccuggacaccuaccccucccuggagaccauccagaucacgaucagcuccuucaagugggaccucaccgccuucggccuggucgccgagugguuccuggccuacauccucuucacccgguucuucuacgugcuggggcuggcggccaucaugcagcuguucuucagcuacuucgccgugcacuucaucuccaacagcuggcucauguggcugaucaucaaccugguccagauggcccccaucuccgcgauggugcgcauguacaucuucuucgccagcuucuacuacguguggaaguccuacguccacgugguggacggcugcaacagcagcacgugcaugaugugcuacaagcggaaccgcgccacgcgggucgagugcaccaccaucgugaacgggguccgccgguccuucuacguguacgccaacggcggcaagggguucugcaagcuccacaacuggaacugcgugaacugcgacaccuucugcgccggcagcacguucaucuccgacgaggucgcgcgcgaccugagccugcaguucaagcggccgaucaaccccaccgaccaguccagcuacaucguggacuccgugaccgucaagaacgggagcauccaccucuacuucgacaaggccggccagaagaccuacgagcgccacucccugagccacuucgugaaccuggacaaccuccgggccaacaacacgaaggggucccugcccaucaacgugaucgucuucgacggcaagagcaagugcgaggaguccagcgccaaguccgccagcguguacuacucccagcugaugugccagcccauccuccugcuggaccaggcgcucgugagcgacgucggcgacagcgccgagguggccgugaagauguucgacgccuacgucaacaccuucuccagcaccuucaacgugccgauggagaagcugaagacccugguggccacggcggaggccgagcucgccaagaacgucucccuggacaacgugcugagcaccuucaucuccgccgcgcgccagggguucguggacagcgacgucgagaccaaggacgugguggagugccucaagcugucccaccagagcgacaucgacgucaccggcgacuccugcaacaacuacaugcugacguacaacaagguggagaacaugacgccccgggaccucggggccugcaucgacugcagcgcccgccacaucaacgcccagguggccaagucccacaacaucgcgcugaucuggaacgucaaggacuucaugagccuguccgagcagcuccggaagcagauccgcagcgccgccaagaagaacaaccugcccuucaagcugaccugcgccaccacccgccagguggugaacgucgugaccaccaagaucgcccucaagggcgggugaggacuagucccuguucccagagcccacuuuuuuuucuuuuuuugaaauaaaauagccugucuuucagaucucaaaggcucuuuucagagccaccaaaaaaaaaaaaaaaaaaaaaaaaaaaaaaaaaaaaaaaaaaaaaaaaaaaaaaaaaaaaaaaaaaaaaaaaaaaaaaaaaaaaaaaaaaaaaaaaaaaaa

SEQ ID NO: 28209 - RNA, 6113 nt, Artificial Sequence
  SARS-CoV-2/Wuhan-Hu-1__NC_045512.2/MN908947.2__non-structural protein 3 (NSP3) mRNA gc (1-1946)(D136N_E379V_K1694N)
aggagagucccgcagucggcguccagcggcucugcuuguucgugugugugucguugcaggccuuauucaagcuuaccauggcccccaccaaggugaccuucggcgacgacaccgucaucgaggugcagggguacaagagcgugaacaucaccuucgagcuggacgagcgcaucgacaagguccucaacgagaagugcuccgccuacaccguggagcugggcaccgaggugaacgaguucgcgugcgucguggccgacgccgugaucaagacgcugcagccggucagcgagcuccugacgccccuggggaucgaccucgacgagugguccauggccaccuacuaccuguucgacgagagcggcgaguucaagcuggccucccacauguacugcagcuucuacccgcccgacgaggacgaggaggagggggacugcgaggaggaggaguucgagcccuccacccaguacgaguacggcacggagaacgacuaccagggcaagccccucgaguucggggcgaccagcgccgcccugcagcccgaggaggagcaggaggaggacuggcuggacgacgacucccagcagaccgugggccagcaggacgggagcgaggacaaccagaccacgaccauccagaccaucguggagguccagccccagcucgagauggagcugaccccgguggugcagacgaucgaggucaacuccuucagcggcuaccugaagcucaccgacaacguguacaucaagaacgccgacaucguggaggaggcgaagaaggucaagcccaccgugguggucaacgccgccaacguguaccugaagcacgggggcggcguggccggggcccugaacaaggcgaccaacaacgccaugcaggucgaguccgacgacuacaucgccacgaacggcccccucaaggucgggggcagcugcgugcuguccggccacaaccuggccaagcacugccuccacgugguggggcccaacgucaacaagggcgaggacauccagcugcucaagagcgccuacgagaacuucaaccagcacgaggugcugcuggcgccgcugcucuccgccgggaucuucggcgccgaccccauccacagccugcgggugugcgucgacaccgugcgcaccaacguguaccuggccgucuucgacaagaaccucuacgacaagcugguguccagcuuccuggagaugaaguccgugaagcaggucgagcagaagaucgccgagauccccaaggaggaggugaagcccuucaucaccgagagcaagccgagcguggagcagcggaagcaggacgacaagaagaucaaggcgugcguggaggaggucacgaccacccucgaggagaccaaguuccugacggagaaccugcuccuguacaucgacaucaacgggaaccugcaccccgacuccgccacccucgugagcgacaucgacaucaccuuccugaagaaggacgcccccuacaucgugggcgacgucgugcaggagggcgugcugaccgccgucgugauccccacgaagaaggccgggggcaccaccgagaugcucgcgaaggcccugcgcaaggugccgaccgacaacuacaucacgaccuaccccgggcagggccugaacggguacaccgucgaggaggccaagaccgugcucaagaagugcaaguccgccuucuacauccugcccagcaucaucuccaacgagaagcaggagauccugggcaccgugagcuggaaccugcgggagaugcucgcgcacgccgaggagacgcgcaagcugaugcccgucugcguggagaccaaggccaucguguccaccauccagcggaaguacaagggcaucaagauccaggagggggucguggacuacggcgcccgcuucuacuucuacaccagcaagacgaccguggccucccugaucaacacccucaacgaccugaacgagacccuggucacgaugccgcucggguacgugacccacggccugaaccuggaggaggcggcccgguacaugcgcagccucaaggugcccgccaccgucuccgugagcucccccgacgccgugaccgccuacaacggguaccugacgagcuccagcaagacccccgaggagcacuucaucgagaccaucucccuggcgggcagcuacaaggacuggagcuacuccggccagagcacccagcucgggaucgaguuccugaagcggggcgacaaguccgucuacuacacgagcaacccgaccaccuuccaccuggacggggaggugaucaccuucgacaaccucaagacgcugcugucccuccgcgaggugcggaccaucaaggucuucaccaccguggacaacaucaaccugcacacccagguggucgacaugagcaugaccuacggccagcaguucggccccaccuaccuggacggggccgacgugaccaagaucaagccccacaacucccacgagggcaagacguucuacgugcucccgaacgacgacacccugcgcgucgaggccuucgaguacuaccacaccaccgaccccagcuuccuggggcgguacauguccgcccucaaccacacgaagaaguggaaguacccccaggugaacggccugaccagcaucaagugggccgacaacaacugcuaccuggcgaccgcccuccugacccugcagcagaucgagcucaaguucaacccgcccgcccugcaggacgccuacuaccgcgcgcgggccggggaggccgccaacuucugcgcccugauccucgcguacugcaacaagacggugggcgagcugggcgacguccgcgagaccauguccuaccuguuccagcacgccaaccucgacagcugcaagcgggugcugaacgucgugugcaagaccugcgggcagcagcagaccacccugaagggcguggaggccgucauguacauggggacgcucuccuacgagcaguucaagaagggcgugcagauccccugcacgugcgggaagcaggccaccaaguaccuggugcagcaggagagccccuucgucaugauguccgcgcccccggcccaguacgagcugaagcacggcaccuucacgugcgccagcgaguacaccggcaacuaccagugcgggcacuacaagcacaucaccuccaaggagacccucuacugcaucgacggcgcccugcugaccaagagcagcgaguacaaggggcccaucaccgacguguucuacaaggagaacuccuacaccaccacgaucaagcccgugaccuacaagcucgacggcgucgugugcaccgagaucgaccccaagcuggacaacuacuacaagaaggacaacagcuacuucaccgagcagccgaucgaccuggugcccaaccagcccuaccccaacgccuccuucgacaacuucaaguucgucugcgacaacaucaaguucgccgacgaccucaaccagcugacgggguacaagaagccggcgagccgcgagcugaaggugaccuucuuccccgaccucaacggcgacguggucgccaucgacuacaagcacuacacccccuccuucaagaagggcgccaagcugcugcacaagcccaucguguggcacgugaacaacgccaccaacaaggcgacguacaagccgaacaccuggugcauccggugccucuggagcaccaagcccgucgagaccuccaacagcuucgacgugcugaaguccgaggacgcccaggggauggacaaccuggccugcgaggaccucaagcccgugagcgaggaggucguggagaaccccacgauccagaaggacgugcuggagugcaacgucaagaccaccgagguggugggcgacaucauccugaagccggccaacaacucccucaagaucaccgaggaggucgggcacacggaccugauggccgcguacguggacaacagcucccugaccaucaagaagcccaacgagcucagccgcgugcugggccugaagacccucgccacccacgggcuggccgccgucaacuccgugcccugggacacgaucgccaacuacgcgaagccguuccugaacaagguggucagcaccaccaccaacaucgugacgcgcugccucaaccgggugugcaccaacuacaugcccuacuucuucacccugcugcuccagcugugcaccuucacgcgcuccaccaacagccggaucaaggccuccaugcccaccaccaucgccaagaacaccgucaagagcgugggcaaguucugccuggaggccagcuucaacuaccucaagucccccaacuucagcaagcugaucaacaucaucaucugguuccugcuccuguccgugugccugggcagccucaucuacuccacggccgcgcuggggguccugaugagcaaccucggcaugccguccuacugcaccggguaccgcgagggcuaccugaacagcaccaacgugaccaucgccacguacugcaccggcuccauccccugcagcgugugccuguccgggcucgacagccuggacaccuaccccucccuggagaccauccagaucacgaucagcuccuucaagugggaccucaccgccuucggccuggucgccgagugguuccuggccuacauccucuucacccgguucuucuacgugcuggggcuggcggccaucaugcagcuguucuucagcuacuucgccgugcacuucaucuccaacagcuggcucauguggcugaucaucaaccugguccagauggcccccaucuccgcgauggugcgcauguacaucuucuucgccagcuucuacuacguguggaaguccuacguccacgugguggacggcugcaacagcagcacgugcaugaugugcuacaagcggaaccgcgccacgcgggucgagugcaccaccaucgugaacgggguccgccgguccuucuacguguacgccaacggcggcaagggguucugcaagcuccacaacuggaacugcgugaacugcgacaccuucugcgccggcagcacguucaucuccgacgaggucgcgcgcgaccugagccugcaguucaagcggccgaucaaccccaccgaccaguccagcuacaucguggacuccgugaccgucaagaacgggagcauccaccucuacuucgacaaggccggccagaacaccuacgagcgccacucccugagccacuucgugaaccuggacaaccuccgggccaacaacacgaaggggucccugcccaucaacgugaucgucuucgacggcaagagcaagugcgaggaguccagcgccaaguccgccagcguguacuacucccagcugaugugccagcccauccuccugcuggaccaggcgcucgugagcgacgucggcgacagcgccgagguggccgugaagauguucgacgccuacgucaacaccuucuccagcaccuucaacgugccgauggagaagcugaagacccugguggccacggcggaggccgagcucgccaagaacgucucccuggacaacgugcugagcaccuucaucuccgccgcgcgccagggguucguggacagcgacgucgagaccaaggacgugguggagugccucaagcugucccaccagagcgacaucgaggucaccggcgacuccugcaacaacuacaugcugacguacaacaagguggagaacaugacgccccgggaccucggggccugcaucgacugcagcgcccgccacaucaacgcccagguggccaagucccacaacaucgcgcugaucuggaacgucaaggacuucaugagccuguccgagcagcuccggaagcagauccgcagcgccgccaagaagaacaaccugcccuucaagcugaccugcgccaccacccgccagguggugaacgucgugaccaccaagaucgcccucaagggcgggugaggacuagucccuguucccagagcccacuuuuuuuucuuuuuuugaaauaaaauagccugucuuucagaucucaaaggcucuuuucagagccaccaaaaaaaaaaaaaaaaaaaaaaaaaaaaaaaaaaaaaaaaaaaaaaaaaaaaaaaaaaaaaaaaaaaaaaaaaaaaaaaaaaaaaaaaaaaaaaaaaaaaa

SEQ ID NO: 28210 - RNA, 6113 nt, Artificial Sequence
  SARS-CoV-2/Wuhan-Hu-1__NC_045512.2/MN908947.2__non-structural protein 3 (NSP3) mRNA gc (1-1946)(A862S_G1129S)
aggagagucccgcagucggcguccagcggcucugcuuguucgugugugugucguugcaggccuuauucaagcuuaccauggcccccaccaaggugaccuucggcgacgacaccgucaucgaggugcagggguacaagagcgugaacaucaccuucgagcuggacgagcgcaucgacaagguccucaacgagaagugcuccgccuacaccguggagcugggcaccgaggugaacgaguucgcgugcgucguggccgacgccgugaucaagacgcugcagccggucagcgagcuccugacgccccuggggaucgaccucgacgagugguccauggccaccuacuaccuguucgacgagagcggcgaguucaagcuggccucccacauguacugcagcuucuacccgcccgacgaggacgaggaggagggggacugcgaggaggaggaguucgagcccuccacccaguacgaguacggcacggaggacgacuaccagggcaagccccucgaguucggggcgaccagcgccgcccugcagcccgaggaggagcaggaggaggacuggcuggacgacgacucccagcagaccgugggccagcaggacgggagcgaggacaaccagaccacgaccauccagaccaucguggagguccagccccagcucgagauggagcugaccccgguggugcagacgaucgaggucaacuccuucagcggcuaccugaagcucaccgacaacguguacaucaagaacgccgacaucguggaggaggcgaagaaggucaagcccaccgugguggucaacgccgccaacguguaccugaagcacgggggcggcguggccggggcccugaacaaggcgaccaacaacgccaugcaggucgaguccgacgacuacaucgccacgaacggcccccucaaggucgggggcagcugcgugcuguccggccacaaccuggccaagcacugccuccacgugguggggcccaacgucaacaagggcgaggacauccagcugcucaagagcgccuacgagaacuucaaccagcacgaggugcugcuggcgccgcugcucuccgccgggaucuucggcgccgaccccauccacagccugcgggugugcgucgacaccgugcgcaccaacguguaccuggccgucuucgacaagaaccucuacgacaagcugguguccagcuuccuggagaugaaguccgagaagcaggucgagcagaagaucgccgagauccccaaggaggaggugaagcccuucaucaccgagagcaagccgagcguggagcagcggaagcaggacgacaagaagaucaaggcgugcguggaggaggucacgaccacccucgaggagaccaaguuccugacggagaaccugcuccuguacaucgacaucaacgggaaccugcaccccgacuccgccacccucgugagcgacaucgacaucaccuuccugaagaaggacgcccccuacaucgugggcgacgucgugcaggagggcgugcugaccgccgucgugauccccacgaagaaggccgggggcaccaccgagaugcucgcgaaggcccugcgcaaggugccgaccgacaacuacaucacgaccuaccccgggcagggccugaacggguacaccgucgaggaggccaagaccgugcucaagaagugcaaguccgccuucuacauccugcccagcaucaucuccaacgagaagcaggagauccugggcaccgugagcuggaaccugcgggagaugcucgcgcacgccgaggagacgcgcaagcugaugcccgucugcguggagaccaaggccaucguguccaccauccagcggaaguacaagggcaucaagauccaggagggggucguggacuacggcgcccgcuucuacuucuacaccagcaagacgaccguggccucccugaucaacacccucaacgaccugaacgagacccuggucacgaugccgcucggguacgugacccacggccugaaccuggaggaggcggcccgguacaugcgcagccucaaggugcccgccaccgucuccgugagcucccccgacgccgugaccgccuacaacggguaccugacgagcuccagcaagacccccgaggagcacuucaucgagaccaucucccuggcgggcagcuacaaggacuggagcuacuccggccagagcacccagcucgggaucgaguuccugaagcggggcgacaaguccgucuacuacacgagcaacccgaccaccuuccaccuggacggggaggugaucaccuucgacaaccucaagacgcugcugucccuccgcgaggugcggaccaucaaggucuucaccaccguggacaacaucaaccugcacacccagguggucgacaugagcaugaccuacggccagcaguucggccccaccuaccuggacggggccgacgugaccaagaucaagccccacaacucccacgagggcaagacguucuacgugcucccgaacgacgacacccugcgcgucgaggccuucgaguacuaccacaccaccgaccccagcuuccuggggcgguacauguccgcccucaaccacacgaagaaguggaaguacccccaggugaacggccugaccagcaucaagugggccgacaacaacugcuaccuggcgaccagccuccugacccugcagcagaucgagcucaaguucaacccgcccgcccugcaggacgccuacuaccgcgcgcgggccggggaggccgccaacuucugcgcccugauccucgcguacugcaacaagacggugggcgagcugggcgacguccgcgagaccauguccuaccuguuccagcacgccaaccucgacagcugcaagcgggugcugaacgucgugugcaagaccugcgggcagcagcagaccacccugaagggcguggaggccgucauguacauggggacgcucuccuacgagcaguucaagaagggcgugcagauccccugcacgugcgggaagcaggccaccaaguaccuggugcagcaggagagccccuucgucaugauguccgcgcccccggcccaguacgagcugaagcacggcaccuucacgugcgccagcgaguacaccggcaacuaccagugcgggcacuacaagcacaucaccuccaaggagacccucuacugcaucgacggcgcccugcugaccaagagcagcgaguacaaggggcccaucaccgacguguucuacaaggagaacuccuacaccaccacgaucaagcccgugaccuacaagcucgacggcgucgugugcaccgagaucgaccccaagcuggacaacuacuacaagaaggacaacagcuacuucaccgagcagccgaucgaccuggugcccaaccagcccuaccccaacgccuccuucgacaacuucaaguucgucugcgacaacaucaaguucgccgacgaccucaaccagcugacgagcuacaagaagccggcgagccgcgagcugaaggugaccuucuuccccgaccucaacggcgacguggucgccaucgacuacaagcacuacacccccuccuucaagaagggcgccaagcugcugcacaagcccaucguguggcacgugaacaacgccaccaacaaggcgacguacaagccgaacaccuggugcauccggugccucuggagcaccaagcccgucgagaccuccaacagcuucgacgugcugaaguccgaggacgcccaggggauggacaaccuggccugcgaggaccucaagcccgugagcgaggaggucguggagaaccccacgauccagaaggacgugcuggagugcaacgucaagaccaccgagguggugggcgacaucauccugaagccggccaacaacucccucaagaucaccgaggaggucgggcacacggaccugauggccgcguacguggacaacagcucccugaccaucaagaagcccaacgagcucagccgcgugcugggccugaagacccucgccacccacgggcuggccgccgucaacuccgugcccugggacacgaucgccaacuacgcgaagccguuccugaacaagguggucagcaccaccaccaacaucgugacgcgcugccucaaccgggugugcaccaacuacaugcccuacuucuucacccugcugcuccagcugugcaccuucacgcgcuccaccaacagccggaucaaggccuccaugcccaccaccaucgccaagaacaccgucaagagcgugggcaaguucugccuggaggccagcuucaacuaccucaagucccccaacuucagcaagcugaucaacaucaucaucugguuccugcuccuguccgugugccugggcagccucaucuacuccacggccgcgcuggggguccugaugagcaaccucggcaugccguccuacugcaccggguaccgcgagggcuaccugaacagcaccaacgugaccaucgccacguacugcaccggcuccauccccugcagcgugugccuguccgggcucgacagccuggacaccuaccccucccuggagaccauccagaucacgaucagcuccuucaagugggaccucaccgccuucggccuggucgccgagugguuccuggccuacauccucuucacccgguucuucuacgugcuggggcuggcggccaucaugcagcuguucuucagcuacuucgccgugcacuucaucuccaacagcuggcucauguggcugaucaucaaccugguccagauggcccccaucuccgcgauggugcgcauguacaucuucuucgccagcuucuacuacguguggaaguccuacguccacgugguggacggcugcaacagcagcacgugcaugaugugcuacaagcggaaccgcgccacgcgggucgagugcaccaccaucgugaacgggguccgccgguccuucuacguguacgccaacggcggcaagggguucugcaagcuccacaacuggaacugcgugaacugcgacaccuucugcgccggcagcacguucaucuccgacgaggucgcgcgcgaccugagccugcaguucaagcggccgaucaaccccaccgaccaguccagcuacaucguggacuccgugaccgucaagaacgggagcauccaccucuacuucgacaaggccggccagaagaccuacgagcgccacucccugagccacuucgugaaccuggacaaccuccgggccaacaacacgaaggggucccugcccaucaacgugaucgucuucgacggcaagagcaagugcgaggaguccagcgccaaguccgccagcguguacuacucccagcugaugugccagcccauccuccugcuggaccaggcgcucgugagcgacgucggcgacagcgccgagguggccgugaagauguucgacgccuacgucaacaccuucuccagcaccuucaacgugccgauggagaagcugaagacccugguggccacggcggaggccgagcucgccaagaacgucucccuggacaacgugcugagcaccuucaucuccgccgcgcgccagggguucguggacagcgacgucgagaccaaggacgugguggagugccucaagcugucccaccagagcgacaucgaggucaccggcgacuccugcaacaacuacaugcugacguacaacaagguggagaacaugacgccccgggaccucggggccugcaucgacugcagcgcccgccacaucaacgcccagguggccaagucccacaacaucgcgcugaucuggaacgucaaggacuucaugagccuguccgagcagcuccggaagcagauccgcagcgccgccaagaagaacaaccugcccuucaagcugaccugcgccaccacccgccagguggugaacgucgugaccaccaagaucgcccucaagggcgggugaggacuagucccuguucccagagcccacuuuuuuuucuuuuuuugaaauaaaauagccugucuuucagaucucaaaggcucuuuucagagccaccaaaaaaaaaaaaaaaaaaaaaaaaaaaaaaaaaaaaaaaaaaaaaaaaaaaaaaaaaaaaaaaaaaaaaaaaaaaaaaaaaaaaaaaaaaaaaaaaaaaaa

SEQ ID NO: 28211 - RNA, 6113 nt, Artificial Sequence
  SARS-CoV-2/Wuhan-Hu-1__NC_045512.2/MN908947.2__non-structural protein 3 (NSP3) mRNA gc (1-1946)(T1190I_K1772R)
aggagagucccgcagucggcguccagcggcucugcuuguucgugugugugucguugcaggccuuauucaagcuuaccauggcccccaccaaggugaccuucggcgacgacaccgucaucgaggugcagggguacaagagcgugaacaucaccuucgagcuggacgagcgcaucgacaagguccucaacgagaagugcuccgccuacaccguggagcugggcaccgaggugaacgaguucgcgugcgucguggccgacgccgugaucaagacgcugcagccggucagcgagcuccugacgccccuggggaucgaccucgacgagugguccauggccaccuacuaccuguucgacgagagcggcgaguucaagcuggccucccacauguacugcagcuucuacccgcccgacgaggacgaggaggagggggacugcgaggaggaggaguucgagcccuccacccaguacgaguacggcacggaggacgacuaccagggcaagccccucgaguucggggcgaccagcgccgcccugcagcccgaggaggagcaggaggaggacuggcuggacgacgacucccagcagaccgugggccagcaggacgggagcgaggacaaccagaccacgaccauccagaccaucguggagguccagccccagcucgagauggagcugaccccgguggugcagacgaucgaggucaacuccuucagcggcuaccugaagcucaccgacaacguguacaucaagaacgccgacaucguggaggaggcgaagaaggucaagcccaccgugguggucaacgccgccaacguguaccugaagcacgggggcggcguggccggggcccugaacaaggcgaccaacaacgccaugcaggucgaguccgacgacuacaucgccacgaacggcccccucaaggucgggggcagcugcgugcuguccggccacaaccuggccaagcacugccuccacgugguggggcccaacgucaacaagggcgaggacauccagcugcucaagagcgccuacgagaacuucaaccagcacgaggugcugcuggcgccgcugcucuccgccgggaucuucggcgccgaccccauccacagccugcgggugugcgucgacaccgugcgcaccaacguguaccuggccgucuucgacaagaaccucuacgacaagcugguguccagcuuccuggagaugaaguccgagaagcaggucgagcagaagaucgccgagauccccaaggaggaggugaagcccuucaucaccgagagcaagccgagcguggagcagcggaagcaggacgacaagaagaucaaggcgugcguggaggaggucacgaccacccucgaggagaccaaguuccugacggagaaccugcuccuguacaucgacaucaacgggaaccugcaccccgacuccgccacccucgugagcgacaucgacaucaccuuccugaagaaggacgcccccuacaucgugggcgacgucgugcaggagggcgugcugaccgccgucgugauccccacgaagaaggccgggggcaccaccgagaugcucgcgaaggcccugcgcaaggugccgaccgacaacuacaucacgaccuaccccgggcagggccugaacggguacaccgucgaggaggccaagaccgugcucaagaagugcaaguccgccuucuacauccugcccagcaucaucuccaacgagaagcaggagauccugggcaccgugagcuggaaccugcgggagaugcucgcgcacgccgaggagacgcgcaagcugaugcccgucugcguggagaccaaggccaucguguccaccauccagcggaaguacaagggcaucaagauccaggagggggucguggacuacggcgcccgcuucuacuucuacaccagcaagacgaccguggccucccugaucaacacccucaacgaccugaacgagacccuggucacgaugccgcucggguacgugacccacggccugaaccuggaggaggcggcccgguacaugcgcagccucaaggugcccgccaccgucuccgugagcucccccgacgccgugaccgccuacaacggguaccugacgagcuccagcaagacccccgaggagcacuucaucgagaccaucucccuggcgggcagcuacaaggacuggagcuacuccggccagagcacccagcucgggaucgaguuccugaagcggggcgacaaguccgucuacuacacgagcaacccgaccaccuuccaccuggacggggaggugaucaccuucgacaaccucaagacgcugcugucccuccgcgaggugcggaccaucaaggucuucaccaccguggacaacaucaaccugcacacccagguggucgacaugagcaugaccuacggccagcaguucggccccaccuaccuggacggggccgacgugaccaagaucaagccccacaacucccacgagggcaagacguucuacgugcucccgaacgacgacacccugcgcgucgaggccuucgaguacuaccacaccaccgaccccagcuuccuggggcgguacauguccgcccucaaccacacgaagaaguggaaguacccccaggugaacggccugaccagcaucaagugggccgacaacaacugcuaccuggcgaccgcccuccugacccugcagcagaucgagcucaaguucaacccgcccgcccugcaggacgccuacuaccgcgcgcgggccggggaggccgccaacuucugcgcccugauccucgcguacugcaacaagacggugggcgagcugggcgacguccgcgagaccauguccuaccuguuccagcacgccaaccucgacagcugcaagcgggugcugaacgucgugugcaagaccugcgggcagcagcagaccacccugaagggcguggaggccgucauguacauggggacgcucuccuacgagcaguucaagaagggcgugcagauccccugcacgugcgggaagcaggccaccaaguaccuggugcagcaggagagccccuucgucaugauguccgcgcccccggcccaguacgagcugaagcacggcaccuucacgugcgccagcgaguacaccggcaacuaccagugcgggcacuacaagcacaucaccuccaaggagacccucuacugcaucgacggcgcccugcugaccaagagcagcgaguacaaggggcccaucaccgacguguucuacaaggagaacuccuacaccaccacgaucaagcccgugaccuacaagcucgacggcgucgugugcaccgagaucgaccccaagcuggacaacuacuacaagaaggacaacagcuacuucaccgagcagccgaucgaccuggugcccaaccagcccuaccccaacgccuccuucgacaacuucaaguucgucugcgacaacaucaaguucgccgacgaccucaaccagcugacgggguacaagaagccggcgagccgcgagcugaaggugaccuucuuccccgaccucaacggcgacguggucgccaucgacuacaagcacuacacccccuccuucaagaagggcgccaagcugcugcacaagcccaucguguggcacgugaacaacgccaccaacaaggcgacguacaagccgaacaucuggugcauccggugccucuggagcaccaagcccgucgagaccuccaacagcuucgacgugcugaaguccgaggacgcccaggggauggacaaccuggccugcgaggaccucaagcccgugagcgaggaggucguggagaaccccacgauccagaaggacgugcuggagugcaacgucaagaccaccgagguggugggcgacaucauccugaagccggccaacaacucccucaagaucaccgaggaggucgggcacacggaccugauggccgcguacguggacaacagcucccugaccaucaagaagcccaacgagcucagccgcgugcugggccugaagacccucgccacccacgggcuggccgccgucaacuccgugcccugggacacgaucgccaacuacgcgaagccguuccugaacaagguggucagcaccaccaccaacaucgugacgcgcugccucaaccgggugugcaccaacuacaugcccuacuucuucacccugcugcuccagcugugcaccuucacgcgcuccaccaacagccggaucaaggccuccaugcccaccaccaucgccaagaacaccgucaagagcgugggcaaguucugccuggaggccagcuucaacuaccucaagucccccaacuucagcaagcugaucaacaucaucaucugguuccugcuccuguccgugugccugggcagccucaucuacuccacggccgcgcuggggguccugaugagcaaccucggcaugccguccuacugcaccggguaccgcgagggcuaccugaacagcaccaacgugaccaucgccacguacugcaccggcuccauccccugcagcgugugccuguccgggcucgacagccuggacaccuaccccucccuggagaccauccagaucacgaucagcuccuucaagugggaccucaccgccuucggccuggucgccgagugguuccuggccuacauccucuucacccgguucuucuacgugcuggggcuggcggccaucaugcagcuguucuucagcuacuucgccgugcacuucaucuccaacagcuggcucauguggcugaucaucaaccugguccagauggcccccaucuccgcgauggugcgcauguacaucuucuucgccagcuucuacuacguguggaaguccuacguccacgugguggacggcugcaacagcagcacgugcaugaugugcuacaagcggaaccgcgccacgcgggucgagugcaccaccaucgugaacgggguccgccgguccuucuacguguacgccaacggcggcaagggguucugcaagcuccacaacuggaacugcgugaacugcgacaccuucugcgccggcagcacguucaucuccgacgaggucgcgcgcgaccugagccugcaguucaagcggccgaucaaccccaccgaccaguccagcuacaucguggacuccgugaccgucaagaacgggagcauccaccucuacuucgacaaggccggccagaagaccuacgagcgccacucccugagccacuucgugaaccuggacaaccuccgggccaacaacacgaaggggucccugcccaucaacgugaucgucuucgacggcaagagcaagugcgaggaguccagcgccaaguccgccagcguguacuacucccagcugaugugccagcccauccuccugcuggaccaggcgcucgugagcgacgucggcgacagcgccgagguggccgugcgcauguucgacgccuacgucaacaccuucuccagcaccuucaacgugccgauggagaagcugaagacccugguggccacggcggaggccgagcucgccaagaacgucucccuggacaacgugcugagcaccuucaucuccgccgcgcgccagggguucguggacagcgacgucgagaccaaggacgugguggagugccucaagcugucccaccagagcgacaucgaggucaccggcgacuccugcaacaacuacaugcugacguacaacaagguggagaacaugacgccccgggaccucggggccugcaucgacugcagcgcccgccacaucaacgcccagguggccaagucccacaacaucgcgcugaucuggaacgucaaggacuucaugagccuguccgagcagcuccggaagcagauccgcagcgccgccaagaagaacaaccugcccuucaagcugaccugcgccaccacccgccagguggugaacgucgugaccaccaagaucgcccucaagggcgggugaggacuagucccuguucccagagcccacuuuuuuuucuuuuuuugaaauaaaauagccugucuuucagaucucaaaggcucuuuucagagccaccaaaaaaaaaaaaaaaaaaaaaaaaaaaaaaaaaaaaaaaaaaaaaaaaaaaaaaaaaaaaaaaaaaaaaaaaaaaaaaaaaaaaaaaaaaaaaaaaaaaaa

SEQ ID NO: 28212 - RNA, 1778 nt, Artificial Sequence
  SARS-CoV-2/Wuhan-Hu-1__NC_045512.2/MN908947.2/EPI_ISL_402128__non -structural protein 4 (NSP4) mRNA gc (1-501)(V168L_T493I)
aggagagucccgcagucggcguccagcggcucugcuuguucgugugugugucguugcaggccuuauucaagcuuaccaugaagaucgugaacaacuggcugaagcagcucaucaaggucacccugguguuccuguucguggccgccaucuucuaccucaucacccccguccacgugaugagcaagcacacggacuucuccagcgagaucaucggcuacaaggcgaucgacgggggcgugacccgcgacaucgccuccaccgacacgugcuucgccaacaagcacgccgacuucgacaccugguucagccagcggggcggcuccuacaccaacgacaaggccugcccccugaucgcggccgucaucacccgcgaggugggguucgugguccccggccugcccggcaccauccuccggacgaccaacggggacuuccugcacuuccugccccgcguguucagcgccgugggcaacaucugcuacaccccguccaagcucaucgaguacaccgacuucgccacgagcgcgugcguccuggccgccgagugcaccaucuucaaggacgccuccgggaagccccugcccuacugcuacgacaccaacgugcuggagggcagcgucgccuacgagucccuccggcccgacacccgcuacgugcugauggacgggagcaucauccaguucccgaacacguaccuggagggcuccgugcgggucgugaccaccuucgacagcgaguacugccgccacgggaccugcgagcgguccgaggcgggggugugcgucagcacguccggccgcugggugcucaacaacgacuacuaccggagccugcccgggguguucugcggcgucgacgccgugaaccugcucaccaacauguucacgccccugauccagcccaucggcgcccuggacaucuccgccagcaucgucgccgggggcaucguggcgaucguggugaccugccucgccuacuacuucaugcgcuuccggcgcgccuucggggaguacagccacgucguggccuucaacacccugcuguuccucauguccuucaccguccugugccugaccccgguguacagcuuccuccccggcguguacuccgucaucuaccuguaccugaccuucuaccucacgaacgacgugagcuuccuggcccacauccaguggauggugauguucacgccccugguccccuucuggaucaccaucgcguacaucaucugcaucuccaccaagcacuucuacugguucuucagcaacuaccucaagcggcgcgugguguucaacggggucuccuucagcaccuucgaggaggccgcccugugcaccuuccugcucaacaaggagauguaccugaagcugcgguccgacgugcuccugccgcugacccaguacaaccgcuaccucgcccuguacaacaaguacaaguacuucagcggcgccauggacaccacguccuaccgggaggcggccugcugccaccuggccaaggcccucaacgacuucagcaacuccggcagcgacgugcuguaccagccgccccagaucuccaucaccagcgcgguccugcagugaggacuagucccuguucccagagcccacuuuuuuuucuuuuuuugaaauaaaauagccugucuuucagaucucaaaggcucuuuucagagccaccaaaaaaaaaaaaaaaaaaaaaaaaaaaaaaaaaaaaaaaaaaaaaaaaaaaaaaaaaaaaaaaaaaaaaaaaaaaaaaaaaaaaaaaaaaaaaaaaaaaaa

SEQ ID NO: 28213 - RNA, 1778 nt, Artificial Sequence
  SARS-CoV-2/Wuhan-Hu-1__NC_045512.2/MN908947.2/EPI_ISL_402128__non -structural protein 4 (NSP4) mRNA gc (1-501)(F18L)
aggagagucccgcagucggcguccagcggcucugcuuguucgugugugugucguugcaggccuuauucaagcuuaccaugaagaucgugaacaacuggcugaagcagcucaucaaggucacccuggugcugcuguucguggccgccaucuucuaccucaucacccccguccacgugaugagcaagcacacggacuucuccagcgagaucaucggcuacaaggcgaucgacgggggcgugacccgcgacaucgccuccaccgacacgugcuucgccaacaagcacgccgacuucgacaccugguucagccagcggggcggcuccuacaccaacgacaaggccugcccccugaucgcggccgucaucacccgcgaggugggguucgugguccccggccugcccggcaccauccuccggacgaccaacggggacuuccugcacuuccugccccgcguguucagcgccgugggcaacaucugcuacaccccguccaagcucaucgaguacaccgacuucgccacgagcgcgugcguccuggccgccgagugcaccaucuucaaggacgccuccgggaagcccgugcccuacugcuacgacaccaacgugcuggagggcagcgucgccuacgagucccuccggcccgacacccgcuacgugcugauggacgggagcaucauccaguucccgaacacguaccuggagggcuccgugcgggucgugaccaccuucgacagcgaguacugccgccacgggaccugcgagcgguccgaggcgggggugugcgucagcacguccggccgcugggugcucaacaacgacuacuaccggagccugcccgggguguucugcggcgucgacgccgugaaccugcucaccaacauguucacgccccugauccagcccaucggcgcccuggacaucuccgccagcaucgucgccgggggcaucguggcgaucguggugaccugccucgccuacuacuucaugcgcuuccggcgcgccuucggggaguacagccacgucguggccuucaacacccugcuguuccucauguccuucaccguccugugccugaccccgguguacagcuuccuccccggcguguacuccgucaucuaccuguaccugaccuucuaccucacgaacgacgugagcuuccuggcccacauccaguggauggugauguucacgccccugguccccuucuggaucaccaucgcguacaucaucugcaucuccaccaagcacuucuacugguucuucagcaacuaccucaagcggcgcgugguguucaacggggucuccuucagcaccuucgaggaggccgcccugugcaccuuccugcucaacaaggagauguaccugaagcugcgguccgacgugcuccugccgcugacccaguacaaccgcuaccucgcccuguacaacaaguacaaguacuucagcggcgccauggacaccacguccuaccgggaggcggccugcugccaccuggccaaggcccucaacgacuucagcaacuccggcagcgacgugcuguaccagccgccccagaccuccaucaccagcgcgguccugcagugaggacuagucccuguucccagagcccacuuuuuuuucuuuuuuugaaauaaaauagccugucuuucagaucucaaaggcucuuuucagagccaccaaaaaaaaaaaaaaaaaaaaaaaaaaaaaaaaaaaaaaaaaaaaaaaaaaaaaaaaaaaaaaaaaaaaaaaaaaaaaaaaaaaaaaaaaaaaaaaaaaaaa

SEQ ID NO: 28214 - RNA, 1778 nt, Artificial Sequence
  SARS-CoV-2/Wuhan-Hu-1__NC_045512.2/MN908947.2/EPI_ISL_402128__non -structural protein 4 (NSP4) mRNA gc (1-501)(I24T_G179S_S185N_A447V)
aggagagucccgcagucggcguccagcggcucugcuuguucgugugugugucguugcaggccuuauucaagcuuaccaugaagaucgugaacaacuggcugaagcagcucaucaaggucacccugguguuccuguucguggccgccaccuucuaccucaucacccccguccacgugaugagcaagcacacggacuucuccagcgagaucaucggcuacaaggcgaucgacgggggcgugacccgcgacaucgccuccaccgacacgugcuucgccaacaagcacgccgacuucgacaccugguucagccagcggggcggcuccuacaccaacgacaaggccugcccccugaucgcggccgucaucacccgcgaggugggguucgugguccccggccugcccggcaccauccuccggacgaccaacggggacuuccugcacuuccugccccgcguguucagcgccgugggcaacaucugcuacaccccguccaagcucaucgaguacaccgacuucgccacgagcgcgugcguccuggccgccgagugcaccaucuucaaggacgccuccgggaagcccgugcccuacugcuacgacaccaacgugcuggagagcagcgucgccuacgagaaccuccggcccgacacccgcuacgugcugauggacgggagcaucauccaguucccgaacacguaccuggagggcuccgugcgggucgugaccaccuucgacagcgaguacugccgccacgggaccugcgagcgguccgaggcgggggugugcgucagcacguccggccgcugggugcucaacaacgacuacuaccggagccugcccgggguguucugcggcgucgacgccgugaaccugcucaccaacauguucacgccccugauccagcccaucggcgcccuggacaucuccgccagcaucgucgccgggggcaucguggcgaucguggugaccugccucgccuacuacuucaugcgcuuccggcgcgccuucggggaguacagccacgucguggccuucaacacccugcuguuccucauguccuucaccguccugugccugaccccgguguacagcuuccuccccggcguguacuccgucaucuaccuguaccugaccuucuaccucacgaacgacgugagcuuccuggcccacauccaguggauggugauguucacgccccugguccccuucuggaucaccaucgcguacaucaucugcaucuccaccaagcacuucuacugguucuucagcaacuaccucaagcggcgcgugguguucaacggggucuccuucagcaccuucgaggaggccgcccugugcaccuuccugcucaacaaggagauguaccugaagcugcgguccgacgugcuccugccgcugacccaguacaaccgcuaccucgugcuguacaacaaguacaaguacuucagcggcgccauggacaccacguccuaccgggaggcggccugcugccaccuggccaaggcccucaacgacuucagcaacuccggcagcgacgugcuguaccagccgccccagaccuccaucaccagcgcgguccugcagugaggacuagucccuguucccagagcccacuuuuuuuucuuuuuuugaaauaaaauagccugucuuucagaucucaaaggcucuuuucagagccaccaaaaaaaaaaaaaaaaaaaaaaaaaaaaaaaaaaaaaaaaaaaaaaaaaaaaaaaaaaaaaaaaaaaaaaaaaaaaaaaaaaaaaaaaaaaaaaaaaaaaa

SEQ ID NO: 28215 - RNA, 1778 nt, Artificial Sequence
  SARS-CoV-2/Wuhan-Hu-1__NC_045512.2/MN908947.2/EPI_ISL_402128__non -structural protein 4 (NSP4) mRNA gc (1-501)(V168L_A447V_T493I)
aggagagucccgcagucggcguccagcggcucugcuuguucgugugugugucguugcaggccuuauucaagcuuaccaugaagaucgugaacaacuggcugaagcagcucaucaaggucacccugguguuccuguucguggccgccaucuucuaccucaucacccccguccacgugaugagcaagcacacggacuucuccagcgagaucaucggcuacaaggcgaucgacgggggcgugacccgcgacaucgccuccaccgacacgugcuucgccaacaagcacgccgacuucgacaccugguucagccagcggggcggcuccuacaccaacgacaaggccugcccccugaucgcggccgucaucacccgcgaggugggguucgugguccccggccugcccggcaccauccuccggacgaccaacggggacuuccugcacuuccugccccgcguguucagcgccgugggcaacaucugcuacaccccguccaagcucaucgaguacaccgacuucgccacgagcgcgugcguccuggccgccgagugcaccaucuucaaggacgccuccgggaagccccugcccuacugcuacgacaccaacgugcuggagggcagcgucgccuacgagucccuccggcccgacacccgcuacgugcugauggacgggagcaucauccaguucccgaacacguaccuggagggcuccgugcgggucgugaccaccuucgacagcgaguacugccgccacgggaccugcgagcgguccgaggcgggggugugcgucagcacguccggccgcugggugcucaacaacgacuacuaccggagccugcccgggguguucugcggcgucgacgccgugaaccugcucaccaacauguucacgccccugauccagcccaucggcgcccuggacaucuccgccagcaucgucgccgggggcaucguggcgaucguggugaccugccucgccuacuacuucaugcgcuuccggcgcgccuucggggaguacagccacgucguggccuucaacacccugcuguuccucauguccuucaccguccugugccugaccccgguguacagcuuccuccccggcguguacuccgucaucuaccuguaccugaccuucuaccucacgaacgacgugagcuuccuggcccacauccaguggauggugauguucacgccccugguccccuucuggaucaccaucgcguacaucaucugcaucuccaccaagcacuucuacugguucuucagcaacuaccucaagcggcgcgugguguucaacggggucuccuucagcaccuucgaggaggccgcccugugcaccuuccugcucaacaaggagauguaccugaagcugcgguccgacgugcuccugccgcugacccaguacaaccgcuaccucgugcuguacaacaaguacaaguacuucagcggcgccauggacaccacguccuaccgggaggcggccugcugccaccuggccaaggcccucaacgacuucagcaacuccggcagcgacgugcuguaccagccgccccagaucuccaucaccagcgcgguccugcagugaggacuagucccuguucccagagcccacuuuuuuuucuuuuuuugaaauaaaauagccugucuuucagaucucaaaggcucuuuucagagccaccaaaaaaaaaaaaaaaaaaaaaaaaaaaaaaaaaaaaaaaaaaaaaaaaaaaaaaaaaaaaaaaaaaaaaaaaaaaaaaaaaaaaaaaaaaaaaaaaaaaaa

SEQ ID NO: 28216 - RNA, 1778 nt, Artificial Sequence
  SARS-CoV-2/Wuhan-Hu-1__NC_045512.2/MN908947.2/EPI_ISL_402128__non -structural protein 4 (NSP4) mRNA gc (1-501)(Y206H_L265F_T296I_A473S)
aggagagucccgcagucggcguccagcggcucugcuuguucgugugugugucguugcaggccuuauucaagcuuaccaugaagaucgugaacaacuggcugaagcagcucaucaaggucacccugguguuccuguucguggccgccaucuucuaccucaucacccccguccacgugaugagcaagcacacggacuucuccagcgagaucaucggcuacaaggcgaucgacgggggcgugacccgcgacaucgccuccaccgacacgugcuucgccaacaagcacgccgacuucgacaccugguucagccagcggggcggcuccuacaccaacgacaaggccugcccccugaucgcggccgucaucacccgcgaggugggguucgugguccccggccugcccggcaccauccuccggacgaccaacggggacuuccugcacuuccugccccgcguguucagcgccgugggcaacaucugcuacaccccguccaagcucaucgaguacaccgacuucgccacgagcgcgugcguccuggccgccgagugcaccaucuucaaggacgccuccgggaagcccgugcccuacugcuacgacaccaacgugcuggagggcagcgucgccuacgagucccuccggcccgacacccgcuacgugcugauggacgggagcaucauccaguucccgaacacgcaccuggagggcuccgugcgggucgugaccaccuucgacagcgaguacugccgccacgggaccugcgagcgguccgaggcgggggugugcgucagcacguccggccgcugggugcucaacaacgacuacuaccggagccugcccgggguguucugcggcgucgacgccgugaaccuguucaccaacauguucacgccccugauccagcccaucggcgcccuggacaucuccgccagcaucgucgccgggggcaucguggcgaucguggugaucugccucgccuacuacuucaugcgcuuccggcgcgccuucggggaguacagccacgucguggccuucaacacccugcuguuccucauguccuucaccguccugugccugaccccgguguacagcuuccuccccggcguguacuccgucaucuaccuguaccugaccuucuaccucacgaacgacgugagcuuccuggcccacauccaguggauggugauguucacgccccugguccccuucuggaucaccaucgcguacaucaucugcaucuccaccaagcacuucuacugguucuucagcaacuaccucaagcggcgcgugguguucaacggggucuccuucagcaccuucgaggaggccgcccugugcaccuuccugcucaacaaggagauguaccugaagcugcgguccgacgugcuccugccgcugacccaguacaaccgcuaccucgcccuguacaacaaguacaaguacuucagcggcgccauggacaccacguccuaccgggaggcggccugcugccaccugagcaaggcccucaacgacuucagcaacuccggcagcgacgugcuguaccagccgccccagaccuccaucaccagcgcgguccugcagugaggacuagucccuguucccagagcccacuuuuuuuucuuuuuuugaaauaaaauagccugucuuucagaucucaaaggcucuuuucagagccaccaaaaaaaaaaaaaaaaaaaaaaaaaaaaaaaaaaaaaaaaaaaaaaaaaaaaaaaaaaaaaaaaaaaaaaaaaaaaaaaaaaaaaaaaaaaaaaaaaaaaa

SEQ ID NO: 28217 - RNA, 1778 nt, Artificial Sequence
  SARS-CoV-2/Wuhan-Hu-1__NC_045512.2/MN908947.2/EPI_ISL_402128__non -structural protein 4 (NSP4) mRNA gc (1-501)(T174I_A447V)
aggagagucccgcagucggcguccagcggcucugcuuguucgugugugugucguugcaggccuuauucaagcuuaccaugaagaucgugaacaacuggcugaagcagcucaucaaggucacccugguguuccuguucguggccgccaucuucuaccucaucacccccguccacgugaugagcaagcacacggacuucuccagcgagaucaucggcuacaaggcgaucgacgggggcgugacccgcgacaucgccuccaccgacacgugcuucgccaacaagcacgccgacuucgacaccugguucagccagcggggcggcuccuacaccaacgacaaggccugcccccugaucgcggccgucaucacccgcgaggugggguucgugguccccggccugcccggcaccauccuccggacgaccaacggggacuuccugcacuuccugccccgcguguucagcgccgugggcaacaucugcuacaccccguccaagcucaucgaguacaccgacuucgccacgagcgcgugcguccuggccgccgagugcaccaucuucaaggacgccuccgggaagcccgugcccuacugcuacgacaucaacgugcuggagggcagcgucgccuacgagucccuccggcccgacacccgcuacgugcugauggacgggagcaucauccaguucccgaacacguaccuggagggcuccgugcgggucgugaccaccuucgacagcgaguacugccgccacgggaccugcgagcgguccgaggcgggggugugcgucagcacguccggccgcugggugcucaacaacgacuacuaccggagccugcccgggguguucugcggcgucgacgccgugaaccugcucaccaacauguucacgccccugauccagcccaucggcgcccuggacaucuccgccagcaucgucgccgggggcaucguggcgaucguggugaccugccucgccuacuacuucaugcgcuuccggcgcgccuucggggaguacagccacgucguggccuucaacacccugcuguuccucauguccuucaccguccugugccugaccccgguguacagcuuccuccccggcguguacuccgucaucuaccuguaccugaccuucuaccucacgaacgacgugagcuuccuggcccacauccaguggauggugauguucacgccccugguccccuucuggaucaccaucgcguacaucaucugcaucuccaccaagcacuucuacugguucuucagcaacuaccucaagcggcgcgugguguucaacggggucuccuucagcaccuucgaggaggccgcccugugcaccuuccugcucaacaaggagauguaccugaagcugcgguccgacgugcuccugccgcugacccaguacaaccgcuaccucgugcuguacaacaaguacaaguacuucagcggcgccauggacaccacguccuaccgggaggcggccugcugccaccuggccaaggcccucaacgacuucagcaacuccggcagcgacgugcuguaccagccgccccagaccuccaucaccagcgcgguccugcagugaggacuagucccuguucccagagcccacuuuuuuuucuuuuuuugaaauaaaauagccugucuuucagaucucaaaggcucuuuucagagccaccaaaaaaaaaaaaaaaaaaaaaaaaaaaaaaaaaaaaaaaaaaaaaaaaaaaaaaaaaaaaaaaaaaaaaaaaaaaaaaaaaaaaaaaaaaaaaaaaaaaaa

SEQ ID NO: 28218 - RNA, 1778 nt, Artificial Sequence
  SARS-CoV-2/Wuhan-Hu-1__NC_045512.2/MN908947.2/EPI_ISL_402128__non -structural protein 4 (NSP4) mRNA gc (1-501)(T190I_T493I)
aggagagucccgcagucggcguccagcggcucugcuuguucgugugugugucguugcaggccuuauucaagcuuaccaugaagaucgugaacaacuggcugaagcagcucaucaaggucacccugguguuccuguucguggccgccaucuucuaccucaucacccccguccacgugaugagcaagcacacggacuucuccagcgagaucaucggcuacaaggcgaucgacgggggcgugacccgcgacaucgccuccaccgacacgugcuucgccaacaagcacgccgacuucgacaccugguucagccagcggggcggcuccuacaccaacgacaaggccugcccccugaucgcggccgucaucacccgcgaggugggguucgugguccccggccugcccggcaccauccuccggacgaccaacggggacuuccugcacuuccugccccgcguguucagcgccgugggcaacaucugcuacaccccguccaagcucaucgaguacaccgacuucgccacgagcgcgugcguccuggccgccgagugcaccaucuucaaggacgccuccgggaagcccgugcccuacugcuacgacaccaacgugcuggagggcagcgucgccuacgagucccuccggcccgacauccgcuacgugcugauggacgggagcaucauccaguucccgaacacguaccuggagggcuccgugcgggucgugaccaccuucgacagcgaguacugccgccacgggaccugcgagcgguccgaggcgggggugugcgucagcacguccggccgcugggugcucaacaacgacuacuaccggagccugcccgggguguucugcggcgucgacgccgugaaccugcucaccaacauguucacgccccugauccagcccaucggcgcccuggacaucuccgccagcaucgucgccgggggcaucguggcgaucguggugaccugccucgccuacuacuucaugcgcuuccggcgcgccuucggggaguacagccacgucguggccuucaacacccugcuguuccucauguccuucaccguccugugccugaccccgguguacagcuuccuccccggcguguacuccgucaucuaccuguaccugaccuucuaccucacgaacgacgugagcuuccuggcccacauccaguggauggugauguucacgccccugguccccuucuggaucaccaucgcguacaucaucugcaucuccaccaagcacuucuacugguucuucagcaacuaccucaagcggcgcgugguguucaacggggucuccuucagcaccuucgaggaggccgcccugugcaccuuccugcucaacaaggagauguaccugaagcugcgguccgacgugcuccugccgcugacccaguacaaccgcuaccucgcccuguacaacaaguacaaguacuucagcggcgccauggacaccacguccuaccgggaggcggccugcugccaccuggccaaggcccucaacgacuucagcaacuccggcagcgacgugcuguaccagccgccccagaucuccaucaccagcgcgguccugcagugaggacuagucccuguucccagagcccacuuuuuuuucuuuuuuugaaauaaaauagccugucuuucagaucucaaaggcucuuuucagagccaccaaaaaaaaaaaaaaaaaaaaaaaaaaaaaaaaaaaaaaaaaaaaaaaaaaaaaaaaaaaaaaaaaaaaaaaaaaaaaaaaaaaaaaaaaaaaaaaaaaaaa

SEQ ID NO: 28219 - RNA, 1778 nt, Artificial Sequence
  SARS-CoV-2/Wuhan-Hu-1__NC_045512.2/MN908947.2/EPI_ISL_402128__non -structural protein 4 (NSP4) mRNA gc (1-501)(D218N_L439P)
aggagagucccgcagucggcguccagcggcucugcuuguucgugugugugucguugcaggccuuauucaagcuuaccaugaagaucgugaacaacuggcugaagcagcucaucaaggucacccugguguuccuguucguggccgccaucuucuaccucaucacccccguccacgugaugagcaagcacacggacuucuccagcgagaucaucggcuacaaggcgaucgacgggggcgugacccgcgacaucgccuccaccgacacgugcuucgccaacaagcacgccgacuucgacaccugguucagccagcggggcggcuccuacaccaacgacaaggccugcccccugaucgcggccgucaucacccgcgaggugggguucgugguccccggccugcccggcaccauccuccggacgaccaacggggacuuccugcacuuccugccccgcguguucagcgccgugggcaacaucugcuacaccccguccaagcucaucgaguacaccgacuucgccacgagcgcgugcguccuggccgccgagugcaccaucuucaaggacgccuccgggaagcccgugcccuacugcuacgacaccaacgugcuggagggcagcgucgccuacgagucccuccggcccgacacccgcuacgugcugauggacgggagcaucauccaguucccgaacacguaccuggagggcuccgugcgggucgugaccaccuucaacagcgaguacugccgccacgggaccugcgagcgguccgaggcgggggugugcgucagcacguccggccgcugggugcucaacaacgacuacuaccggagccugcccgggguguucugcggcgucgacgccgugaaccugcucaccaacauguucacgccccugauccagcccaucggcgcccuggacaucuccgccagcaucgucgccgggggcaucguggcgaucguggugaccugccucgccuacuacuucaugcgcuuccggcgcgccuucggggaguacagccacgucguggccuucaacacccugcuguuccucauguccuucaccguccugugccugaccccgguguacagcuuccuccccggcguguacuccgucaucuaccuguaccugaccuucuaccucacgaacgacgugagcuuccuggcccacauccaguggauggugauguucacgccccugguccccuucuggaucaccaucgcguacaucaucugcaucuccaccaagcacuucuacugguucuucagcaacuaccucaagcggcgcgugguguucaacggggucuccuucagcaccuucgaggaggccgcccugugcaccuuccugcucaacaaggagauguaccugaagcugcgguccgacgugcuccugccgcccacccaguacaaccgcuaccucgcccuguacaacaaguacaaguacuucagcggcgccauggacaccacguccuaccgggaggcggccugcugccaccuggccaaggcccucaacgacuucagcaacuccggcagcgacgugcuguaccagccgccccagaccuccaucaccagcgcgguccugcagugaggacuagucccuguucccagagcccacuuuuuuuucuuuuuuugaaauaaaauagccugucuuucagaucucaaaggcucuuuucagagccaccaaaaaaaaaaaaaaaaaaaaaaaaaaaaaaaaaaaaaaaaaaaaaaaaaaaaaaaaaaaaaaaaaaaaaaaaaaaaaaaaaaaaaaaaaaaaaaaaaaaaa

SEQ ID NO: 28220 - RNA, 1778 nt, Artificial Sequence
  SARS-CoV-2/Wuhan-Hu-1__NC_045512.2/MN908947.2/EPI_ISL_402128__non -structural protein 4 (NSP4) mRNA gc (1-501)(D218N_D460N)
aggagagucccgcagucggcguccagcggcucugcuuguucgugugugugucguugcaggccuuauucaagcuuaccaugaagaucgugaacaacuggcugaagcagcucaucaaggucacccugguguuccuguucguggccgccaucuucuaccucaucacccccguccacgugaugagcaagcacacggacuucuccagcgagaucaucggcuacaaggcgaucgacgggggcgugacccgcgacaucgccuccaccgacacgugcuucgccaacaagcacgccgacuucgacaccugguucagccagcggggcggcuccuacaccaacgacaaggccugcccccugaucgcggccgucaucacccgcgaggugggguucgugguccccggccugcccggcaccauccuccggacgaccaacggggacuuccugcacuuccugccccgcguguucagcgccgugggcaacaucugcuacaccccguccaagcucaucgaguacaccgacuucgccacgagcgcgugcguccuggccgccgagugcaccaucuucaaggacgccuccgggaagcccgugcccuacugcuacgacaccaacgugcuggagggcagcgucgccuacgagucccuccggcccgacacccgcuacgugcugauggacgggagcaucauccaguucccgaacacguaccuggagggcuccgugcgggucgugaccaccuucaacagcgaguacugccgccacgggaccugcgagcgguccgaggcgggggugugcgucagcacguccggccgcugggugcucaacaacgacuacuaccggagccugcccgggguguucugcggcgucgacgccgugaaccugcucaccaacauguucacgccccugauccagcccaucggcgcccuggacaucuccgccagcaucgucgccgggggcaucguggcgaucguggugaccugccucgccuacuacuucaugcgcuuccggcgcgccuucggggaguacagccacgucguggccuucaacacccugcuguuccucauguccuucaccguccugugccugaccccgguguacagcuuccuccccggcguguacuccgucaucuaccuguaccugaccuucuaccucacgaacgacgugagcuuccuggcccacauccaguggauggugauguucacgccccugguccccuucuggaucaccaucgcguacaucaucugcaucuccaccaagcacuucuacugguucuucagcaacuaccucaagcggcgcgugguguucaacggggucuccuucagcaccuucgaggaggccgcccugugcaccuuccugcucaacaaggagauguaccugaagcugcgguccgacgugcuccugccgcugacccaguacaaccgcuaccucgcccuguacaacaaguacaaguacuucagcggcgccaugaacaccacguccuaccgggaggcggccugcugccaccuggccaaggcccucaacgacuucagcaacuccggcagcgacgugcuguaccagccgccccagaccuccaucaccagcgcgguccugcagugaggacuagucccuguucccagagcccacuuuuuuuucuuuuuuugaaauaaaauagccugucuuucagaucucaaaggcucuuuucagagccaccaaaaaaaaaaaaaaaaaaaaaaaaaaaaaaaaaaaaaaaaaaaaaaaaaaaaaaaaaaaaaaaaaaaaaaaaaaaaaaaaaaaaaaaaaaaaaaaaaaaaa

SEQ ID NO: 28221 - RNA, 1778 nt, Artificial Sequence
  SARS-CoV-2/Wuhan-Hu-1__NC_045512.2/MN908947.2/EPI_ISL_402128__non -structural protein 4 (NSP4) mRNA gc (1-501)(S396T)
aggagagucccgcagucggcguccagcggcucugcuuguucgugugugugucguugcaggccuuauucaagcuuaccaugaagaucgugaacaacuggcugaagcagcucaucaaggucacccugguguuccuguucguggccgccaucuucuaccucaucacccccguccacgugaugagcaagcacacggacuucuccagcgagaucaucggcuacaaggcgaucgacgggggcgugacccgcgacaucgccuccaccgacacgugcuucgccaacaagcacgccgacuucgacaccugguucagccagcggggcggcuccuacaccaacgacaaggccugcccccugaucgcggccgucaucacccgcgaggugggguucgugguccccggccugcccggcaccauccuccggacgaccaacggggacuuccugcacuuccugccccgcguguucagcgccgugggcaacaucugcuacaccccguccaagcucaucgaguacaccgacuucgccacgagcgcgugcguccuggccgccgagugcaccaucuucaaggacgccuccgggaagcccgugcccuacugcuacgacaccaacgugcuggagggcagcgucgccuacgagucccuccggcccgacacccgcuacgugcugauggacgggagcaucauccaguucccgaacacguaccuggagggcuccgugcgggucgugaccaccuucgacagcgaguacugccgccacgggaccugcgagcgguccgaggcgggggugugcgucagcacguccggccgcugggugcucaacaacgacuacuaccggagccugcccgggguguucugcggcgucgacgccgugaaccugcucaccaacauguucacgccccugauccagcccaucggcgcccuggacaucuccgccagcaucgucgccgggggcaucguggcgaucguggugaccugccucgccuacuacuucaugcgcuuccggcgcgccuucggggaguacagccacgucguggccuucaacacccugcuguuccucauguccuucaccguccugugccugaccccgguguacagcuuccuccccggcguguacuccgucaucuaccuguaccugaccuucuaccucacgaacgacgugagcuuccuggcccacauccaguggauggugauguucacgccccugguccccuucuggaucaccaucgcguacaucaucugcaucuccaccaagcacuucuacugguucuucaccaacuaccucaagcggcgcgugguguucaacggggucuccuucagcaccuucgaggaggccgcccugugcaccuuccugcucaacaaggagauguaccugaagcugcgguccgacgugcuccugccgcugacccaguacaaccgcuaccucgcccuguacaacaaguacaaguacuucagcggcgccauggacaccacguccuaccgggaggcggccugcugccaccuggccaaggcccucaacgacuucagcaacuccggcagcgacgugcuguaccagccgccccagaccuccaucaccagcgcgguccugcagugaggacuagucccuguucccagagcccacuuuuuuuucuuuuuuugaaauaaaauagccugucuuucagaucucaaaggcucuuuucagagccaccaaaaaaaaaaaaaaaaaaaaaaaaaaaaaaaaaaaaaaaaaaaaaaaaaaaaaaaaaaaaaaaaaaaaaaaaaaaaaaaaaaaaaaaaaaaaaaaaaaaaa

SEQ ID NO: 28222 - RNA, 1778 nt, Artificial Sequence
  SARS-CoV-2/Wuhan-Hu-1__NC_045512.2/MN908947.2/EPI_ISL_402128__non -structural protein 4 (NSP4) mRNA gc (1-501)(L439P)
aggagagucccgcagucggcguccagcggcucugcuuguucgugugugugucguugcaggccuuauucaagcuuaccaugaagaucgugaacaacuggcugaagcagcucaucaaggucacccugguguuccuguucguggccgccaucuucuaccucaucacccccguccacgugaugagcaagcacacggacuucuccagcgagaucaucggcuacaaggcgaucgacgggggcgugacccgcgacaucgccuccaccgacacgugcuucgccaacaagcacgccgacuucgacaccugguucagccagcggggcggcuccuacaccaacgacaaggccugcccccugaucgcggccgucaucacccgcgaggugggguucgugguccccggccugcccggcaccauccuccggacgaccaacggggacuuccugcacuuccugccccgcguguucagcgccgugggcaacaucugcuacaccccguccaagcucaucgaguacaccgacuucgccacgagcgcgugcguccuggccgccgagugcaccaucuucaaggacgccuccgggaagcccgugcccuacugcuacgacaccaacgugcuggagggcagcgucgccuacgagucccuccggcccgacacccgcuacgugcugauggacgggagcaucauccaguucccgaacacguaccuggagggcuccgugcgggucgugaccaccuucgacagcgaguacugccgccacgggaccugcgagcgguccgaggcgggggugugcgucagcacguccggccgcugggugcucaacaacgacuacuaccggagccugcccgggguguucugcggcgucgacgccgugaaccugcucaccaacauguucacgccccugauccagcccaucggcgcccuggacaucuccgccagcaucgucgccgggggcaucguggcgaucguggugaccugccucgccuacuacuucaugcgcuuccggcgcgccuucggggaguacagccacgucguggccuucaacacccugcuguuccucauguccuucaccguccugugccugaccccgguguacagcuuccuccccggcguguacuccgucaucuaccuguaccugaccuucuaccucacgaacgacgugagcuuccuggcccacauccaguggauggugauguucacgccccugguccccuucuggaucaccaucgcguacaucaucugcaucuccaccaagcacuucuacugguucuucagcaacuaccucaagcggcgcgugguguucaacggggucuccuucagcaccuucgaggaggccgcccugugcaccuuccugcucaacaaggagauguaccugaagcugcgguccgacgugcuccugccgcccacccaguacaaccgcuaccucgcccuguacaacaaguacaaguacuucagcggcgccauggacaccacguccuaccgggaggcggccugcugccaccuggccaaggcccucaacgacuucagcaacuccggcagcgacgugcuguaccagccgccccagaccuccaucaccagcgcgguccugcagugaggacuagucccuguucccagagcccacuuuuuuuucuuuuuuugaaauaaaauagccugucuuucagaucucaaaggcucuuuucagagccaccaaaaaaaaaaaaaaaaaaaaaaaaaaaaaaaaaaaaaaaaaaaaaaaaaaaaaaaaaaaaaaaaaaaaaaaaaaaaaaaaaaaaaaaaaaaaaaaaaaaaa

SEQ ID NO: 28223 - RNA, 1778 nt, Artificial Sequence
  SARS-CoV-2/Wuhan-Hu-1__NC_045512.2/MN908947.2/EPI_ISL_402128__non -structural protein 4 (NSP4) mRNA gc (1-501)(A447V)
aggagagucccgcagucggcguccagcggcucugcuuguucgugugugugucguugcaggccuuauucaagcuuaccaugaagaucgugaacaacuggcugaagcagcucaucaaggucacccugguguuccuguucguggccgccaucuucuaccucaucacccccguccacgugaugagcaagcacacggacuucuccagcgagaucaucggcuacaaggcgaucgacgggggcgugacccgcgacaucgccuccaccgacacgugcuucgccaacaagcacgccgacuucgacaccugguucagccagcggggcggcuccuacaccaacgacaaggccugcccccugaucgcggccgucaucacccgcgaggugggguucgugguccccggccugcccggcaccauccuccggacgaccaacggggacuuccugcacuuccugccccgcguguucagcgccgugggcaacaucugcuacaccccguccaagcucaucgaguacaccgacuucgccacgagcgcgugcguccuggccgccgagugcaccaucuucaaggacgccuccgggaagcccgugcccuacugcuacgacaccaacgugcuggagggcagcgucgccuacgagucccuccggcccgacacccgcuacgugcugauggacgggagcaucauccaguucccgaacacguaccuggagggcuccgugcgggucgugaccaccuucgacagcgaguacugccgccacgggaccugcgagcgguccgaggcgggggugugcgucagcacguccggccgcugggugcucaacaacgacuacuaccggagccugcccgggguguucugcggcgucgacgccgugaaccugcucaccaacauguucacgccccugauccagcccaucggcgcccuggacaucuccgccagcaucgucgccgggggcaucguggcgaucguggugaccugccucgccuacuacuucaugcgcuuccggcgcgccuucggggaguacagccacgucguggccuucaacacccugcuguuccucauguccuucaccguccugugccugaccccgguguacagcuuccuccccggcguguacuccgucaucuaccuguaccugaccuucuaccucacgaacgacgugagcuuccuggcccacauccaguggauggugauguucacgccccugguccccuucuggaucaccaucgcguacaucaucugcaucuccaccaagcacuucuacugguucuucagcaacuaccucaagcggcgcgugguguucaacggggucuccuucagcaccuucgaggaggccgcccugugcaccuuccugcucaacaaggagauguaccugaagcugcgguccgacgugcuccugccgcugacccaguacaaccgcuaccucgugcuguacaacaaguacaaguacuucagcggcgccauggacaccacguccuaccgggaggcggccugcugccaccuggccaaggcccucaacgacuucagcaacuccggcagcgacgugcuguaccagccgccccagaccuccaucaccagcgcgguccugcagugaggacuagucccuguucccagagcccacuuuuuuuucuuuuuuugaaauaaaauagccugucuuucagaucucaaaggcucuuuucagagccaccaaaaaaaaaaaaaaaaaaaaaaaaaaaaaaaaaaaaaaaaaaaaaaaaaaaaaaaaaaaaaaaaaaaaaaaaaaaaaaaaaaaaaaaaaaaaaaaaaaaaa

SEQ ID NO: 28224 - RNA, 1778 nt, Artificial Sequence
  SARS-CoV-2/Wuhan-Hu-1__NC_045512.2/MN908947.2/EPI_ISL_402128__non -structural protein 4 (NSP4) mRNA gc (1-501)(L439P_T493I)
aggagagucccgcagucggcguccagcggcucugcuuguucgugugugugucguugcaggccuuauucaagcuuaccaugaagaucgugaacaacuggcugaagcagcucaucaaggucacccugguguuccuguucguggccgccaucuucuaccucaucacccccguccacgugaugagcaagcacacggacuucuccagcgagaucaucggcuacaaggcgaucgacgggggcgugacccgcgacaucgccuccaccgacacgugcuucgccaacaagcacgccgacuucgacaccugguucagccagcggggcggcuccuacaccaacgacaaggccugcccccugaucgcggccgucaucacccgcgaggugggguucgugguccccggccugcccggcaccauccuccggacgaccaacggggacuuccugcacuuccugccccgcguguucagcgccgugggcaacaucugcuacaccccguccaagcucaucgaguacaccgacuucgccacgagcgcgugcguccuggccgccgagugcaccaucuucaaggacgccuccgggaagcccgugcccuacugcuacgacaccaacgugcuggagggcagcgucgccuacgagucccuccggcccgacacccgcuacgugcugauggacgggagcaucauccaguucccgaacacguaccuggagggcuccgugcgggucgugaccaccuucgacagcgaguacugccgccacgggaccugcgagcgguccgaggcgggggugugcgucagcacguccggccgcugggugcucaacaacgacuacuaccggagccugcccgggguguucugcggcgucgacgccgugaaccugcucaccaacauguucacgccccugauccagcccaucggcgcccuggacaucuccgccagcaucgucgccgggggcaucguggcgaucguggugaccugccucgccuacuacuucaugcgcuuccggcgcgccuucggggaguacagccacgucguggccuucaacacccugcuguuccucauguccuucaccguccugugccugaccccgguguacagcuuccuccccggcguguacuccgucaucuaccuguaccugaccuucuaccucacgaacgacgugagcuuccuggcccacauccaguggauggugauguucacgccccugguccccuucuggaucaccaucgcguacaucaucugcaucuccaccaagcacuucuacugguucuucagcaacuaccucaagcggcgcgugguguucaacggggucuccuucagcaccuucgaggaggccgcccugugcaccuuccugcucaacaaggagauguaccugaagcugcgguccgacgugcuccugccgcccacccaguacaaccgcuaccucgcccuguacaacaaguacaaguacuucagcggcgccauggacaccacguccuaccgggaggcggccugcugccaccuggccaaggcccucaacgacuucagcaacuccggcagcgacgugcuguaccagccgccccagaucuccaucaccagcgcgguccugcagugaggacuagucccuguucccagagcccacuuuuuuuucuuuuuuugaaauaaaauagccugucuuucagaucucaaaggcucuuuucagagccaccaaaaaaaaaaaaaaaaaaaaaaaaaaaaaaaaaaaaaaaaaaaaaaaaaaaaaaaaaaaaaaaaaaaaaaaaaaaaaaaaaaaaaaaaaaaaaaaaaaaaa

SEQ ID NO: 28225 - RNA, 1778 nt, Artificial Sequence
  SARS-CoV-2/Wuhan-Hu-1__NC_045512.2/MN908947.2/EPI_ISL_402128__non -structural protein 4 (NSP4) mRNA gc (1-501)(T115I_S396T)
aggagagucccgcagucggcguccagcggcucugcuuguucgugugugugucguugcaggccuuauucaagcuuaccaugaagaucgugaacaacuggcugaagcagcucaucaaggucacccugguguuccuguucguggccgccaucuucuaccucaucacccccguccacgugaugagcaagcacacggacuucuccagcgagaucaucggcuacaaggcgaucgacgggggcgugacccgcgacaucgccuccaccgacacgugcuucgccaacaagcacgccgacuucgacaccugguucagccagcggggcggcuccuacaccaacgacaaggccugcccccugaucgcggccgucaucacccgcgaggugggguucgugguccccggccugcccggcaccauccuccggacgaucaacggggacuuccugcacuuccugccccgcguguucagcgccgugggcaacaucugcuacaccccguccaagcucaucgaguacaccgacuucgccacgagcgcgugcguccuggccgccgagugcaccaucuucaaggacgccuccgggaagcccgugcccuacugcuacgacaccaacgugcuggagggcagcgucgccuacgagucccuccggcccgacacccgcuacgugcugauggacgggagcaucauccaguucccgaacacguaccuggagggcuccgugcgggucgugaccaccuucgacagcgaguacugccgccacgggaccugcgagcgguccgaggcgggggugugcgucagcacguccggccgcugggugcucaacaacgacuacuaccggagccugcccgggguguucugcggcgucgacgccgugaaccugcucaccaacauguucacgccccugauccagcccaucggcgcccuggacaucuccgccagcaucgucgccgggggcaucguggcgaucguggugaccugccucgccuacuacuucaugcgcuuccggcgcgccuucggggaguacagccacgucguggccuucaacacccugcuguuccucauguccuucaccguccugugccugaccccgguguacagcuuccuccccggcguguacuccgucaucuaccuguaccugaccuucuaccucacgaacgacgugagcuuccuggcccacauccaguggauggugauguucacgccccugguccccuucuggaucaccaucgcguacaucaucugcaucuccaccaagcacuucuacugguucuucaccaacuaccucaagcggcgcgugguguucaacggggucuccuucagcaccuucgaggaggccgcccugugcaccuuccugcucaacaaggagauguaccugaagcugcgguccgacgugcuccugccgcugacccaguacaaccgcuaccucgcccuguacaacaaguacaaguacuucagcggcgccauggacaccacguccuaccgggaggcggccugcugccaccuggccaaggcccucaacgacuucagcaacuccggcagcgacgugcuguaccagccgccccagaccuccaucaccagcgcgguccugcagugaggacuagucccuguucccagagcccacuuuuuuuucuuuuuuugaaauaaaauagccugucuuucagaucucaaaggcucuuuucagagccaccaaaaaaaaaaaaaaaaaaaaaaaaaaaaaaaaaaaaaaaaaaaaaaaaaaaaaaaaaaaaaaaaaaaaaaaaaaaaaaaaaaaaaaaaaaaaaaaaaaaaa

SEQ ID NO: 28226 - RNA, 1778 nt, Artificial Sequence
  SARS-CoV-2/Wuhan-Hu-1__NC_045512.2/MN908947.2/EPI_ISL_402128__non -structural protein 4 (NSP4) mRNA gc (1-501)(K400E_L439P_A447V)
aggagagucccgcagucggcguccagcggcucugcuuguucgugugugugucguugcaggccuuauucaagcuuaccaugaagaucgugaacaacuggcugaagcagcucaucaaggucacccugguguuccuguucguggccgccaucuucuaccucaucacccccguccacgugaugagcaagcacacggacuucuccagcgagaucaucggcuacaaggcgaucgacgggggcgugacccgcgacaucgccuccaccgacacgugcuucgccaacaagcacgccgacuucgacaccugguucagccagcggggcggcuccuacaccaacgacaaggccugcccccugaucgcggccgucaucacccgcgaggugggguucgugguccccggccugcccggcaccauccuccggacgaccaacggggacuuccugcacuuccugccccgcguguucagcgccgugggcaacaucugcuacaccccguccaagcucaucgaguacaccgacuucgccacgagcgcgugcguccuggccgccgagugcaccaucuucaaggacgccuccgggaagcccgugcccuacugcuacgacaccaacgugcuggagggcagcgucgccuacgagucccuccggcccgacacccgcuacgugcugauggacgggagcaucauccaguucccgaacacguaccuggagggcuccgugcgggucgugaccaccuucgacagcgaguacugccgccacgggaccugcgagcgguccgaggcgggggugugcgucagcacguccggccgcugggugcucaacaacgacuacuaccggagccugcccgggguguucugcggcgucgacgccgugaaccugcucaccaacauguucacgccccugauccagcccaucggcgcccuggacaucuccgccagcaucgucgccgggggcaucguggcgaucguggugaccugccucgccuacuacuucaugcgcuuccggcgcgccuucggggaguacagccacgucguggccuucaacacccugcuguuccucauguccuucaccguccugugccugaccccgguguacagcuuccuccccggcguguacuccgucaucuaccuguaccugaccuucuaccucacgaacgacgugagcuuccuggcccacauccaguggauggugauguucacgccccugguccccuucuggaucaccaucgcguacaucaucugcaucuccaccaagcacuucuacugguucuucagcaacuaccucgagcggcgcgugguguucaacggggucuccuucagcaccuucgaggaggccgcccugugcaccuuccugcucaacaaggagauguaccugaagcugcgguccgacgugcuccugccgcccacccaguacaaccgcuaccucgugcuguacaacaaguacaaguacuucagcggcgccauggacaccacguccuaccgggaggcggccugcugccaccuggccaaggcccucaacgacuucagcaacuccggcagcgacgugcuguaccagccgccccagaccuccaucaccagcgcgguccugcagugaggacuagucccuguucccagagcccacuuuuuuuucuuuuuuugaaauaaaauagccugucuuucagaucucaaaggcucuuuucagagccaccaaaaaaaaaaaaaaaaaaaaaaaaaaaaaaaaaaaaaaaaaaaaaaaaaaaaaaaaaaaaaaaaaaaaaaaaaaaaaaaaaaaaaaaaaaaaaaaaaaaaa

SEQ ID NO: 28227 - RNA, 1778 nt, Artificial Sequence
  SARS-CoV-2/Wuhan-Hu-1__NC_045512.2/MN908947.2/EPI_ISL_402128__non -structural protein 4 (NSP4) mRNA gc (1-501)(L448F)
aggagagucccgcagucggcguccagcggcucugcuuguucgugugugugucguugcaggccuuauucaagcuuaccaugaagaucgugaacaacuggcugaagcagcucaucaaggucacccugguguuccuguucguggccgccaucuucuaccucaucacccccguccacgugaugagcaagcacacggacuucuccagcgagaucaucggcuacaaggcgaucgacgggggcgugacccgcgacaucgccuccaccgacacgugcuucgccaacaagcacgccgacuucgacaccugguucagccagcggggcggcuccuacaccaacgacaaggccugcccccugaucgcggccgucaucacccgcgaggugggguucgugguccccggccugcccggcaccauccuccggacgaccaacggggacuuccugcacuuccugccccgcguguucagcgccgugggcaacaucugcuacaccccguccaagcucaucgaguacaccgacuucgccacgagcgcgugcguccuggccgccgagugcaccaucuucaaggacgccuccgggaagcccgugcccuacugcuacgacaccaacgugcuggagggcagcgucgccuacgagucccuccggcccgacacccgcuacgugcugauggacgggagcaucauccaguucccgaacacguaccuggagggcuccgugcgggucgugaccaccuucgacagcgaguacugccgccacgggaccugcgagcgguccgaggcgggggugugcgucagcacguccggccgcugggugcucaacaacgacuacuaccggagccugcccgggguguucugcggcgucgacgccgugaaccugcucaccaacauguucacgccccugauccagcccaucggcgcccuggacaucuccgccagcaucgucgccgggggcaucguggcgaucguggugaccugccucgccuacuacuucaugcgcuuccggcgcgccuucggggaguacagccacgucguggccuucaacacccugcuguuccucauguccuucaccguccugugccugaccccgguguacagcuuccuccccggcguguacuccgucaucuaccuguaccugaccuucuaccucacgaacgacgugagcuuccuggcccacauccaguggauggugauguucacgccccugguccccuucuggaucaccaucgcguacaucaucugcaucuccaccaagcacuucuacugguucuucagcaacuaccucaagcggcgcgugguguucaacggggucuccuucagcaccuucgaggaggccgcccugugcaccuuccugcucaacaaggagauguaccugaagcugcgguccgacgugcuccugccgcugacccaguacaaccgcuaccucgccuucuacaacaaguacaaguacuucagcggcgccauggacaccacguccuaccgggaggcggccugcugccaccuggccaaggcccucaacgacuucagcaacuccggcagcgacgugcuguaccagccgccccagaccuccaucaccagcgcgguccugcagugaggacuagucccuguucccagagcccacuuuuuuuucuuuuuuugaaauaaaauagccugucuuucagaucucaaaggcucuuuucagagccaccaaaaaaaaaaaaaaaaaaaaaaaaaaaaaaaaaaaaaaaaaaaaaaaaaaaaaaaaaaaaaaaaaaaaaaaaaaaaaaaaaaaaaaaaaaaaaaaaaaaaa

SEQ ID NO: 28228 - RNA, 1148 nt, Artificial Sequence
  SARS-CoV-2/Wuhan-Hu-1__NC_045512.2/MN908947.2/EPI_ISL_402128__non -structural protein 6 (NSP6) mRNA gc (1-291)(T78A_V150A_I163V_T182I)
aggagagucccgcagucggcguccagcggcucugcuuguucgugugugugucguugcaggccuuauucaagcuuaccaugagcgccgugaagcgcaccaucaagggcacccaccacuggcugcuccugacgauccugaccucccuccugguccuggugcagagcacccaguggucccucuucuucuuccuguacgagaacgccuuccugcccuucgcgauggggaucaucgccaugagcgccuucgccaugauguucgugaagcacaagcacgccuuccucugccuguuccugcucccgucccuggcggccgucgccuacuucaacaugguguacaugcccgccagcugggugaugcggaucaugacguggcuggacauggucgacaccucccucagcggcuucaagcugaaggacugcgugauguacgccuccgcggugguccugcucauccugaugaccgcccgcaccguguacgacgacggggcccggcgcguguggacgcugaugaacguccucacccuggccuacaagguguacuacggcaacgcccuggaccaggccgugagcaugugggcgcucaucaucuccgucaccagcaacuacuccgggguggugaccaucgucauguuccuggcccggggcaucguguucaugugcguggaguacugccccaucuucuucaucaccggcaacacccugcagugcaucaugcucgucuacugcuuccugggguacuucugcacgugcuacuucggccuguucugccuccugaaccgcuacuuccggcugacccucgggguguacgacuaccuggugagcacccaggaguuccgcuacaugaacucccagggccugcugcccccgaagaacagcaucgacgccuucaagcucaacaucaagcugcucggggucggcggcaagcccugcaucaagguggccaccguccagugaggacuagucccuguucccagagcccacuuuuuuuucuuuuuuugaaauaaaauagccugucuuucagaucucaaaggcucuuuucagagccaccaaaaaaaaaaaaaaaaaaaaaaaaaaaaaaaaaaaaaaaaaaaaaaaaaaaaaaaaaaaaaaaaaaaaaaaaaaaaaaaaaaaaaaaaaaaaaaaaaaaaa

SEQ ID NO: 28229 - RNA, 1139 nt, Artificial Sequence
  SARS-CoV-2/Wuhan-Hu-1__NC_045512.2/MN908947.2/EPI_ISL_402128__non -structural protein 6 (NSP6) mRNA gc (1-291)(S107del_G108del_F109del)
aggagagucccgcagucggcguccagcggcucugcuuguucgugugugugucguugcaggccuuauucaagcuuaccaugagcgccgugaagcgcaccaucaagggcacccaccacuggcugcuccugacgauccugaccucccuccugguccuggugcagagcacccaguggucccucuucuucuuccuguacgagaacgccuuccugcccuucgcgauggggaucaucgccaugagcgccuucgccaugauguucgugaagcacaagcacgccuuccucugccuguuccugcucccgucccuggcgaccgucgccuacuucaacaugguguacaugcccgccagcugggugaugcggaucaugacguggcuggacauggucgacaccucccucaagcugaaggacugcgugauguacgccuccgcggugguccugcucauccugaugaccgcccgcaccguguacgacgacggggcccggcgcguguggacgcugaugaacguccucacccugguguacaagguguacuacggcaacgcccuggaccaggccaucagcaugugggcgcucaucaucuccgucaccagcaacuacuccgggguggugaccacggucauguuccuggcccggggcaucguguucaugugcguggaguacugccccaucuucuucaucaccggcaacacccugcagugcaucaugcucgucuacugcuuccugggguacuucugcacgugcuacuucggccuguucugccuccugaaccgcuacuuccggcugacccucgggguguacgacuaccuggugagcacccaggaguuccgcuacaugaacucccagggccugcugcccccgaagaacagcaucgacgccuucaagcucaacaucaagcugcucggggucggcggcaagcccugcaucaagguggccaccguccagugaggacuagucccuguucccagagcccacuuuuuuuucuuuuuuugaaauaaaauagccugucuuucagaucucaaaggcucuuuucagagccaccaaaaaaaaaaaaaaaaaaaaaaaaaaaaaaaaaaaaaaaaaaaaaaaaaaaaaaaaaaaaaaaaaaaaaaaaaaaaaaaaaaaaaaaaaaaaaaaaaaaaa

SEQ ID NO: 28230 - RNA, 1139 nt, Artificial Sequence
  SARS-CoV-2/Wuhan-Hu-1__NC_045512.2/MN908947.2/EPI_ISL_402128__non -structural protein 6 (NSP6) mRNA gc (1-291)(S107del_G108del_F109del_M165T)
aggagagucccgcagucggcguccagcggcucugcuuguucgugugugugucguugcaggccuuauucaagcuuaccaugagcgccgugaagcgcaccaucaagggcacccaccacuggcugcuccugacgauccugaccucccuccugguccuggugcagagcacccaguggucccucuucuucuuccuguacgagaacgccuuccugcccuucgcgauggggaucaucgccaugagcgccuucgccaugauguucgugaagcacaagcacgccuuccucugccuguuccugcucccgucccuggcgaccgucgccuacuucaacaugguguacaugcccgccagcugggugaugcggaucaugacguggcuggacauggucgacaccucccucaagcugaaggacugcgugauguacgccuccgcggugguccugcucauccugaugaccgcccgcaccguguacgacgacggggcccggcgcguguggacgcugaugaacguccucacccugguguacaagguguacuacggcaacgcccuggaccaggccaucagcaccugggcgcucaucaucuccgucaccagcaacuacuccgggguggugaccacggucauguuccuggcccggggcaucguguucaugugcguggaguacugccccaucuucuucaucaccggcaacacccugcagugcaucaugcucgucuacugcuuccugggguacuucugcacgugcuacuucggccuguucugccuccugaaccgcuacuuccggcugacccucgggguguacgacuaccuggugagcacccaggaguuccgcuacaugaacucccagggccugcugcccccgaagaacagcaucgacgccuucaagcucaacaucaagcugcucggggucggcggcaagcccugcaucaagguggccaccguccagugaggacuagucccuguucccagagcccacuuuuuuuucuuuuuuugaaauaaaauagccugucuuucagaucucaaaggcucuuuucagagccaccaaaaaaaaaaaaaaaaaaaaaaaaaaaaaaaaaaaaaaaaaaaaaaaaaaaaaaaaaaaaaaaaaaaaaaaaaaaaaaaaaaaaaaaaaaaaaaaaaaaaa

SEQ ID NO: 28231 - RNA, 1148 nt, Artificial Sequence
  SARS-CoV-2/Wuhan-Hu-1__NC_045512.2/MN908947.2/EPI_ISL_402128__non -structural protein 6 (NSP6) mRNA gc (1-291)(V27G_L38F_F221L_C222F)
aggagagucccgcagucggcguccagcggcucugcuuguucgugugugugucguugcaggccuuauucaagcuuaccaugagcgccgugaagcgcaccaucaagggcacccaccacuggcugcuccugacgauccugaccucccuccugguccugggccagagcacccaguggucccucuucuucuucuucuacgagaacgccuuccugcccuucgcgauggggaucaucgccaugagcgccuucgccaugauguucgugaagcacaagcacgccuuccucugccuguuccugcucccgucccuggcgaccgucgccuacuucaacaugguguacaugcccgccagcugggugaugcggaucaugacguggcuggacauggucgacaccucccucagcggcuucaagcugaaggacugcgugauguacgccuccgcggugguccugcucauccugaugaccgcccgcaccguguacgacgacggggcccggcgcguguggacgcugaugaacguccucacccugguguacaagguguacuacggcaacgcccuggaccaggccaucagcaugugggcgcucaucaucuccgucaccagcaacuacuccgggguggugaccacggucauguuccuggcccggggcaucguguucaugugcguggaguacugccccaucuucuucaucaccggcaacacccugcagugcaucaugcucgucuacugcuuccugggguaccuguucacgugcuacuucggccuguucugccuccugaaccgcuacuuccggcugacccucgggguguacgacuaccuggugagcacccaggaguuccgcuacaugaacucccagggccugcugcccccgaagaacagcaucgacgccuucaagcucaacaucaagcugcucggggucggcggcaagcccugcaucaagguggccaccguccagugaggacuagucccuguucccagagcccacuuuuuuuucuuuuuuugaaauaaaauagccugucuuucagaucucaaaggcucuuuucagagccaccaaaaaaaaaaaaaaaaaaaaaaaaaaaaaaaaaaaaaaaaaaaaaaaaaaaaaaaaaaaaaaaaaaaaaaaaaaaaaaaaaaaaaaaaaaaaaaaaaaaaa

SEQ ID NO: 28232 - RNA, 1148 nt, Artificial Sequence
  SARS-CoV-2/Wuhan-Hu-1__NC_045512.2/MN908947.2/EPI_ISL_402128__non -structural protein 6 (NSP6) mRNA gc (1-291)(L38F_L126F)
aggagagucccgcagucggcguccagcggcucugcuuguucgugugugugucguugcaggccuuauucaagcuuaccaugagcgccgugaagcgcaccaucaagggcacccaccacuggcugcuccugacgauccugaccucccuccugguccuggugcagagcacccaguggucccucuucuucuucuucuacgagaacgccuuccugcccuucgcgauggggaucaucgccaugagcgccuucgccaugauguucgugaagcacaagcacgccuuccucugccuguuccugcucccgucccuggcgaccgucgccuacuucaacaugguguacaugcccgccagcugggugaugcggaucaugacguggcuggacauggucgacaccucccucagcggcuucaagcugaaggacugcgugauguacgccuccgcggugguccugcucaucuucaugaccgcccgcaccguguacgacgacggggcccggcgcguguggacgcugaugaacguccucacccugguguacaagguguacuacggcaacgcccuggaccaggccaucagcaugugggcgcucaucaucuccgucaccagcaacuacuccgggguggugaccacggucauguuccuggcccggggcaucguguucaugugcguggaguacugccccaucuucuucaucaccggcaacacccugcagugcaucaugcucgucuacugcuuccugggguacuucugcacgugcuacuucggccuguucugccuccugaaccgcuacuuccggcugacccucgggguguacgacuaccuggugagcacccaggaguuccgcuacaugaacucccagggccugcugcccccgaagaacagcaucgacgccuucaagcucaacaucaagcugcucggggucggcggcaagcccugcaucaagguggccaccguccagugaggacuagucccuguucccagagcccacuuuuuuuucuuuuuuugaaauaaaauagccugucuuucagaucucaaaggcucuuuucagagccaccaaaaaaaaaaaaaaaaaaaaaaaaaaaaaaaaaaaaaaaaaaaaaaaaaaaaaaaaaaaaaaaaaaaaaaaaaaaaaaaaaaaaaaaaaaaaaaaaaaaaa

SEQ ID NO: 28233 - RNA, 1139 nt, Artificial Sequence
  SARS-CoV-2/Wuhan-Hu-1__NC_045512.2/MN908947.2/EPI_ISL_402128__non -structural protein 6 (NSP6) mRNA gc (1-291)(S107del_G108del_F109del_L126F)
aggagagucccgcagucggcguccagcggcucugcuuguucgugugugugucguugcaggccuuauucaagcuuaccaugagcgccgugaagcgcaccaucaagggcacccaccacuggcugcuccugacgauccugaccucccuccugguccuggugcagagcacccaguggucccucuucuucuuccuguacgagaacgccuuccugcccuucgcgauggggaucaucgccaugagcgccuucgccaugauguucgugaagcacaagcacgccuuccucugccuguuccugcucccgucccuggcgaccgucgccuacuucaacaugguguacaugcccgccagcugggugaugcggaucaugacguggcuggacauggucgacaccucccucaagcugaaggacugcgugauguacgccuccgcggugguccugcucaucuucaugaccgcccgcaccguguacgacgacggggcccggcgcguguggacgcugaugaacguccucacccugguguacaagguguacuacggcaacgcccuggaccaggccaucagcaugugggcgcucaucaucuccgucaccagcaacuacuccgggguggugaccacggucauguuccuggcccggggcaucguguucaugugcguggaguacugccccaucuucuucaucaccggcaacacccugcagugcaucaugcucgucuacugcuuccugggguacuucugcacgugcuacuucggccuguucugccuccugaaccgcuacuuccggcugacccucgggguguacgacuaccuggugagcacccaggaguuccgcuacaugaacucccagggccugcugcccccgaagaacagcaucgacgccuucaagcucaacaucaagcugcucggggucggcggcaagcccugcaucaagguggccaccguccagugaggacuagucccuguucccagagcccacuuuuuuuucuuuuuuugaaauaaaauagccugucuuucagaucucaaaggcucuuuucagagccaccaaaaaaaaaaaaaaaaaaaaaaaaaaaaaaaaaaaaaaaaaaaaaaaaaaaaaaaaaaaaaaaaaaaaaaaaaaaaaaaaaaaaaaaaaaaaaaaaaaaaa

SEQ ID NO: 28234 - RNA, 1139 nt, Artificial Sequence
  SARS-CoV-2/Wuhan-Hu-1__NC_045512.2/MN908947.2/EPI_ISL_402128__non -structural protein 6 (NSP6) mRNA gc (1-291)(S107del_G108del_F109del_V279I)
aggagagucccgcagucggcguccagcggcucugcuuguucgugugugugucguugcaggccuuauucaagcuuaccaugagcgccgugaagcgcaccaucaagggcacccaccacuggcugcuccugacgauccugaccucccuccugguccuggugcagagcacccaguggucccucuucuucuuccuguacgagaacgccuuccugcccuucgcgauggggaucaucgccaugagcgccuucgccaugauguucgugaagcacaagcacgccuuccucugccuguuccugcucccgucccuggcgaccgucgccuacuucaacaugguguacaugcccgccagcugggugaugcggaucaugacguggcuggacauggucgacaccucccucaagcugaaggacugcgugauguacgccuccgcggugguccugcucauccugaugaccgcccgcaccguguacgacgacggggcccggcgcguguggacgcugaugaacguccucacccugguguacaagguguacuacggcaacgcccuggaccaggccaucagcaugugggcgcucaucaucuccgucaccagcaacuacuccgggguggugaccacggucauguuccuggcccggggcaucguguucaugugcguggaguacugccccaucuucuucaucaccggcaacacccugcagugcaucaugcucgucuacugcuuccugggguacuucugcacgugcuacuucggccuguucugccuccugaaccgcuacuuccggcugacccucgggguguacgacuaccuggugagcacccaggaguuccgcuacaugaacucccagggccugcugcccccgaagaacagcaucgacgccuucaagcucaacaucaagcugcucgggaucggcggcaagcccugcaucaagguggccaccguccagugaggacuagucccuguucccagagcccacuuuuuuuucuuuuuuugaaauaaaauagccugucuuucagaucucaaaggcucuuuucagagccaccaaaaaaaaaaaaaaaaaaaaaaaaaaaaaaaaaaaaaaaaaaaaaaaaaaaaaaaaaaaaaaaaaaaaaaaaaaaaaaaaaaaaaaaaaaaaaaaaaaaaa

SEQ ID NO: 28235 - RNA, 1100 nt, Artificial Sequence
  SARS-CoV-2/Wuhan-Hu-1__NC_045512.2/MN908947.2/EPI_ISL_402128__ORF 3a protein (ORF3a) mRNA gc (1-275)(Q57H_S171L)
aggagagucccgcagucggcguccagcggcucugcuuguucgugugugugucguugcaggccuuauucaagcuuaccauggaccuguucaugcgcaucuucaccaucggcaccgugacgcucaagcagggggagaucaaggacgccacccccagcgacuucguccgggccaccgcgaccaucccgauccaggccucccugcccuucggcuggcugaucguggggguggcccuccuggccgucuuccacagcgccuccaagaucaucacgcugaagaagcgcuggcagcucgcgcugagcaagggcgugcacuucgugugcaaccugcuccugcuguucgucaccguguacucccaccuccugcugguggccgccgggcucgaggcccccuuccuguaccuguacgcgcucgucuacuuccugcagagcaucaacuucgugcggaucaucaugcgccuguggcucugcuggaagugccgguccaagaacccccugcuguacgacgccaacuacuuccucugcuggcacaccaacugcuacgacuacugcaucccguacaacagcgugaccuccagcaucgucaucacgcugggcgacggcaccaccagccccaucuccgagcacgacuaccagaucgggggcuacaccgagaagugggagagcggggugaaggacugcgugguccugcacuccuacuucacgagcgacuacuaccagcuguacuccacccagcucagcaccgacaccggcguggagcacgugacguucuucaucuacaacaagaucgucgacgagcccgaggagcacgugcagauccacaccaucgacggguccagcggcguggucaaccccgugauggagccgaucuacgacgagcccaccaccacgaccagcgugccccugugaggacuagucccuguucccagagcccacuuuuuuuucuuuuuuugaaauaaaauagccugucuuucagaucucaaaggcucuuuucagagccaccaaaaaaaaaaaaaaaaaaaaaaaaaaaaaaaaaaaaaaaaaaaaaaaaaaaaaaaaaaaaaaaaaaaaaaaaaaaaaaaaaaaaaaaaaaaaaaaaaaaaa

SEQ ID NO: 28236 - RNA, 1100 nt, Artificial Sequence
  SARS-CoV-2/Wuhan-Hu-1__NC_045512.2/MN908947.2/EPI_ISL_402128__ORF 3a protein (ORF3a) mRNA gc (1-275)(D155Y_S253P)
aggagagucccgcagucggcguccagcggcucugcuuguucgugugugugucguugcaggccuuauucaagcuuaccauggaccuguucaugcgcaucuucaccaucggcaccgugacgcucaagcagggggagaucaaggacgccacccccagcgacuucguccgggccaccgcgaccaucccgauccaggccucccugcccuucggcuggcugaucguggggguggcccuccuggccgucuuccagagcgccuccaagaucaucacgcugaagaagcgcuggcagcucgcgcugagcaagggcgugcacuucgugugcaaccugcuccugcuguucgucaccguguacucccaccuccugcugguggccgccgggcucgaggcccccuuccuguaccuguacgcgcucgucuacuuccugcagagcaucaacuucgugcggaucaucaugcgccuguggcucugcuggaagugccgguccaagaacccccugcuguacgacgccaacuacuuccucugcuggcacaccaacugcuacuacuacugcaucccguacaacagcgugaccuccagcaucgucaucacguccggcgacggcaccaccagccccaucuccgagcacgacuaccagaucgggggcuacaccgagaagugggagagcggggugaaggacugcgugguccugcacuccuacuucacgagcgacuacuaccagcuguacuccacccagcucagcaccgacaccggcguggagcacgugacguucuucaucuacaacaagaucgucgacgagcccgaggagcacgugcagauccacaccaucgacgggucccccggcguggucaaccccgugauggagccgaucuacgacgagcccaccaccacgaccagcgugccccugugaggacuagucccuguucccagagcccacuuuuuuuucuuuuuuugaaauaaaauagccugucuuucagaucucaaaggcucuuuucagagccaccaaaaaaaaaaaaaaaaaaaaaaaaaaaaaaaaaaaaaaaaaaaaaaaaaaaaaaaaaaaaaaaaaaaaaaaaaaaaaaaaaaaaaaaaaaaaaaaaaaaaa

SEQ ID NO: 28237 - RNA, 1100 nt, Artificial Sequence
  SARS-CoV-2/Wuhan-Hu-1__NC_045512.2/MN908947.2/EPI_ISL_402128__ORF 3a protein (ORF3a) mRNA gc (1-275)(S253P)
aggagagucccgcagucggcguccagcggcucugcuuguucgugugugugucguugcaggccuuauucaagcuuaccauggaccuguucaugcgcaucuucaccaucggcaccgugacgcucaagcagggggagaucaaggacgccacccccagcgacuucguccgggccaccgcgaccaucccgauccaggccucccugcccuucggcuggcugaucguggggguggcccuccuggccgucuuccagagcgccuccaagaucaucacgcugaagaagcgcuggcagcucgcgcugagcaagggcgugcacuucgugugcaaccugcuccugcuguucgucaccguguacucccaccuccugcugguggccgccgggcucgaggcccccuuccuguaccuguacgcgcucgucuacuuccugcagagcaucaacuucgugcggaucaucaugcgccuguggcucugcuggaagugccgguccaagaacccccugcuguacgacgccaacuacuuccucugcuggcacaccaacugcuacgacuacugcaucccguacaacagcgugaccuccagcaucgucaucacguccggcgacggcaccaccagccccaucuccgagcacgacuaccagaucgggggcuacaccgagaagugggagagcggggugaaggacugcgugguccugcacuccuacuucacgagcgacuacuaccagcuguacuccacccagcucagcaccgacaccggcguggagcacgugacguucuucaucuacaacaagaucgucgacgagcccgaggagcacgugcagauccacaccaucgacgggucccccggcguggucaaccccgugauggagccgaucuacgacgagcccaccaccacgaccagcgugccccugugaggacuagucccuguucccagagcccacuuuuuuuucuuuuuuugaaauaaaauagccugucuuucagaucucaaaggcucuuuucagagccaccaaaaaaaaaaaaaaaaaaaaaaaaaaaaaaaaaaaaaaaaaaaaaaaaaaaaaaaaaaaaaaaaaaaaaaaaaaaaaaaaaaaaaaaaaaaaaaaaaaaaa

SEQ ID NO: 28238 - RNA, 1100 nt, Artificial Sequence
  SARS-CoV-2/Wuhan-Hu-1__NC_045512.2/MN908947.2/EPI_ISL_402128__ORF 3a protein (ORF3a) mRNA gc (1-275)(L15F_W131C_T151I)
aggagagucccgcagucggcguccagcggcucugcuuguucgugugugugucguugcaggccuuauucaagcuuaccauggaccuguucaugcgcaucuucaccaucggcaccgugacguucaagcagggggagaucaaggacgccacccccagcgacuucguccgggccaccgcgaccaucccgauccaggccucccugcccuucggcuggcugaucguggggguggcccuccuggccgucuuccagagcgccuccaagaucaucacgcugaagaagcgcuggcagcucgcgcugagcaagggcgugcacuucgugugcaaccugcuccugcuguucgucaccguguacucccaccuccugcugguggccgccgggcucgaggcccccuuccuguaccuguacgcgcucgucuacuuccugcagagcaucaacuucgugcggaucaucaugcgccuguggcucugcugcaagugccgguccaagaacccccugcuguacgacgccaacuacuuccucugcuggcacaucaacugcuacgacuacugcaucccguacaacagcgugaccuccagcaucgucaucacguccggcgacggcaccaccagccccaucuccgagcacgacuaccagaucgggggcuacaccgagaagugggagagcggggugaaggacugcgugguccugcacuccuacuucacgagcgacuacuaccagcuguacuccacccagcucagcaccgacaccggcguggagcacgugacguucuucaucuacaacaagaucgucgacgagcccgaggagcacgugcagauccacaccaucgacggguccagcggcguggucaaccccgugauggagccgaucuacgacgagcccaccaccacgaccagcgugccccugugaggacuagucccuguucccagagcccacuuuuuuuucuuuuuuugaaauaaaauagccugucuuucagaucucaaaggcucuuuucagagccaccaaaaaaaaaaaaaaaaaaaaaaaaaaaaaaaaaaaaaaaaaaaaaaaaaaaaaaaaaaaaaaaaaaaaaaaaaaaaaaaaaaaaaaaaaaaaaaaaaaaaa

SEQ ID NO: 28239 - RNA, 1100 nt, Artificial Sequence
  SARS-CoV-2/Wuhan-Hu-1__NC_045512.2/MN908947.2/EPI_ISL_402128__ORF 3a protein (ORF3a) mRNA gc (1-275)(P42L_Q57H)
aggagagucccgcagucggcguccagcggcucugcuuguucgugugugugucguugcaggccuuauucaagcuuaccauggaccuguucaugcgcaucuucaccaucggcaccgugacgcucaagcagggggagaucaaggacgccacccccagcgacuucguccgggccaccgcgaccaucccgauccaggccucccugcuguucggcuggcugaucguggggguggcccuccuggccgucuuccacagcgccuccaagaucaucacgcugaagaagcgcuggcagcucgcgcugagcaagggcgugcacuucgugugcaaccugcuccugcuguucgucaccguguacucccaccuccugcugguggccgccgggcucgaggcccccuuccuguaccuguacgcgcucgucuacuuccugcagagcaucaacuucgugcggaucaucaugcgccuguggcucugcuggaagugccgguccaagaacccccugcuguacgacgccaacuacuuccucugcuggcacaccaacugcuacgacuacugcaucccguacaacagcgugaccuccagcaucgucaucacguccggcgacggcaccaccagccccaucuccgagcacgacuaccagaucgggggcuacaccgagaagugggagagcggggugaaggacugcgugguccugcacuccuacuucacgagcgacuacuaccagcuguacuccacccagcucagcaccgacaccggcguggagcacgugacguucuucaucuacaacaagaucgucgacgagcccgaggagcacgugcagauccacaccaucgacggguccagcggcguggucaaccccgugauggagccgaucuacgacgagcccaccaccacgaccagcgugccccugugaggacuagucccuguucccagagcccacuuuuuuuucuuuuuuugaaauaaaauagccugucuuucagaucucaaaggcucuuuucagagccaccaaaaaaaaaaaaaaaaaaaaaaaaaaaaaaaaaaaaaaaaaaaaaaaaaaaaaaaaaaaaaaaaaaaaaaaaaaaaaaaaaaaaaaaaaaaaaaaaaaaaa

SEQ ID NO: 28240 - RNA, 1097 nt, Artificial Sequence
  SARS-CoV-2/Wuhan-Hu-1__NC_045512.2/MN908947.2/EPI_ISL_402128__ORF 3a protein (ORF3a) mRNA gc (1-275)(Q57H_N257del)
aggagagucccgcagucggcguccagcggcucugcuuguucgugugugugucguugcaggccuuauucaagcuuaccauggaccuguucaugcgcaucuucaccaucggcaccgugacgcucaagcagggggagaucaaggacgccacccccagcgacuucguccgggccaccgcgaccaucccgauccaggccucccugcccuucggcuggcugaucguggggguggcccuccuggccgucuuccacagcgccuccaagaucaucacgcugaagaagcgcuggcagcucgcgcugagcaagggcgugcacuucgugugcaaccugcuccugcuguucgucaccguguacucccaccuccugcugguggccgccgggcucgaggcccccuuccuguaccuguacgcgcucgucuacuuccugcagagcaucaacuucgugcggaucaucaugcgccuguggcucugcuggaagugccgguccaagaacccccugcuguacgacgccaacuacuuccucugcuggcacaccaacugcuacgacuacugcaucccguacaacagcgugaccuccagcaucgucaucacguccggcgacggcaccaccagccccaucuccgagcacgacuaccagaucgggggcuacaccgagaagugggagagcggggugaaggacugcgugguccugcacuccuacuucacgagcgacuacuaccagcuguacuccacccagcucagcaccgacaccggcguggagcacgugacguucuucaucuacaacaagaucgucgacgagcccgaggagcacgugcagauccacaccaucgacggguccagcggcgugguccccgugauggagccgaucuacgacgagcccaccaccacgaccagcgugccccugugaggacuagucccuguucccagagcccacuuuuuuuucuuuuuuugaaauaaaauagccugucuuucagaucucaaaggcucuuuucagagccaccaaaaaaaaaaaaaaaaaaaaaaaaaaaaaaaaaaaaaaaaaaaaaaaaaaaaaaaaaaaaaaaaaaaaaaaaaaaaaaaaaaaaaaaaaaaaaaaaaaaaa

SEQ ID NO: 28241 - RNA, 1097 nt, Artificial Sequence
  SARS-CoV-2/Wuhan-Hu-1__NC_045512.2/MN908947.2/EPI_ISL_402128__ORF 3a protein (ORF3a) mRNA gc (1-275)(N257del)
aggagagucccgcagucggcguccagcggcucugcuuguucgugugugugucguugcaggccuuauucaagcuuaccauggaccuguucaugcgcaucuucaccaucggcaccgugacgcucaagcagggggagaucaaggacgccacccccagcgacuucguccgggccaccgcgaccaucccgauccaggccucccugcccuucggcuggcugaucguggggguggcccuccuggccgucuuccagagcgccuccaagaucaucacgcugaagaagcgcuggcagcucgcgcugagcaagggcgugcacuucgugugcaaccugcuccugcuguucgucaccguguacucccaccuccugcugguggccgccgggcucgaggcccccuuccuguaccuguacgcgcucgucuacuuccugcagagcaucaacuucgugcggaucaucaugcgccuguggcucugcuggaagugccgguccaagaacccccugcuguacgacgccaacuacuuccucugcuggcacaccaacugcuacgacuacugcaucccguacaacagcgugaccuccagcaucgucaucacguccggcgacggcaccaccagccccaucuccgagcacgacuaccagaucgggggcuacaccgagaagugggagagcggggugaaggacugcgugguccugcacuccuacuucacgagcgacuacuaccagcuguacuccacccagcucagcaccgacaccggcguggagcacgugacguucuucaucuacaacaagaucgucgacgagcccgaggagcacgugcagauccacaccaucgacggguccagcggcgugguccccgugauggagccgaucuacgacgagcccaccaccacgaccagcgugccccugugaggacuagucccuguucccagagcccacuuuuuuuucuuuuuuugaaauaaaauagccugucuuucagaucucaaaggcucuuuucagagccaccaaaaaaaaaaaaaaaaaaaaaaaaaaaaaaaaaaaaaaaaaaaaaaaaaaaaaaaaaaaaaaaaaaaaaaaaaaaaaaaaaaaaaaaaaaaaaaaaaaaaa

SEQ ID NO: 28242 - RNA, 1100 nt, Artificial Sequence
  SARS-CoV-2/Wuhan-Hu-1__NC_045512.2/MN908947.2/EPI_ISL_402128__ORF 3a protein (ORF3a) mRNA gc (1-275)(P42L_Q57H_P104L)
aggagagucccgcagucggcguccagcggcucugcuuguucgugugugugucguugcaggccuuauucaagcuuaccauggaccuguucaugcgcaucuucaccaucggcaccgugacgcucaagcagggggagaucaaggacgccacccccagcgacuucguccgggccaccgcgaccaucccgauccaggccucccugcuguucggcuggcugaucguggggguggcccuccuggccgucuuccacagcgccuccaagaucaucacgcugaagaagcgcuggcagcucgcgcugagcaagggcgugcacuucgugugcaaccugcuccugcuguucgucaccguguacucccaccuccugcugguggccgccgggcucgaggcccuguuccuguaccuguacgcgcucgucuacuuccugcagagcaucaacuucgugcggaucaucaugcgccuguggcucugcuggaagugccgguccaagaacccccugcuguacgacgccaacuacuuccucugcuggcacaccaacugcuacgacuacugcaucccguacaacagcgugaccuccagcaucgucaucacguccggcgacggcaccaccagccccaucuccgagcacgacuaccagaucgggggcuacaccgagaagugggagagcggggugaaggacugcgugguccugcacuccuacuucacgagcgacuacuaccagcuguacuccacccagcucagcaccgacaccggcguggagcacgugacguucuucaucuacaacaagaucgucgacgagcccgaggagcacgugcagauccacaccaucgacggguccagcggcguggucaaccccgugauggagccgaucuacgacgagcccaccaccacgaccagcgugccccugugaggacuagucccuguucccagagcccacuuuuuuuucuuuuuuugaaauaaaauagccugucuuucagaucucaaaggcucuuuucagagccaccaaaaaaaaaaaaaaaaaaaaaaaaaaaaaaaaaaaaaaaaaaaaaaaaaaaaaaaaaaaaaaaaaaaaaaaaaaaaaaaaaaaaaaaaaaaaaaaaaaaaa

SEQ ID NO: 28243 - RNA, 638 nt, Artificial Sequence
  SARS-CoV-2/Wuhan-Hu-1__NC_045512.2/MN908947.2/EPI_ISL_402128__ORF 8 protein (ORF8) mRNA gc (1-121)(R52I_Y73C)
aggagagucccgcagucggcguccagcggcucugcuuguucgugugugugucguugcaggccuuauucaagcuuaccaugaaguuccugguguuccucggcaucaucaccaccgucgccgccuuccaccaggagugcagccugcaguccugcacgcagcaccagcccuacgugguggacgacccgugccccauccacuucuacagcaagugguacauccgcgucggggccaucaaguccgcgccccugaucgagcucugcguggacgaggccggcagcaagucccccauccagugcaucgacaucgggaacuacaccgugagcugccugccguucaccaucaacugccaggagcccaagcugggcucccucgucgugcgcugcagcuucuacgaggacuuccuggaguaccacgacgugcgggucgugcuggacuucaucugaggacuagucccuguucccagagcccacuuuuuuuucuuuuuuugaaauaaaauagccugucuuucagaucucaaaggcucuuuucagagccaccaaaaaaaaaaaaaaaaaaaaaaaaaaaaaaaaaaaaaaaaaaaaaaaaaaaaaaaaaaaaaaaaaaaaaaaaaaaaaaaaaaaaaaaaaaaaaaaaaaaaa

SEQ ID NO: 28244 - RNA, 638 nt, Artificial Sequence
  SARS-CoV-2/Wuhan-Hu-1__NC_045512.2/MN908947.2/EPI_ISL_402128__ORF 8 protein (ORF8) mRNA gc (1-121)(E92K)
aggagagucccgcagucggcguccagcggcucugcuuguucgugugugugucguugcaggccuuauucaagcuuaccaugaaguuccugguguuccucggcaucaucaccaccgucgccgccuuccaccaggagugcagccugcaguccugcacgcagcaccagcccuacgugguggacgacccgugccccauccacuucuacagcaagugguacauccgcgucggggcccggaaguccgcgccccugaucgagcucugcguggacgaggccggcagcaagucccccauccaguacaucgacaucgggaacuacaccgugagcugccugccguucaccaucaacugccagaagcccaagcugggcucccucgucgugcgcugcagcuucuacgaggacuuccuggaguaccacgacgugcgggucgugcuggacuucaucugaggacuagucccuguucccagagcccacuuuuuuuucuuuuuuugaaauaaaauagccugucuuucagaucucaaaggcucuuuucagagccaccaaaaaaaaaaaaaaaaaaaaaaaaaaaaaaaaaaaaaaaaaaaaaaaaaaaaaaaaaaaaaaaaaaaaaaaaaaaaaaaaaaaaaaaaaaaaaaaaaaaaa

SEQ ID NO: 28245 - RNA, 632 nt, Artificial Sequence
  SARS-CoV-2/Wuhan-Hu-1__NC_045512.2/MN908947.2/EPI_ISL_402128__ORF 8 protein (ORF8) mRNA gc (1-121)(D119I_F120del_I121del)
aggagagucccgcagucggcguccagcggcucugcuuguucgugugugugucguugcaggccuuauucaagcuuaccaugaaguuccugguguuccucggcaucaucaccaccgucgccgccuuccaccaggagugcagccugcaguccugcacgcagcaccagcccuacgugguggacgacccgugccccauccacuucuacagcaagugguacauccgcgucggggcccggaaguccgcgccccugaucgagcucugcguggacgaggccggcagcaagucccccauccaguacaucgacaucgggaacuacaccgugagcugccugccguucaccaucaacugccaggagcccaagcugggcucccucgucgugcgcugcagcuucuacgaggacuuccuggaguaccacgacgugcgggucgugcugaucugaggacuagucccuguucccagagcccacuuuuuuuucuuuuuuugaaauaaaauagccugucuuucagaucucaaaggcucuuuucagagccaccaaaaaaaaaaaaaaaaaaaaaaaaaaaaaaaaaaaaaaaaaaaaaaaaaaaaaaaaaaaaaaaaaaaaaaaaaaaaaaaaaaaaaaaaaaaaaaaaaaaaa

SEQ ID NO: 28246 - RNA, 638 nt, Artificial Sequence
  SARS-CoV-2/Wuhan-Hu-1__NC_045512.2/MN908947.2/EPI_ISL_402128__ORF 8 protein (ORF8) mRNA gc (1-121)(K44R_F120V_I121L)
aggagagucccgcagucggcguccagcggcucugcuuguucgugugugugucguugcaggccuuauucaagcuuaccaugaaguuccugguguuccucggcaucaucaccaccgucgccgccuuccaccaggagugcagccugcaguccugcacgcagcaccagcccuacgugguggacgacccgugccccauccacuucuacagccgcugguacauccgcgucggggcccggaaguccgcgccccugaucgagcucugcguggacgaggccggcagcaagucccccauccaguacaucgacaucgggaacuacaccgugagcugccugccguucaccaucaacugccaggagcccaagcugggcucccucgucgugcgcugcagcuucuacgaggacuuccuggaguaccacgacgugcgggucgugcuggacgugcugugaggacuagucccuguucccagagcccacuuuuuuuucuuuuuuugaaauaaaauagccugucuuucagaucucaaaggcucuuuucagagccaccaaaaaaaaaaaaaaaaaaaaaaaaaaaaaaaaaaaaaaaaaaaaaaaaaaaaaaaaaaaaaaaaaaaaaaaaaaaaaaaaaaaaaaaaaaaaaaaaaaaaa

SEQ ID NO: 28247 - RNA, 638 nt, Artificial Sequence
  SARS-CoV-2/Wuhan-Hu-1__NC_045512.2/MN908947.2/EPI_ISL_402128__ORF 8 protein (ORF8) mRNA gc (1-121)(K2Q)
aggagagucccgcagucggcguccagcggcucugcuuguucgugugugugucguugcaggccuuauucaagcuuaccaugcaguuccugguguuccucggcaucaucaccaccgucgccgccuuccaccaggagugcagccugcaguccugcacgcagcaccagcccuacgugguggacgacccgugccccauccacuucuacagcaagugguacauccgcgucggggcccggaaguccgcgccccugaucgagcucugcguggacgaggccggcagcaagucccccauccaguacaucgacaucgggaacuacaccgugagcugccugccguucaccaucaacugccaggagcccaagcugggcucccucgucgugcgcugcagcuucuacgaggacuuccuggaguaccacgacgugcgggucgugcuggacuucaucugaggacuagucccuguucccagagcccacuuuuuuuucuuuuuuugaaauaaaauagccugucuuucagaucucaaaggcucuuuucagagccaccaaaaaaaaaaaaaaaaaaaaaaaaaaaaaaaaaaaaaaaaaaaaaaaaaaaaaaaaaaaaaaaaaaaaaaaaaaaaaaaaaaaaaaaaaaaaaaaaaaaaa

SEQ ID NO: 28248 - RNA, 638 nt, Artificial Sequence
  SARS-CoV-2/Wuhan-Hu-1__NC_045512.2/MN908947.2/EPI_ISL_402128__ORF 8 protein (ORF8) mRNA gc (1-121)(T11I)
aggagagucccgcagucggcguccagcggcucugcuuguucgugugugugucguugcaggccuuauucaagcuuaccaugaaguuccugguguuccucggcaucaucaucaccgucgccgccuuccaccaggagugcagccugcaguccugcacgcagcaccagcccuacgugguggacgacccgugccccauccacuucuacagcaagugguacauccgcgucggggcccggaaguccgcgccccugaucgagcucugcguggacgaggccggcagcaagucccccauccaguacaucgacaucgggaacuacaccgugagcugccugccguucaccaucaacugccaggagcccaagcugggcucccucgucgugcgcugcagcuucuacgaggacuuccuggaguaccacgacgugcgggucgugcuggacuucaucugaggacuagucccuguucccagagcccacuuuuuuuucuuuuuuugaaauaaaauagccugucuuucagaucucaaaggcucuuuucagagccaccaaaaaaaaaaaaaaaaaaaaaaaaaaaaaaaaaaaaaaaaaaaaaaaaaaaaaaaaaaaaaaaaaaaaaaaaaaaaaaaaaaaaaaaaaaaaaaaaaaaaa

SEQ ID NO: 28249 - RNA, 638 nt, Artificial Sequence
  SARS-CoV-2/Wuhan-Hu-1__NC_045512.2/MN908947.2/EPI_ISL_402128__ORF 8 protein (ORF8) mRNA gc (1-121)(T11K_P38S_S67F)
aggagagucccgcagucggcguccagcggcucugcuuguucgugugugugucguugcaggccuuauucaagcuuaccaugaaguuccugguguuccucggcaucaucaagaccgucgccgccuuccaccaggagugcagccugcaguccugcacgcagcaccagcccuacgugguggacgacccgugcagcauccacuucuacagcaagugguacauccgcgucggggcccggaaguccgcgccccugaucgagcucugcguggacgaggccggcuucaagucccccauccaguacaucgacaucgggaacuacaccgugagcugccugccguucaccaucaacugccaggagcccaagcugggcucccucgucgugcgcugcagcuucuacgaggacuuccuggaguaccacgacgugcgggucgugcuggacuucaucugaggacuagucccuguucccagagcccacuuuuuuuucuuuuuuugaaauaaaauagccugucuuucagaucucaaaggcucuuuucagagccaccaaaaaaaaaaaaaaaaaaaaaaaaaaaaaaaaaaaaaaaaaaaaaaaaaaaaaaaaaaaaaaaaaaaaaaaaaaaaaaaaaaaaaaaaaaaaaaaaaaaaa

SEQ ID NO: 28250 - RNA, 638 nt, Artificial Sequence
  SARS-CoV-2/Wuhan-Hu-1__NC_045512.2/MN908947.2/EPI_ISL_402128__ORF 8 protein (ORF8) mRNA gc (1-121)(T26I)
aggagagucccgcagucggcguccagcggcucugcuuguucgugugugugucguugcaggccuuauucaagcuuaccaugaaguuccugguguuccucggcaucaucaccaccgucgccgccuuccaccaggagugcagccugcaguccugcauccagcaccagcccuacgugguggacgacccgugccccauccacuucuacagcaagugguacauccgcgucggggcccggaaguccgcgccccugaucgagcucugcguggacgaggccggcagcaagucccccauccaguacaucgacaucgggaacuacaccgugagcugccugccguucaccaucaacugccaggagcccaagcugggcucccucgucgugcgcugcagcuucuacgaggacuuccuggaguaccacgacgugcgggucgugcuggacuucaucugaggacuagucccuguucccagagcccacuuuuuuuucuuuuuuugaaauaaaauagccugucuuucagaucucaaaggcucuuuucagagccaccaaaaaaaaaaaaaaaaaaaaaaaaaaaaaaaaaaaaaaaaaaaaaaaaaaaaaaaaaaaaaaaaaaaaaaaaaaaaaaaaaaaaaaaaaaaaaaaaaaaaa

SEQ ID NO: 28251 - RNA, 638 nt, Artificial Sequence
  SARS-CoV-2/Wuhan-Hu-1__NC_045512.2/MN908947.2/EPI_ISL_402128__ORF 8 protein (ORF8) mRNA gc (1-121)(F3Y)
aggagagucccgcagucggcguccagcggcucugcuuguucgugugugugucguugcaggccuuauucaagcuuaccaugaaguaccugguguuccucggcaucaucaccaccgucgccgccuuccaccaggagugcagccugcaguccugcacgcagcaccagcccuacgugguggacgacccgugccccauccacuucuacagcaagugguacauccgcgucggggcccggaaguccgcgccccugaucgagcucugcguggacgaggccggcagcaagucccccauccaguacaucgacaucgggaacuacaccgugagcugccugccguucaccaucaacugccaggagcccaagcugggcucccucgucgugcgcugcagcuucuacgaggacuuccuggaguaccacgacgugcgggucgugcuggacuucaucugaggacuagucccuguucccagagcccacuuuuuuuucuuuuuuugaaauaaaauagccugucuuucagaucucaaaggcucuuuucagagccaccaaaaaaaaaaaaaaaaaaaaaaaaaaaaaaaaaaaaaaaaaaaaaaaaaaaaaaaaaaaaaaaaaaaaaaaaaaaaaaaaaaaaaaaaaaaaaaaaaaaaa

SEQ ID NO: 28252 - RNA, 638 nt, Artificial Sequence
  SARS-CoV-2/Wuhan-Hu-1__NC_045512.2/MN908947.2/EPI_ISL_402128__ORF 8 protein (ORF8) mRNA gc (1-121)(T11I_A51S)
aggagagucccgcagucggcguccagcggcucugcuuguucgugugugugucguugcaggccuuauucaagcuuaccaugaaguuccugguguuccucggcaucaucaucaccgucgccgccuuccaccaggagugcagccugcaguccugcacgcagcaccagcccuacgugguggacgacccgugccccauccacuucuacagcaagugguacauccgcgucgggagccggaaguccgcgccccugaucgagcucugcguggacgaggccggcagcaagucccccauccaguacaucgacaucgggaacuacaccgugagcugccugccguucaccaucaacugccaggagcccaagcugggcucccucgucgugcgcugcagcuucuacgaggacuuccuggaguaccacgacgugcgggucgugcuggacuucaucugaggacuagucccuguucccagagcccacuuuuuuuucuuuuuuugaaauaaaauagccugucuuucagaucucaaaggcucuuuucagagccaccaaaaaaaaaaaaaaaaaaaaaaaaaaaaaaaaaaaaaaaaaaaaaaaaaaaaaaaaaaaaaaaaaaaaaaaaaaaaaaaaaaaaaaaaaaaaaaaaaaaaa

SEQ ID NO: 28253 - RNA, 638 nt, Artificial Sequence
  SARS-CoV-2/Wuhan-Hu-1__NC_045512.2/MN908947.2/EPI_ISL_402128__ORF 8 protein (ORF8) mRNA gc (1-121)(V32L_V100L)
aggagagucccgcagucggcguccagcggcucugcuuguucgugugugugucguugcaggccuuauucaagcuuaccaugaaguuccugguguuccucggcaucaucaccaccgucgccgccuuccaccaggagugcagccugcaguccugcacgcagcaccagcccuaccugguggacgacccgugccccauccacuucuacagcaagugguacauccgcgucggggcccggaaguccgcgccccugaucgagcucugcguggacgaggccggcagcaagucccccauccaguacaucgacaucgggaacuacaccgugagcugccugccguucaccaucaacugccaggagcccaagcugggcucccucguccugcgcugcagcuucuacgaggacuuccuggaguaccacgacgugcgggucgugcuggacuucaucugaggacuagucccuguucccagagcccacuuuuuuuucuuuuuuugaaauaaaauagccugucuuucagaucucaaaggcucuuuucagagccaccaaaaaaaaaaaaaaaaaaaaaaaaaaaaaaaaaaaaaaaaaaaaaaaaaaaaaaaaaaaaaaaaaaaaaaaaaaaaaaaaaaaaaaaaaaaaaaaaaaaaa

SEQ ID NO: 28254 - RNA, 638 nt, Artificial Sequence
  SARS-CoV-2/Wuhan-Hu-1__NC_045512.2/MN908947.2/EPI_ISL_402128__ORF 8 protein (ORF8) mRNA gc (1-121)(A65V)
aggagagucccgcagucggcguccagcggcucugcuuguucgugugugugucguugcaggccuuauucaagcuuaccaugaaguuccugguguuccucggcaucaucaccaccgucgccgccuuccaccaggagugcagccugcaguccugcacgcagcaccagcccuacgugguggacgacccgugccccauccacuucuacagcaagugguacauccgcgucggggcccggaaguccgcgccccugaucgagcucugcguggacgaggugggcagcaagucccccauccaguacaucgacaucgggaacuacaccgugagcugccugccguucaccaucaacugccaggagcccaagcugggcucccucgucgugcgcugcagcuucuacgaggacuuccuggaguaccacgacgugcgggucgugcuggacuucaucugaggacuagucccuguucccagagcccacuuuuuuuucuuuuuuugaaauaaaauagccugucuuucagaucucaaaggcucuuuucagagccaccaaaaaaaaaaaaaaaaaaaaaaaaaaaaaaaaaaaaaaaaaaaaaaaaaaaaaaaaaaaaaaaaaaaaaaaaaaaaaaaaaaaaaaaaaaaaaaaaaaaaa

SEQ ID NO: 28255 - RNA, 2081 nt, Artificial Sequence
  SARS-CoV-2/Wuhan-Hu-1__NC_045512.2/MN908947.2/EPI_ISL_402128__non -structural protein 13 (NSP13) mRNA gc (1-602)(P78L)
aggagagucccgcagucggcguccagcggcucugcuuguucgugugugugucguugcaggccuuauucaagcuuaccauggccgugggcgccugcguccugugcaacagccagaccucccuccgcugcggggcgugcauccggcgccccuuccugugcugcaagugcugcuacgaccacgugaucagcaccucccacaagcuggugcucagcgucaacccguacgugugcaacgcccccggcugcgacgugacggacgucacccagcuguaccucgggggcauguccuacuacugcaagagccacaagcugcccaucuccuucccccugugcgccaacggccagguguucggccuguacaagaacacgugcgugggcagcgacaacgucaccgacuucaacgccaucgcgaccugcgacuggaccaacgccggggacuacauccuggccaacacgugcaccgagcggcucaagcuguucgccgccgagacccugaaggcgaccgaggagaccuucaagcucuccuacggcaucgccaccgugcgcgaggugcugagcgaccgggagcugcaccucuccugggaggucgggaagccccgcccgccccugaaccggaacuacguguucacgggcuaccgcgugaccaagaacagcaagguccagaucggggaguacaccuucgagaagggcgacuacggcgacgccgugguguaccgggggaccacgaccuacaagcugaacgucggcgacuacuucgugcucaccucccacaccgugaugccccugagcgcccccacgcuggucccccaggagcacuacgugcgcaucaccgggcucuaccccacccugaacaucuccgacgaguucagcuccaacguggccaacuaccagaaggucggcaugcagaaguacagcacccugcagggcccgcccgggacgggcaagucccacuucgcgaucgggcucgcccuguacuaccccagcgcccggaucguguacaccgccugcagccacgccgcggucgacgcccugugcgagaaggcccucaaguaccugcccaucgacaagugcucccgcaucaucccggcccgggcccgcguggagugcuucgacaaguucaaggugaacagcacccuggagcaguacgucuucugcaccgugaacgcgcuccccgagacgaccgccgacaucguggucuucgacgagaucuccauggccaccaacuacgaccugagcguggugaacgcccggcugcgcgccaagcacuacgucuacaucggcgaccccgcgcagcuccccgccccgcggacccugcugacgaaggggacccucgagcccgaguacuucaacuccgugugccgccugaugaagaccaucggccccgacauguuccuggggaccugccggcgcugccccgccgagaucguggacacggucagcgcccucguguacgacaacaagcugaaggcgcacaaggacaaguccgcccagugcuucaagauguucuacaagggggugaucacccacgacgucagcuccgccaucaaccggccgcagaucggcguggugcgcgaguuccugacccgcaaccccgccuggcggaaggccgucuucaucagccccuacaacucccagaacgcgguggccagcaagauccucgggcugcccacccagaccguggacuccagccagggcuccgaguacgacuacgucaucuucacgcagaccaccgagaccgcccacagcugcaacgugaaccgcuucaacguggccaucacgcgggccaaggucgggauccugugcaucauguccgaccgcgaccucuacgacaagcugcaguucaccagccuggagaucccgcggcgcaacguggcgacccugcagugaggacuagucccuguucccagagcccacuuuuuuuucuuuuuuugaaauaaaauagccugucuuucagaucucaaaggcucuuuucagagccaccaaaaaaaaaaaaaaaaaaaaaaaaaaaaaaaaaaaaaaaaaaaaaaaaaaaaaaaaaaaaaaaaaaaaaaaaaaaaaaaaaaaaaaaaaaaaaaaaaaaaa

SEQ ID NO: 28256 - RNA, 2081 nt, Artificial Sequence
  SARS-CoV-2/Wuhan-Hu-1__NC_045512.2/MN908947.2/EPI_ISL_402128__non -structural protein 13 (NSP13) mRNA gc (1-602)(P79S_K461R)
aggagagucccgcagucggcguccagcggcucugcuuguucgugugugugucguugcaggccuuauucaagcuuaccauggccgugggcgccugcguccugugcaacagccagaccucccuccgcugcggggcgugcauccggcgccccuuccugugcugcaagugcugcuacgaccacgugaucagcaccucccacaagcuggugcucagcgucaacccguacgugugcaacgcccccggcugcgacgugacggacgucacccagcuguaccucgggggcauguccuacuacugcaagagccacaagccgagcaucuccuucccccugugcgccaacggccagguguucggccuguacaagaacacgugcgugggcagcgacaacgucaccgacuucaacgccaucgcgaccugcgacuggaccaacgccggggacuacauccuggccaacacgugcaccgagcggcucaagcuguucgccgccgagacccugaaggcgaccgaggagaccuucaagcucuccuacggcaucgccaccgugcgcgaggugcugagcgaccgggagcugcaccucuccugggaggucgggaagccccgcccgccccugaaccggaacuacguguucacgggcuaccgcgugaccaagaacagcaagguccagaucggggaguacaccuucgagaagggcgacuacggcgacgccgugguguaccgggggaccacgaccuacaagcugaacgucggcgacuacuucgugcucaccucccacaccgugaugccccugagcgcccccacgcuggucccccaggagcacuacgugcgcaucaccgggcucuaccccacccugaacaucuccgacgaguucagcuccaacguggccaacuaccagaaggucggcaugcagaaguacagcacccugcagggcccgcccgggacgggcaagucccacuucgcgaucgggcucgcccuguacuaccccagcgcccggaucguguacaccgccugcagccacgccgcggucgacgcccugugcgagaaggcccucaaguaccugcccaucgacaagugcucccgcaucaucccggcccgggcccgcguggagugcuucgacaaguucaaggugaacagcacccuggagcaguacgucuucugcaccgugaacgcgcuccccgagacgaccgccgacaucguggucuucgacgagaucuccauggccaccaacuacgaccugagcguggugaacgcccggcugcgcgccaagcacuacgucuacaucggcgaccccgcgcagcuccccgccccgcggacccugcugacgaaggggacccucgagcccgaguacuucaacuccgugugccgccugaugaagaccaucggccccgacauguuccuggggaccugccggcgcugccccgccgagaucguggacacggucagcgcccucguguacgacaacagccugaaggcgcacaaggacaaguccgcccagugcuucaagauguucuacaagggggugaucacccacgacgucagcuccgccaucaaccggccgcagaucggcguggugcgcgaguuccugacccgcaaccccgccuggcggaaggccgucuucaucagccccuacaacucccagaacgcgguggccagcaagauccucgggcugcccacccagaccguggacuccagccagggcuccgaguacgacuacgucaucuucacgcagaccaccgagaccgcccacagcugcaacgugaaccgcuucaacguggccaucacgcgggccaaggucgggauccugugcaucauguccgaccgcgaccucuacgacaagcugcaguucaccagccuggagaucccgcggcgcaacguggcgacccugcagugaggacuagucccuguucccagagcccacuuuuuuuucuuuuuuugaaauaaaauagccugucuuucagaucucaaaggcucuuuucagagccaccaaaaaaaaaaaaaaaaaaaaaaaaaaaaaaaaaaaaaaaaaaaaaaaaaaaaaaaaaaaaaaaaaaaaaaaaaaaaaaaaaaaaaaaaaaaaaaaaaaaaa

SEQ ID NO: 28257 - RNA, 2081 nt, Artificial Sequence
  SARS-CoV-2/Wuhan-Hu-1__NC_045512.2/MN908947.2/EPI_ISL_402128__non -structural protein 13 (NSP13) mRNA gc (1-602)(E342D)
aggagagucccgcagucggcguccagcggcucugcuuguucgugugugugucguugcaggccuuauucaagcuuaccauggccgugggcgccugcguccugugcaacagccagaccucccuccgcugcggggcgugcauccggcgccccuuccugugcugcaagugcugcuacgaccacgugaucagcaccucccacaagcuggugcucagcgucaacccguacgugugcaacgcccccggcugcgacgugacggacgucacccagcuguaccucgggggcauguccuacuacugcaagagccacaagccgcccaucuccuucccccugugcgccaacggccagguguucggccuguacaagaacacgugcgugggcagcgacaacgucaccgacuucaacgccaucgcgaccugcgacuggaccaacgccggggacuacauccuggccaacacgugcaccgagcggcucaagcuguucgccgccgagacccugaaggcgaccgaggagaccuucaagcucuccuacggcaucgccaccgugcgcgaggugcugagcgaccgggagcugcaccucuccugggaggucgggaagccccgcccgccccugaaccggaacuacguguucacgggcuaccgcgugaccaagaacagcaagguccagaucggggaguacaccuucgagaagggcgacuacggcgacgccgugguguaccgggggaccacgaccuacaagcugaacgucggcgacuacuucgugcucaccucccacaccgugaugccccugagcgcccccacgcuggucccccaggagcacuacgugcgcaucaccgggcucuaccccacccugaacaucuccgacgaguucagcuccaacguggccaacuaccagaaggucggcaugcagaaguacagcacccugcagggcccgcccgggacgggcaagucccacuucgcgaucgggcucgcccuguacuaccccagcgcccggaucguguacaccgccugcagccacgccgcggucgacgcccugugcgagaaggcccucaaguaccugcccaucgacaagugcucccgcaucaucccggcccgggcccgcguggacugcuucgacaaguucaaggugaacagcacccuggagcaguacgucuucugcaccgugaacgcgcuccccgagacgaccgccgacaucguggucuucgacgagaucuccauggccaccaacuacgaccugagcguggugaacgcccggcugcgcgccaagcacuacgucuacaucggcgaccccgcgcagcuccccgccccgcggacccugcugacgaaggggacccucgagcccgaguacuucaacuccgugugccgccugaugaagaccaucggccccgacauguuccuggggaccugccggcgcugccccgccgagaucguggacacggucagcgcccucguguacgacaacaagcugaaggcgcacaaggacaaguccgcccagugcuucaagauguucuacaagggggugaucacccacgacgucagcuccgccaucaaccggccgcagaucggcguggugcgcgaguuccugacccgcaaccccgccuggcggaaggccgucuucaucagccccuacaacucccagaacgcgguggccagcaagauccucgggcugcccacccagaccguggacuccagccagggcuccgaguacgacuacgucaucuucacgcagaccaccgagaccgcccacagcugcaacgugaaccgcuucaacguggccaucacgcgggccaaggucgggauccugugcaucauguccgaccgcgaccucuacgacaagcugcaguucaccagccuggagaucccgcggcgcaacguggcgacccugcagugaggacuagucccuguucccagagcccacuuuuuuuucuuuuuuugaaauaaaauagccugucuuucagaucucaaaggcucuuuucagagccaccaaaaaaaaaaaaaaaaaaaaaaaaaaaaaaaaaaaaaaaaaaaaaaaaaaaaaaaaaaaaaaaaaaaaaaaaaaaaaaaaaaaaaaaaaaaaaaaaaaaaa

SEQ ID NO: 28258 - RNA, 2081 nt, Artificial Sequence
  SARS-CoV-2/Wuhan-Hu-1__NC_045512.2/MN908947.2/EPI_ISL_402128__non -structural protein 13 (NSP13) mRNA gc (1-602)(T589I)
aggagagucccgcagucggcguccagcggcucugcuuguucgugugugugucguugcaggccuuauucaagcuuaccauggccgugggcgccugcguccugugcaacagccagaccucccuccgcugcggggcgugcauccggcgccccuuccugugcugcaagugcugcuacgaccacgugaucagcaccucccacaagcuggugcucagcgucaacccguacgugugcaacgcccccggcugcgacgugacggacgucacccagcuguaccucgggggcauguccuacuacugcaagagccacaagccgcccaucuccuucccccugugcgccaacggccagguguucggccuguacaagaacacgugcgugggcagcgacaacgucaccgacuucaacgccaucgcgaccugcgacuggaccaacgccggggacuacauccuggccaacacgugcaccgagcggcucaagcuguucgccgccgagacccugaaggcgaccgaggagaccuucaagcucuccuacggcaucgccaccgugcgcgaggugcugagcgaccgggagcugcaccucuccugggaggucgggaagccccgcccgccccugaaccggaacuacguguucacgggcuaccgcgugaccaagaacagcaagguccagaucggggaguacaccuucgagaagggcgacuacggcgacgccgugguguaccgggggaccacgaccuacaagcugaacgucggcgacuacuucgugcucaccucccacaccgugaugccccugagcgcccccacgcuggucccccaggagcacuacgugcgcaucaccgggcucuaccccacccugaacaucuccgacgaguucagcuccaacguggccaacuaccagaaggucggcaugcagaaguacagcacccugcagggcccgcccgggacgggcaagucccacuucgcgaucgggcucgcccuguacuaccccagcgcccggaucguguacaccgccugcagccacgccgcggucgacgcccugugcgagaaggcccucaaguaccugcccaucgacaagugcucccgcaucaucccggcccgggcccgcguggagugcuucgacaaguucaaggugaacagcacccuggagcaguacgucuucugcaccgugaacgcgcuccccgagacgaccgccgacaucguggucuucgacgagaucuccauggccaccaacuacgaccugagcguggugaacgcccggcugcgcgccaagcacuacgucuacaucggcgaccccgcgcagcuccccgccccgcggacccugcugacgaaggggacccucgagcccgaguacuucaacuccgugugccgccugaugaagaccaucggccccgacauguuccuggggaccugccggcgcugccccgccgagaucguggacacggucagcgcccucguguacgacaacaagcugaaggcgcacaaggacaaguccgcccagugcuucaagauguucuacaagggggugaucacccacgacgucagcuccgccaucaaccggccgcagaucggcguggugcgcgaguuccugacccgcaaccccgccuggcggaaggccgucuucaucagccccuacaacucccagaacgcgguggccagcaagauccucgggcugcccacccagaccguggacuccagccagggcuccgaguacgacuacgucaucuucacgcagaccaccgagaccgcccacagcugcaacgugaaccgcuucaacguggccaucacgcgggccaaggucgggauccugugcaucauguccgaccgcgaccucuacgacaagcugcaguucaucagccuggagaucccgcggcgcaacguggcgacccugcagugaggacuagucccuguucccagagcccacuuuuuuuucuuuuuuugaaauaaaauagccugucuuucagaucucaaaggcucuuuucagagccaccaaaaaaaaaaaaaaaaaaaaaaaaaaaaaaaaaaaaaaaaaaaaaaaaaaaaaaaaaaaaaaaaaaaaaaaaaaaaaaaaaaaaaaaaaaaaaaaaaaaaa

SEQ ID NO: 28259 - RNA, 2081 nt, Artificial Sequence
  SARS-CoV-2/Wuhan-Hu-1__NC_045512.2/MN908947.2/EPI_ISL_402128__non -structural protein 13 (NSP13) mRNA gc (1-602)(P54L_D261Y)
aggagagucccgcagucggcguccagcggcucugcuuguucgugugugugucguugcaggccuuauucaagcuuaccauggccgugggcgccugcguccugugcaacagccagaccucccuccgcugcggggcgugcauccggcgccccuuccugugcugcaagugcugcuacgaccacgugaucagcaccucccacaagcuggugcucagcgucaacccguacgugugcaacgcccugggcugcgacgugacggacgucacccagcuguaccucgggggcauguccuacuacugcaagagccacaagccgcccaucuccuucccccugugcgccaacggccagguguucggccuguacaagaacacgugcgugggcagcgacaacgucaccgacuucaacgccaucgcgaccugcgacuggaccaacgccggggacuacauccuggccaacacgugcaccgagcggcucaagcuguucgccgccgagacccugaaggcgaccgaggagaccuucaagcucuccuacggcaucgccaccgugcgcgaggugcugagcgaccgggagcugcaccucuccugggaggucgggaagccccgcccgccccugaaccggaacuacguguucacgggcuaccgcgugaccaagaacagcaagguccagaucggggaguacaccuucgagaagggcgacuacggcgacgccgugguguaccgggggaccacgaccuacaagcugaacgucggcgacuacuucgugcucaccucccacaccgugaugccccugagcgcccccacgcuggucccccaggagcacuacgugcgcaucaccgggcucuaccccacccugaacaucuccuacgaguucagcuccaacguggccaacuaccagaaggucggcaugcagaaguacagcacccugcagggcccgcccgggacgggcaagucccacuucgcgaucgggcucgcccuguacuaccccagcgcccggaucguguacaccgccugcagccacgccgcggucgacgcccugugcgagaaggcccucaaguaccugcccaucgacaagugcucccgcaucaucccggcccgggcccgcguggagugcuucgacaaguucaaggugaacagcacccuggagcaguacgucuucugcaccgugaacgcgcuccccgagacgaccgccgacaucguggucuucgacgagaucuccauggccaccaacuacgaccugagcguggugaacgcccggcugcgcgccaagcacuacgucuacaucggcgaccccgcgcagcuccccgccccgcggacccugcugacgaaggggacccucgagcccgaguacuucaacuccgugugccgccugaugaagaccaucggccccgacauguuccuggggaccugccggcgcugccccgccgagaucguggacacggucagcgcccucguguacgacaacaagcugaaggcgcacaaggacaaguccgcccagugcuucaagauguucuacaagggggugaucacccacgacgucagcuccgccaucaaccggccgcagaucggcguggugcgcgaguuccugacccgcaaccccgccuggcggaaggccgucuucaucagccccuacaacucccagaacgcgguggccagcaagauccucgggcugcccacccagaccguggacuccagccagggcuccgaguacgacuacgucaucuucacgcagaccaccgagaccgcccacagcugcaacgugaaccgcuucaacguggccaucacgcgggccaaggucgggauccugugcaucauguccgaccgcgaccucuacgacaagcugcaguucaccagccuggagaucccgcggcgcaacguggcgacccugcagugaggacuagucccuguucccagagcccacuuuuuuuucuuuuuuugaaauaaaauagccugucuuucagaucucaaaggcucuuuucagagccaccaaaaaaaaaaaaaaaaaaaaaaaaaaaaaaaaaaaaaaaaaaaaaaaaaaaaaaaaaaaaaaaaaaaaaaaaaaaaaaaaaaaaaaaaaaaaaaaaaaaaa

SEQ ID NO: 28260 - RNA, 2081 nt, Artificial Sequence
  SARS-CoV-2/Wuhan-Hu-1__NC_045512.2/MN908947.2/EPI_ISL_402128__non -structural protein 13 (NSP13) mRNA gc (1-602)(Q89H_H165Y)
aggagagucccgcagucggcguccagcggcucugcuuguucgugugugugucguugcaggccuuauucaagcuuaccauggccgugggcgccugcguccugugcaacagccagaccucccuccgcugcggggcgugcauccggcgccccuuccugugcugcaagugcugcuacgaccacgugaucagcaccucccacaagcuggugcucagcgucaacccguacgugugcaacgcccccggcugcgacgugacggacgucacccagcuguaccucgggggcauguccuacuacugcaagagccacaagccgcccaucuccuucccccugugcgccaacggccacguguucggccuguacaagaacacgugcgugggcagcgacaacgucaccgacuucaacgccaucgcgaccugcgacuggaccaacgccggggacuacauccuggccaacacgugcaccgagcggcucaagcuguucgccgccgagacccugaaggcgaccgaggagaccuucaagcucuccuacggcaucgccaccgugcgcgaggugcugagcgaccgggagcuguaccucuccugggaggucgggaagccccgcccgccccugaaccggaacuacguguucacgggcuaccgcgugaccaagaacagcaagguccagaucggggaguacaccuucgagaagggcgacuacggcgacgccgugguguaccgggggaccacgaccuacaagcugaacgucggcgacuacuucgugcucaccucccacaccgugaugccccugagcgcccccacgcuggucccccaggagcacuacgugcgcaucaccgggcucuaccccacccugaacaucuccgacgaguucagcuccaacguggccaacuaccagaaggucggcaugcagaaguacagcacccugcagggcccgcccgggacgggcaagucccacuucgcgaucgggcucgcccuguacuaccccagcgcccggaucguguacaccgccugcagccacgccgcggucgacgcccugugcgagaaggcccucaaguaccugcccaucgacaagugcucccgcaucaucccggcccgggcccgcguggagugcuucgacaaguucaaggugaacagcacccuggagcaguacgucuucugcaccgugaacgcgcuccccgagacgaccgccgacaucguggucuucgacgagaucuccauggccaccaacuacgaccugagcguggugaacgcccggcugcgcgccaagcacuacgucuacaucggcgaccccgcgcagcuccccgccccgcggacccugcugacgaaggggacccucgagcccgaguacuucaacuccgugugccgccugaugaagaccaucggccccgacauguuccuggggaccugccggcgcugccccgccgagaucguggacacggucagcgcccucguguacgacaacaagcugaaggcgcacaaggacaaguccgcccagugcuucaagauguucuacaagggggugaucacccacgacgucagcuccgccaucaaccggccgcagaucggcguggugcgcgaguuccugacccgcaaccccgccuggcggaaggccgucuucaucagccccuacaacucccagaacgcgguggccagcaagauccucgggcugcccacccagaccguggacuccagccagggcuccgaguacgacuacgucaucuucacgcagaccaccgagaccgcccacagcugcaacgugaaccgcuucaacguggccaucacgcgggccaaggucgggauccugugcaucauguccgaccgcgaccucuacgacaagcugcaguucaccagccuggagaucccgcggcgcaacguggcgacccugcagugaggacuagucccuguucccagagcccacuuuuuuuucuuuuuuugaaauaaaauagccugucuuucagaucucaaaggcucuuuucagagccaccaaaaaaaaaaaaaaaaaaaaaaaaaaaaaaaaaaaaaaaaaaaaaaaaaaaaaaaaaaaaaaaaaaaaaaaaaaaaaaaaaaaaaaaaaaaaaaaaaaaaa

SEQ ID NO: 28261 - RNA, 2081 nt, Artificial Sequence
  SARS-CoV-2/Wuhan-Hu-1__NC_045512.2/MN908947.2/EPI_ISL_402128__non -structural protein 13 (NSP13) mRNA gc (1-602)(D106Y_P530L)
aggagagucccgcagucggcguccagcggcucugcuuguucgugugugugucguugcaggccuuauucaagcuuaccauggccgugggcgccugcguccugugcaacagccagaccucccuccgcugcggggcgugcauccggcgccccuuccugugcugcaagugcugcuacgaccacgugaucagcaccucccacaagcuggugcucagcgucaacccguacgugugcaacgcccccggcugcgacgugacggacgucacccagcuguaccucgggggcauguccuacuacugcaagagccacaagccgcccaucuccuucccccugugcgccaacggccagguguucggccuguacaagaacacgugcgugggcagcgacaacgucaccuacuucaacgccaucgcgaccugcgacuggaccaacgccggggacuacauccuggccaacacgugcaccgagcggcucaagcuguucgccgccgagacccugaaggcgaccgaggagaccuucaagcucuccuacggcaucgccaccgugcgcgaggugcugagcgaccgggagcugcaccucuccugggaggucgggaagccccgcccgccccugaaccggaacuacguguucacgggcuaccgcgugaccaagaacagcaagguccagaucggggaguacaccuucgagaagggcgacuacggcgacgccgugguguaccgggggaccacgaccuacaagcugaacgucggcgacuacuucgugcucaccucccacaccgugaugccccugagcgcccccacgcuggucccccaggagcacuacgugcgcaucaccgggcucuaccccacccugaacaucuccgacgaguucagcuccaacguggccaacuaccagaaggucggcaugcagaaguacagcacccugcagggcccgcccgggacgggcaagucccacuucgcgaucgggcucgcccuguacuaccccagcgcccggaucguguacaccgccugcagccacgccgcggucgacgcccugugcgagaaggcccucaaguaccugcccaucgacaagugcucccgcaucaucccggcccgggcccgcguggagugcuucgacaaguucaaggugaacagcacccuggagcaguacgucuucugcaccgugaacgcgcuccccgagacgaccgccgacaucguggucuucgacgagaucuccauggccaccaacuacgaccugagcguggugaacgcccggcugcgcgccaagcacuacgucuacaucggcgaccccgcgcagcuccccgccccgcggacccugcugacgaaggggacccucgagcccgaguacuucaacuccgugugccgccugaugaagaccaucggccccgacauguuccuggggaccugccggcgcugccccgccgagaucguggacacggucagcgcccucguguacgacaacaagcugaaggcgcacaaggacaaguccgcccagugcuucaagauguucuacaagggggugaucacccacgacgucagcuccgccaucaaccggccgcagaucggcguggugcgcgaguuccugacccgcaaccccgccuggcggaaggccgucuucaucagccccuacaacucccagaacgcgguggccagcaagauccucgggcugcugacccagaccguggacuccagccagggcuccgaguacgacuacgucaucuucacgcagaccaccgagaccgcccacagcugcaacgugaaccgcuucaacguggccaucacgcgggccaaggucgggauccugugcaucauguccgaccgcgaccucuacgacaagcugcaguucaccagccuggagaucccgcggcgcaacguggcgacccugcagugaggacuagucccuguucccagagcccacuuuuuuuucuuuuuuugaaauaaaauagccugucuuucagaucucaaaggcucuuuucagagccaccaaaaaaaaaaaaaaaaaaaaaaaaaaaaaaaaaaaaaaaaaaaaaaaaaaaaaaaaaaaaaaaaaaaaaaaaaaaaaaaaaaaaaaaaaaaaaaaaaaaaa

SEQ ID NO: 28262 - RNA, 2081 nt, Artificial Sequence
  SARS-CoV-2/Wuhan-Hu-1__NC_045512.2/MN908947.2/EPI_ISL_402128__non -structural protein 13 (NSP13) mRNA gc (1-602)(P173H_E262D_P420S_P492S)
aggagagucccgcagucggcguccagcggcucugcuuguucgugugugugucguugcaggccuuauucaagcuuaccauggccgugggcgccugcguccugugcaacagccagaccucccuccgcugcggggcgugcauccggcgccccuuccugugcugcaagugcugcuacgaccacgugaucagcaccucccacaagcuggugcucagcgucaacccguacgugugcaacgcccccggcugcgacgugacggacgucacccagcuguaccucgggggcauguccuacuacugcaagagccacaagccgcccaucuccuucccccugugcgccaacggccagguguucggccuguacaagaacacgugcgugggcagcgacaacgucaccgacuucaacgccaucgcgaccugcgacuggaccaacgccggggacuacauccuggccaacacgugcaccgagcggcucaagcuguucgccgccgagacccugaaggcgaccgaggagaccuucaagcucuccuacggcaucgccaccgugcgcgaggugcugagcgaccgggagcugcaccucuccugggaggucgggaagcaccgcccgccccugaaccggaacuacguguucacgggcuaccgcgugaccaagaacagcaagguccagaucggggaguacaccuucgagaagggcgacuacggcgacgccgugguguaccgggggaccacgaccuacaagcugaacgucggcgacuacuucgugcucaccucccacaccgugaugccccugagcgcccccacgcuggucccccaggagcacuacgugcgcaucaccgggcucuaccccacccugaacaucuccgacgacuucagcuccaacguggccaacuaccagaaggucggcaugcagaaguacagcacccugcagggcccgcccgggacgggcaagucccacuucgcgaucgggcucgcccuguacuaccccagcgcccggaucguguacaccgccugcagccacgccgcggucgacgcccugugcgagaaggcccucaaguaccugcccaucgacaagugcucccgcaucaucccggcccgggcccgcguggagugcuucgacaaguucaaggugaacagcacccuggagcaguacgucuucugcaccgugaacgcgcuccccgagacgaccgccgacaucguggucuucgacgagaucuccauggccaccaacuacgaccugagcguggugaacgcccggcugcgcgccaagcacuacgucuacaucggcgaccccgcgcagcuccccgccccgcggacccugcugacgaaggggacccucgagagcgaguacuucaacuccgugugccgccugaugaagaccaucggccccgacauguuccuggggaccugccggcgcugccccgccgagaucguggacacggucagcgcccucguguacgacaacaagcugaaggcgcacaaggacaaguccgcccagugcuucaagauguucuacaagggggugaucacccacgacgucagcuccgccaucaaccggagccagaucggcguggugcgcgaguuccugacccgcaaccccgccuggcggaaggccgucuucaucagccccuacaacucccagaacgcgguggccagcaagauccucgggcugcccacccagaccguggacuccagccagggcuccgaguacgacuacgucaucuucacgcagaccaccgagaccgcccacagcugcaacgugaaccgcuucaacguggccaucacgcgggccaaggucgggauccugugcaucauguccgaccgcgaccucuacgacaagcugcaguucaccagccuggagaucccgcggcgcaacguggcgacccugcagugaggacuagucccuguucccagagcccacuuuuuuuucuuuuuuugaaauaaaauagccugucuuucagaucucaaaggcucuuuucagagccaccaaaaaaaaaaaaaaaaaaaaaaaaaaaaaaaaaaaaaaaaaaaaaaaaaaaaaaaaaaaaaaaaaaaaaaaaaaaaaaaaaaaaaaaaaaaaaaaaaaaaa

SEQ ID NO: 28263 - RNA, 2081 nt, Artificial Sequence
  SARS-CoV-2/Wuhan-Hu-1__NC_045512.2/MN908947.2/EPI_ISL_402128__non -structural protein 13 (NSP13) mRNA gc (1-602)(D261Y)
aggagagucccgcagucggcguccagcggcucugcuuguucgugugugugucguugcaggccuuauucaagcuuaccauggccgugggcgccugcguccugugcaacagccagaccucccuccgcugcggggcgugcauccggcgccccuuccugugcugcaagugcugcuacgaccacgugaucagcaccucccacaagcuggugcucagcgucaacccguacgugugcaacgcccccggcugcgacgugacggacgucacccagcuguaccucgggggcauguccuacuacugcaagagccacaagccgcccaucuccuucccccugugcgccaacggccagguguucggccuguacaagaacacgugcgugggcagcgacaacgucaccgacuucaacgccaucgcgaccugcgacuggaccaacgccggggacuacauccuggccaacacgugcaccgagcggcucaagcuguucgccgccgagacccugaaggcgaccgaggagaccuucaagcucuccuacggcaucgccaccgugcgcgaggugcugagcgaccgggagcugcaccucuccugggaggucgggaagccccgcccgccccugaaccggaacuacguguucacgggcuaccgcgugaccaagaacagcaagguccagaucggggaguacaccuucgagaagggcgacuacggcgacgccgugguguaccgggggaccacgaccuacaagcugaacgucggcgacuacuucgugcucaccucccacaccgugaugccccugagcgcccccacgcuggucccccaggagcacuacgugcgcaucaccgggcucuaccccacccugaacaucuccuacgaguucagcuccaacguggccaacuaccagaaggucggcaugcagaaguacagcacccugcagggcccgcccgggacgggcaagucccacuucgcgaucgggcucgcccuguacuaccccagcgcccggaucguguacaccgccugcagccacgccgcggucgacgcccugugcgagaaggcccucaaguaccugcccaucgacaagugcucccgcaucaucccggcccgggcccgcguggagugcuucgacaaguucaaggugaacagcacccuggagcaguacgucuucugcaccgugaacgcgcuccccgagacgaccgccgacaucguggucuucgacgagaucuccauggccaccaacuacgaccugagcguggugaacgcccggcugcgcgccaagcacuacgucuacaucggcgaccccgcgcagcuccccgccccgcggacccugcugacgaaggggacccucgagcccgaguacuucaacuccgugugccgccugaugaagaccaucggccccgacauguuccuggggaccugccggcgcugccccgccgagaucguggacacggucagcgcccucguguacgacaacaagcugaaggcgcacaaggacaaguccgcccagugcuucaagauguucuacaagggggugaucacccacgacgucagcuccgccaucaaccggccgcagaucggcguggugcgcgaguuccugacccgcaaccccgccuggcggaaggccgucuucaucagccccuacaacucccagaacgcgguggccagcaagauccucgggcugcccacccagaccguggacuccagccagggcuccgaguacgacuacgucaucuucacgcagaccaccgagaccgcccacagcugcaacgugaaccgcuucaacguggccaucacgcgggccaaggucgggauccugugcaucauguccgaccgcgaccucuacgacaagcugcaguucaccagccuggagaucccgcggcgcaacguggcgacccugcagugaggacuagucccuguucccagagcccacuuuuuuuucuuuuuuugaaauaaaauagccugucuuucagaucucaaaggcucuuuucagagccaccaaaaaaaaaaaaaaaaaaaaaaaaaaaaaaaaaaaaaaaaaaaaaaaaaaaaaaaaaaaaaaaaaaaaaaaaaaaaaaaaaaaaaaaaaaaaaaaaaaaaa

SEQ ID NO: 28264 - RNA, 1859 nt, Artificial Sequence
  SARS-CoV-2/Wuhan-Hu-1__NC_045512.2/MN908947.2/EPI_ISL_402128__non -structural protein 14 (NSP14) mRNA gc (1-528)(T32I_P143S_P444S)
aggagagucccgcagucggcguccagcggcucugcuuguucgugugugugucguugcaggccuuauucaagcuuaccauggccgagaacgugaccggccuguucaaggacugcagcaaggucaucaccgggcuccaccccacgcaggccccgacccaccuguccguggacaucaaguucaagaccgagggccugugcguggacauccccgggauccccaaggacaugacguaccgccggcucaucagcaugaugggcuucaagaugaacuaccaggucaacggguaccccaacauguucaucacccgcgaggaggcgauccggcacgugcgcgccuggaucggcuucgacguggagggcugccacgccacccgggaggccgucgggaccaaccugccgcugcagcucggcuucuccacgggggugaaccugguggccguccccaccggcuacguggacacccccaacaacaccgacuucagccgcguguccgcgaagcccccgagcggggaccaguucaagcaccugaucccccucauguacaagggccugcccuggaacgucgugcggaucaagaucgugcagaugcugagcgacacgcucaagaaccuguccgaccgcgucguguucgugcugugggcccacggcuucgagcucaccagcaugaaguacuucgucaagaucgggccggagcggaccugcugccugugcgaccgccgggcgaccugcuucuccacggccagcgacaccuacgccugcuggcaccacuccaucggcuucgacuacguguacaaccccuucaugaucgacgugcagcaguggggguucaccggcaaccugcagagcaaccacgaccucuacugccagguccacggcaacgcccacguggccuccugcgacgccaucaugacccgcugccuggccgugcacgagugcuucgucaagcggguggacuggacgaucgaguaccccaucaucggggacgagcugaagaucaacgcggccugccgcaagguccagcacaugguggugaaggccgcccuccuggccgacaaguuccccguccugcacgacaucggcaacccgaaggcgaucaagugcgugccccaggccgacguggaguggaaguucuacgacgcccagcccugcagcgacaaggccuacaagaucgaggagcuguucuacuccuacgccacccacagcgacaaguucaccgacggggucugccuguucuggaacugcaacguggaccgguaccccgcgaacuccaucgugugccgcuucgacacccggguccugagcaaccucaaccugccgggcugcgacgggggcucccuguacgugaacaagcacgccuuccacacgcccgccuucgacaagagcgccuucgugaaccucaagcagcugagcuucuucuacuacagcgacucccccugcgagagccacggcaagcaggucguguccgacaucgacuacgugccgcucaagagcgcgaccugcaucacccgcugcaaccucgggggcgccgucugccggcaccacgccaacgaguaccgccuguaccuggacgccuacaacaugaugaucuccgccggguucagccucuggguguacaagcaguucgacaccuacaaccuguggaacacguucacccggcugcagugaggacuagucccuguucccagagcccacuuuuuuuucuuuuuuugaaauaaaauagccugucuuucagaucucaaaggcucuuuucagagccaccaaaaaaaaaaaaaaaaaaaaaaaaaaaaaaaaaaaaaaaaaaaaaaaaaaaaaaaaaaaaaaaaaaaaaaaaaaaaaaaaaaaaaaaaaaaaaaaaaaaaa

SEQ ID NO: 28265 - RNA, 1859 nt, Artificial Sequence
  SARS-CoV-2/Wuhan-Hu-1__NC_045512.2/MN908947.2/EPI_ISL_402128__non -structural protein 14 (NSP14) mRNA gc (1-528)(P204L_F218Y_P328Q)
aggagagucccgcagucggcguccagcggcucugcuuguucgugugugugucguugcaggccuuauucaagcuuaccauggccgagaacgugaccggccuguucaaggacugcagcaaggucaucaccgggcuccaccccacgcaggccccgacccaccuguccguggacaccaaguucaagaccgagggccugugcguggacauccccgggauccccaaggacaugacguaccgccggcucaucagcaugaugggcuucaagaugaacuaccaggucaacggguaccccaacauguucaucacccgcgaggaggcgauccggcacgugcgcgccuggaucggcuucgacguggagggcugccacgccacccgggaggccgucgggaccaaccugccgcugcagcucggcuucuccacgggggugaaccugguggccguccccaccggcuacguggacacccccaacaacaccgacuucagccgcguguccgcgaagcccccgcccggggaccaguucaagcaccugaucccccucauguacaagggccugcccuggaacgucgugcggaucaagaucgugcagaugcugagcgacacgcucaagaaccuguccgaccgcgucguguucgugcugugggcccacggcuucgagcucaccagcaugaaguacuucgucaagaucgggcuggagcggaccugcugccugugcgaccgccgggcgaccugcuacuccacggccagcgacaccuacgccugcuggcaccacuccaucggcuucgacuacguguacaaccccuucaugaucgacgugcagcaguggggguucaccggcaaccugcagagcaaccacgaccucuacugccagguccacggcaacgcccacguggccuccugcgacgccaucaugacccgcugccuggccgugcacgagugcuucgucaagcggguggacuggacgaucgaguaccccaucaucggggacgagcugaagaucaacgcggccugccgcaagguccagcacaugguggugaaggccgcccuccuggccgacaaguuccagguccugcacgacaucggcaacccgaaggcgaucaagugcgugccccaggccgacguggaguggaaguucuacgacgcccagcccugcagcgacaaggccuacaagaucgaggagcuguucuacuccuacgccacccacagcgacaaguucaccgacggggucugccuguucuggaacugcaacguggaccgguaccccgcgaacuccaucgugugccgcuucgacacccggguccugagcaaccucaaccugccgggcugcgacgggggcucccuguacgugaacaagcacgccuuccacacgcccgccuucgacaagagcgccuucgugaaccucaagcagcugcccuucuucuacuacagcgacucccccugcgagagccacggcaagcaggucguguccgacaucgacuacgugccgcucaagagcgcgaccugcaucacccgcugcaaccucgggggcgccgucugccggcaccacgccaacgaguaccgccuguaccuggacgccuacaacaugaugaucuccgccggguucagccucuggguguacaagcaguucgacaccuacaaccuguggaacacguucacccggcugcagugaggacuagucccuguucccagagcccacuuuuuuuucuuuuuuugaaauaaaauagccugucuuucagaucucaaaggcucuuuucagagccaccaaaaaaaaaaaaaaaaaaaaaaaaaaaaaaaaaaaaaaaaaaaaaaaaaaaaaaaaaaaaaaaaaaaaaaaaaaaaaaaaaaaaaaaaaaaaaaaaaaaaa

SEQ ID NO: 28266 - RNA, 1859 nt, Artificial Sequence
  SARS-CoV-2/Wuhan-Hu-1__NC_045512.2/MN908947.2/EPI_ISL_402128__non -structural protein 14 (NSP14) mRNA gc (1-528)(E348G_P452S)
aggagagucccgcagucggcguccagcggcucugcuuguucgugugugugucguugcaggccuuauucaagcuuaccauggccgagaacgugaccggccuguucaaggacugcagcaaggucaucaccgggcuccaccccacgcaggccccgacccaccuguccguggacaccaaguucaagaccgagggccugugcguggacauccccgggauccccaaggacaugacguaccgccggcucaucagcaugaugggcuucaagaugaacuaccaggucaacggguaccccaacauguucaucacccgcgaggaggcgauccggcacgugcgcgccuggaucggcuucgacguggagggcugccacgccacccgggaggccgucgggaccaaccugccgcugcagcucggcuucuccacgggggugaaccugguggccguccccaccggcuacguggacacccccaacaacaccgacuucagccgcguguccgcgaagcccccgcccggggaccaguucaagcaccugaucccccucauguacaagggccugcccuggaacgucgugcggaucaagaucgugcagaugcugagcgacacgcucaagaaccuguccgaccgcgucguguucgugcugugggcccacggcuucgagcucaccagcaugaaguacuucgucaagaucgggccggagcggaccugcugccugugcgaccgccgggcgaccugcuucuccacggccagcgacaccuacgccugcuggcaccacuccaucggcuucgacuacguguacaaccccuucaugaucgacgugcagcaguggggguucaccggcaaccugcagagcaaccacgaccucuacugccagguccacggcaacgcccacguggccuccugcgacgccaucaugacccgcugccuggccgugcacgagugcuucgucaagcggguggacuggacgaucgaguaccccaucaucggggacgagcugaagaucaacgcggccugccgcaagguccagcacaugguggugaaggccgcccuccuggccgacaaguuccccguccugcacgacaucggcaacccgaaggcgaucaagugcgugccccaggccgacgugggcuggaaguucuacgacgcccagcccugcagcgacaaggccuacaagaucgaggagcuguucuacuccuacgccacccacagcgacaaguucaccgacggggucugccuguucuggaacugcaacguggaccgguaccccgcgaacuccaucgugugccgcuucgacacccggguccugagcaaccucaaccugccgggcugcgacgggggcucccuguacgugaacaagcacgccuuccacacgcccgccuucgacaagagcgccuucgugaaccucaagcagcugcccuucuucuacuacagcgacuccagcugcgagagccacggcaagcaggucguguccgacaucgacuacgugccgcucaagagcgcgaccugcaucacccgcugcaaccucgggggcgccgucugccggcaccacgccaacgaguaccgccuguaccuggacgccuacaacaugaugaucuccgccggguucagccucuggguguacaagcaguucgacaccuacaaccuguggaacacguucacccggcugcagugaggacuagucccuguucccagagcccacuuuuuuuucuuuuuuugaaauaaaauagccugucuuucagaucucaaaggcucuuuucagagccaccaaaaaaaaaaaaaaaaaaaaaaaaaaaaaaaaaaaaaaaaaaaaaaaaaaaaaaaaaaaaaaaaaaaaaaaaaaaaaaaaaaaaaaaaaaaaaaaaaaaaa

SEQ ID NO: 28267 - RNA, 1859 nt, Artificial Sequence
  SARS-CoV-2/Wuhan-Hu-1__NC_045512.2/MN908947.2/EPI_ISL_402128__non -structural protein 14 (NSP14) mRNA gc (1-528)(A395V)
aggagagucccgcagucggcguccagcggcucugcuuguucgugugugugucguugcaggccuuauucaagcuuaccauggccgagaacgugaccggccuguucaaggacugcagcaaggucaucaccgggcuccaccccacgcaggccccgacccaccuguccguggacaccaaguucaagaccgagggccugugcguggacauccccgggauccccaaggacaugacguaccgccggcucaucagcaugaugggcuucaagaugaacuaccaggucaacggguaccccaacauguucaucacccgcgaggaggcgauccggcacgugcgcgccuggaucggcuucgacguggagggcugccacgccacccgggaggccgucgggaccaaccugccgcugcagcucggcuucuccacgggggugaaccugguggccguccccaccggcuacguggacacccccaacaacaccgacuucagccgcguguccgcgaagcccccgcccggggaccaguucaagcaccugaucccccucauguacaagggccugcccuggaacgucgugcggaucaagaucgugcagaugcugagcgacacgcucaagaaccuguccgaccgcgucguguucgugcugugggcccacggcuucgagcucaccagcaugaaguacuucgucaagaucgggccggagcggaccugcugccugugcgaccgccgggcgaccugcuucuccacggccagcgacaccuacgccugcuggcaccacuccaucggcuucgacuacguguacaaccccuucaugaucgacgugcagcaguggggguucaccggcaaccugcagagcaaccacgaccucuacugccagguccacggcaacgcccacguggccuccugcgacgccaucaugacccgcugccuggccgugcacgagugcuucgucaagcggguggacuggacgaucgaguaccccaucaucggggacgagcugaagaucaacgcggccugccgcaagguccagcacaugguggugaaggccgcccuccuggccgacaaguuccccguccugcacgacaucggcaacccgaaggcgaucaagugcgugccccaggccgacguggaguggaaguucuacgacgcccagcccugcagcgacaaggccuacaagaucgaggagcuguucuacuccuacgccacccacagcgacaaguucaccgacggggucugccuguucuggaacugcaacguggaccgguaccccgugaacuccaucgugugccgcuucgacacccggguccugagcaaccucaaccugccgggcugcgacgggggcucccuguacgugaacaagcacgccuuccacacgcccgccuucgacaagagcgccuucgugaaccucaagcagcugcccuucuucuacuacagcgacucccccugcgagagccacggcaagcaggucguguccgacaucgacuacgugccgcucaagagcgcgaccugcaucacccgcugcaaccucgggggcgccgucugccggcaccacgccaacgaguaccgccuguaccuggacgccuacaacaugaugaucuccgccggguucagccucuggguguacaagcaguucgacaccuacaaccuguggaacacguucacccggcugcagugaggacuagucccuguucccagagcccacuuuuuuuucuuuuuuugaaauaaaauagccugucuuucagaucucaaaggcucuuuucagagccaccaaaaaaaaaaaaaaaaaaaaaaaaaaaaaaaaaaaaaaaaaaaaaaaaaaaaaaaaaaaaaaaaaaaaaaaaaaaaaaaaaaaaaaaaaaaaaaaaaaaaa

SEQ ID NO: 28268 - RNA, 1859 nt, Artificial Sequence
  SARS-CoV-2/Wuhan-Hu-1__NC_045512.2/MN908947.2/EPI_ISL_402128__non -structural protein 14 (NSP14) mRNA gc (1-528)(D145E_A275S)
aggagagucccgcagucggcguccagcggcucugcuuguucgugugugugucguugcaggccuuauucaagcuuaccauggccgagaacgugaccggccuguucaaggacugcagcaaggucaucaccgggcuccaccccacgcaggccccgacccaccuguccguggacaccaaguucaagaccgagggccugugcguggacauccccgggauccccaaggacaugacguaccgccggcucaucagcaugaugggcuucaagaugaacuaccaggucaacggguaccccaacauguucaucacccgcgaggaggcgauccggcacgugcgcgccuggaucggcuucgacguggagggcugccacgccacccgggaggccgucgggaccaaccugccgcugcagcucggcuucuccacgggggugaaccugguggccguccccaccggcuacguggacacccccaacaacaccgacuucagccgcguguccgcgaagcccccgcccggggagcaguucaagcaccugaucccccucauguacaagggccugcccuggaacgucgugcggaucaagaucgugcagaugcugagcgacacgcucaagaaccuguccgaccgcgucguguucgugcugugggcccacggcuucgagcucaccagcaugaaguacuucgucaagaucgggccggagcggaccugcugccugugcgaccgccgggcgaccugcuucuccacggccagcgacaccuacgccugcuggcaccacuccaucggcuucgacuacguguacaaccccuucaugaucgacgugcagcaguggggguucaccggcaaccugcagagcaaccacgaccucuacugccagguccacggcaacgcccacguggccuccugcgacagcaucaugacccgcugccuggccgugcacgagugcuucgucaagcggguggacuggacgaucgaguaccccaucaucggggacgagcugaagaucaacgcggccugccgcaagguccagcacaugguggugaaggccgcccuccuggccgacaaguuccccguccugcacgacaucggcaacccgaaggcgaucaagugcgugccccaggccgacguggaguggaaguucuacgacgcccagcccugcagcgacaaggccuacaagaucgaggagcuguucuacuccuacgccacccacagcgacaaguucaccgacggggucugccuguucuggaacugcaacguggaccgguaccccgcgaacuccaucgugugccgcuucgacacccggguccugagcaaccucaaccugccgggcugcgacgggggcucccuguacgugaacaagcacgccuuccacacgcccgccuucgacaagagcgccuucgugaaccucaagcagcugcccuucuucuacuacagcgacucccccugcgagagccacggcaagcaggucguguccgacaucgacuacgugccgcucaagagcgcgaccugcaucacccgcugcaaccucgggggcgccgucugccggcaccacgccaacgaguaccgccuguaccuggacgccuacaacaugaugaucuccgccggguucagccucuggguguacaagcaguucgacaccuacaaccuguggaacacguucacccggcugcagugaggacuagucccuguucccagagcccacuuuuuuuucuuuuuuugaaauaaaauagccugucuuucagaucucaaaggcucuuuucagagccaccaaaaaaaaaaaaaaaaaaaaaaaaaaaaaaaaaaaaaaaaaaaaaaaaaaaaaaaaaaaaaaaaaaaaaaaaaaaaaaaaaaaaaaaaaaaaaaaaaaaaa

SEQ ID NO: 28269 - RNA, 1859 nt, Artificial Sequence
  SARS-CoV-2/Wuhan-Hu-1__NC_045512.2/MN908947.2/EPI_ISL_402128__non -structural protein 14 (NSP14) mRNA gc (1-528)(D145G_Q355H)
aggagagucccgcagucggcguccagcggcucugcuuguucgugugugugucguugcaggccuuauucaagcuuaccauggccgagaacgugaccggccuguucaaggacugcagcaaggucaucaccgggcuccaccccacgcaggccccgacccaccuguccguggacaccaaguucaagaccgagggccugugcguggacauccccgggauccccaaggacaugacguaccgccggcucaucagcaugaugggcuucaagaugaacuaccaggucaacggguaccccaacauguucaucacccgcgaggaggcgauccggcacgugcgcgccuggaucggcuucgacguggagggcugccacgccacccgggaggccgucgggaccaaccugccgcugcagcucggcuucuccacgggggugaaccugguggccguccccaccggcuacguggacacccccaacaacaccgacuucagccgcguguccgcgaagcccccgcccgggggccaguucaagcaccugaucccccucauguacaagggccugcccuggaacgucgugcggaucaagaucgugcagaugcugagcgacacgcucaagaaccuguccgaccgcgucguguucgugcugugggcccacggcuucgagcucaccagcaugaaguacuucgucaagaucgggccggagcggaccugcugccugugcgaccgccgggcgaccugcuucuccacggccagcgacaccuacgccugcuggcaccacuccaucggcuucgacuacguguacaaccccuucaugaucgacgugcagcaguggggguucaccggcaaccugcagagcaaccacgaccucuacugccagguccacggcaacgcccacguggccuccugcgacgccaucaugacccgcugccuggccgugcacgagugcuucgucaagcggguggacuggacgaucgaguaccccaucaucggggacgagcugaagaucaacgcggccugccgcaagguccagcacaugguggugaaggccgcccuccuggccgacaaguuccccguccugcacgacaucggcaacccgaaggcgaucaagugcgugccccaggccgacguggaguggaaguucuacgacgcccaccccugcagcgacaaggccuacaagaucgaggagcuguucuacuccuacgccacccacagcgacaaguucaccgacggggucugccuguucuggaacugcaacguggaccgguaccccgcgaacuccaucgugugccgcuucgacacccggguccugagcaaccucaaccugccgggcugcgacgggggcucccuguacgugaacaagcacgccuuccacacgcccgccuucgacaagagcgccuucgugaaccucaagcagcugcccuucuucuacuacagcgacucccccugcgagagccacggcaagcaggucguguccgacaucgacuacgugccgcucaagagcgcgaccugcaucacccgcugcaaccucgggggcgccgucugccggcaccacgccaacgaguaccgccuguaccuggacgccuacaacaugaugaucuccgccggguucagccucuggguguacaagcaguucgacaccuacaaccuguggaacacguucacccggcugcagugaggacuagucccuguucccagagcccacuuuuuuuucuuuuuuugaaauaaaauagccugucuuucagaucucaaaggcucuuuucagagccaccaaaaaaaaaaaaaaaaaaaaaaaaaaaaaaaaaaaaaaaaaaaaaaaaaaaaaaaaaaaaaaaaaaaaaaaaaaaaaaaaaaaaaaaaaaaaaaaaaaaaa

SEQ ID NO: 28270 - RNA, 1859 nt, Artificial Sequence
  SARS-CoV-2/Wuhan-Hu-1__NC_045512.2/MN908947.2/EPI_ISL_402128__non -structural protein 14 (NSP14) mRNA gc (1-528)(S256I_A361V_A372T)
aggagagucccgcagucggcguccagcggcucugcuuguucgugugugugucguugcaggccuuauucaagcuuaccauggccgagaacgugaccggccuguucaaggacugcagcaaggucaucaccgggcuccaccccacgcaggccccgacccaccuguccguggacaccaaguucaagaccgagggccugugcguggacauccccgggauccccaaggacaugacguaccgccggcucaucagcaugaugggcuucaagaugaacuaccaggucaacggguaccccaacauguucaucacccgcgaggaggcgauccggcacgugcgcgccuggaucggcuucgacguggagggcugccacgccacccgggaggccgucgggaccaaccugccgcugcagcucggcuucuccacgggggugaaccugguggccguccccaccggcuacguggacacccccaacaacaccgacuucagccgcguguccgcgaagcccccgcccggggaccaguucaagcaccugaucccccucauguacaagggccugcccuggaacgucgugcggaucaagaucgugcagaugcugagcgacacgcucaagaaccuguccgaccgcgucguguucgugcugugggcccacggcuucgagcucaccagcaugaaguacuucgucaagaucgggccggagcggaccugcugccugugcgaccgccgggcgaccugcuucuccacggccagcgacaccuacgccugcuggcaccacuccaucggcuucgacuacguguacaaccccuucaugaucgacgugcagcaguggggguucaccggcaaccugcagaucaaccacgaccucuacugccagguccacggcaacgcccacguggccuccugcgacgccaucaugacccgcugccuggccgugcacgagugcuucgucaagcggguggacuggacgaucgaguaccccaucaucggggacgagcugaagaucaacgcggccugccgcaagguccagcacaugguggugaaggccgcccuccuggccgacaaguuccccguccugcacgacaucggcaacccgaaggcgaucaagugcgugccccaggccgacguggaguggaaguucuacgacgcccagcccugcagcgacaagguguacaagaucgaggagcuguucuacuccuacaccacccacagcgacaaguucaccgacggggucugccuguucuggaacugcaacguggaccgguaccccgcgaacuccaucgugugccgcuucgacacccggguccugagcaaccucaaccugccgggcugcgacgggggcucccuguacgugaacaagcacgccuuccacacgcccgccuucgacaagagcgccuucgugaaccucaagcagcugcccuucuucuacuacagcgacucccccugcgagagccacggcaagcaggucguguccgacaucgacuacgugccgcucaagagcgcgaccugcaucacccgcugcaaccucgggggcgccgucugccggcaccacgccaacgaguaccgccuguaccuggacgccuacaacaugaugaucuccgccggguucagccucuggguguacaagcaguucgacaccuacaaccuguggaacacguucacccggcugcagugaggacuagucccuguucccagagcccacuuuuuuuucuuuuuuugaaauaaaauagccugucuuucagaucucaaaggcucuuuucagagccaccaaaaaaaaaaaaaaaaaaaaaaaaaaaaaaaaaaaaaaaaaaaaaaaaaaaaaaaaaaaaaaaaaaaaaaaaaaaaaaaaaaaaaaaaaaaaaaaaaaaaa

SEQ ID NO: 28271 - RNA, 917 nt, Artificial Sequence
  SARS-CoV-2/Wuhan-Hu-1__NC_045512.2/MN908947.2/EPI_ISL_402128__mem brane protein (M) mRNA gc
aggagagucccgcagucggcguccagcggcucugcuuguucgugugugugucguugcaggccuuauucaagcuuaccauggccgacagcaacggcaccaucaccguggaggagcugaagaagcuccuggagcaguggaaccuggucaucggguuccucuuccugacguggaucugccugcuccaguucgccuacgcgaaccgcaaccgguuccuguacaucaucaagcugaucuuccucuggcugcuguggcccgugacccucgccugcuucgugcuggccgccgucuaccgcaucaacuggaucaccggcgggaucgccaucgcgauggccugccuggugggccucauguggcuguccuacuucaucgccagcuuccggcuguucgcccgcacccgguccauguggagcuucaacccggagacgaacauccuccugaacgugccccugcacgggaccauccucacccgcccccugcuggaguccgagcucgucaucggcgcggugauccugcggggccaccuccgcaucgccgggcaccaccugggccggugcgacaucaaggaccugcccaaggagaucaccguggccacgagccgcacccuguccuacuacaagcucggggccagccagcgggucgccggcgacuccggguucgcggccuacagccgcuaccggaucggcaacuacaagcugaacaccgaccacuccagcuccagcgacaacaucgcccugcucgugcagugaggacuagucccuguucccagagcccacuuuuuuuucuuuuuuugaaauaaaauagccugucuuucagaucuaaaaaaaaaaaaaaaaaaaaaaaaaaaaaaaaaaaaaaaaaaaaaaaaaaaaaaaaaaaaaaaaaaaaaaaaaaaaaaaaaaaaaaaaaaaaaaaaaaaa

SEQ ID NO: 28272 - RNA, 1508 nt, Artificial Sequence
  SARS-CoV-2/Wuhan-Hu-1__NC_045512.2/MN908947.2/EPI_ISL_402128__nuc leocapsid protein (N) mRNA gc
aggagagucccgcagucggcguccagcggcucugcuuguucgugugugugucguugcaggccuuauucaagcuuaccaugagcgacaacggcccccagaaccagcgcaacgccccgcggaucaccuucgggggccccuccgacagcaccggguccaaccagaacggcgagcgcagcggggcccgguccaagcagcgccggccccagggccugcccaacaacacggcgagcugguucaccgcccucacccagcacggcaaggaggaccugaaguucccgcgcgggcagggcgugcccaucaacaccaacuccagccccgacgaccagaucggguacuaccggcgcgccacgcggcgcauccggggcggggacggcaagaugaaggaccugagcccccgcugguacuucuacuaccucggcaccgggccggaggccggccugcccuacggggccaacaaggacggcaucaucugggucgcgaccgagggcgcccugaacacccccaaggaccacaucgggacgcggaaccccgccaacaacgccgcgaucgugcuccagcugccgcagggcaccacccugcccaagggguucuacgccgagggcucccgcgggggcucccaggccagcucccggagcuccagccgcucccggaacagcucccgcaacagcacccccggcagcucccgggggacgagccccgcccgcauggccggcaacgggggcgacgcggcccucgcccugcugcuccuggaccggcugaaccagcucgaguccaagaugagcgggaagggccagcagcagcagggccagaccgugaccaagaaguccgccgccgaggcgagcaagaagccgcgccagaagcgcaccgccacgaaggccuacaacgucacccaggccuucgggcggcgcggccccgagcagacccaggggaacuucggcgaccaggagcugauccggcaggggaccgacuacaagcacuggccccagaucgcccaguucgcgcccuccgccagcgccuucuucggcaugucccgcaucggcauggaggugacgccgagcgggaccuggcugaccuacaccggcgccaucaagcucgacgacaaggaccccaacuucaaggaccaggugauccugcugaacaagcacaucgacgccuacaagacguucccgcccaccgagcccaagaaggacaagaagaagaaggcggacgagacccaggcccucccccagcggcagaagaagcagcagaccgucacgcugcugcccgccgccgaccucgacgacuucuccaagcagcugcagcagagcauguccagcgcggacuccacccaggccugaggacuagucccuguucccagagcccacuuuuuuuucuuuuuuugaaauaaaauagccugucuuucagaucuaaaaaaaaaaaaaaaaaaaaaaaaaaaaaaaaaaaaaaaaaaaaaaaaaaaaaaaaaaaaaaaaaaaaaaaaaaaaaaaaaaaaaaaaaaaaaaaaaaaa

SEQ ID NO: 28273 - RNA, 476 nt, Artificial Sequence
  SARS-CoV-2/Wuhan-Hu-1__NC_045512.2/MN908947.2/EPI_ISL_402128__env elope protein (E) mRNA gc
aggagagucccgcagucggcguccagcggcucugcuuguucgugugugugucguugcaggccuuauucaagcuuaccauguacagcuucguguccgaggagaccggcacccugaucgucaacagcgugcuccuguuccuggccuucguggucuuccuccuggugacgcuggccauccucaccgcgcugcgccugugcgccuacugcugcaacaucgugaacgucucccucgugaagcccagcuucuacguguacucccgggucaagaaccugaacagcucccgcgugccggaccugcucgugugaggacuagucccuguucccagagcccacuuuuuuuucuuuuuuugaaauaaaauagccugucuuucagaucuaaaaaaaaaaaaaaaaaaaaaaaaaaaaaaaaaaaaaaaaaaaaaaaaaaaaaaaaaaaaaaaaaaaaaaaaaaaaaaaaaaaaaaaaaaaaaaaaaaaa

SEQ ID NO: 28274 - RNA, 6089 nt, Artificial Sequence
  SARS-CoV-2/Wuhan-Hu-1__NC_045512.2/MN908947.2__non-structural protein 3 (NSP3) mRNA gc
aggagagucccgcagucggcguccagcggcucugcuuguucgugugugugucguugcaggccuuauucaagcuuaccauggcccccaccaaggugaccuucggcgacgacaccgucaucgaggugcagggguacaagagcgugaacaucaccuucgagcuggacgagcgcaucgacaagguccucaacgagaagugcuccgccuacaccguggagcugggcaccgaggugaacgaguucgcgugcgucguggccgacgccgugaucaagacgcugcagccggucagcgagcuccugacgccccuggggaucgaccucgacgagugguccauggccaccuacuaccuguucgacgagagcggcgaguucaagcuggccucccacauguacugcagcuucuacccgcccgacgaggacgaggaggagggggacugcgaggaggaggaguucgagcccuccacccaguacgaguacggcacggaggacgacuaccagggcaagccccucgaguucggggcgaccagcgccgcccugcagcccgaggaggagcaggaggaggacuggcuggacgacgacucccagcagaccgugggccagcaggacgggagcgaggacaaccagaccacgaccauccagaccaucguggagguccagccccagcucgagauggagcugaccccgguggugcagacgaucgaggucaacuccuucagcggcuaccugaagcucaccgacaacguguacaucaagaacgccgacaucguggaggaggcgaagaaggucaagcccaccgugguggucaacgccgccaacguguaccugaagcacgggggcggcguggccggggcccugaacaaggcgaccaacaacgccaugcaggucgaguccgacgacuacaucgccacgaacggcccccucaaggucgggggcagcugcgugcuguccggccacaaccuggccaagcacugccuccacgugguggggcccaacgucaacaagggcgaggacauccagcugcucaagagcgccuacgagaacuucaaccagcacgaggugcugcuggcgccgcugcucuccgccgggaucuucggcgccgaccccauccacagccugcgggugugcgucgacaccgugcgcaccaacguguaccuggccgucuucgacaagaaccucuacgacaagcugguguccagcuuccuggagaugaaguccgagaagcaggucgagcagaagaucgccgagauccccaaggaggaggugaagcccuucaucaccgagagcaagccgagcguggagcagcggaagcaggacgacaagaagaucaaggcgugcguggaggaggucacgaccacccucgaggagaccaaguuccugacggagaaccugcuccuguacaucgacaucaacgggaaccugcaccccgacuccgccacccucgugagcgacaucgacaucaccuuccugaagaaggacgcccccuacaucgugggcgacgucgugcaggagggcgugcugaccgccgucgugauccccacgaagaaggccgggggcaccaccgagaugcucgcgaaggcccugcgcaaggugccgaccgacaacuacaucacgaccuaccccgggcagggccugaacggguacaccgucgaggaggccaagaccgugcucaagaagugcaaguccgccuucuacauccugcccagcaucaucuccaacgagaagcaggagauccugggcaccgugagcuggaaccugcgggagaugcucgcgcacgccgaggagacgcgcaagcugaugcccgucugcguggagaccaaggccaucguguccaccauccagcggaaguacaagggcaucaagauccaggagggggucguggacuacggcgcccgcuucuacuucuacaccagcaagacgaccguggccucccugaucaacacccucaacgaccugaacgagacccuggucacgaugccgcucggguacgugacccacggccugaaccuggaggaggcggcccgguacaugcgcagccucaaggugcccgccaccgucuccgugagcucccccgacgccgugaccgccuacaacggguaccugacgagcuccagcaagacccccgaggagcacuucaucgagaccaucucccuggcgggcagcuacaaggacuggagcuacuccggccagagcacccagcucgggaucgaguuccugaagcggggcgacaaguccgucuacuacacgagcaacccgaccaccuuccaccuggacggggaggugaucaccuucgacaaccucaagacgcugcugucccuccgcgaggugcggaccaucaaggucuucaccaccguggacaacaucaaccugcacacccagguggucgacaugagcaugaccuacggccagcaguucggccccaccuaccuggacggggccgacgugaccaagaucaagccccacaacucccacgagggcaagacguucuacgugcucccgaacgacgacacccugcgcgucgaggccuucgaguacuaccacaccaccgaccccagcuuccuggggcgguacauguccgcccucaaccacacgaagaaguggaaguacccccaggugaacggccugaccagcaucaagugggccgacaacaacugcuaccuggcgaccgcccuccugacccugcagcagaucgagcucaaguucaacccgcccgcccugcaggacgccuacuaccgcgcgcgggccggggaggccgccaacuucugcgcccugauccucgcguacugcaacaagacggugggcgagcugggcgacguccgcgagaccauguccuaccuguuccagcacgccaaccucgacagcugcaagcgggugcugaacgucgugugcaagaccugcgggcagcagcagaccacccugaagggcguggaggccgucauguacauggggacgcucuccuacgagcaguucaagaagggcgugcagauccccugcacgugcgggaagcaggccaccaaguaccuggugcagcaggagagccccuucgucaugauguccgcgcccccggcccaguacgagcugaagcacggcaccuucacgugcgccagcgaguacaccggcaacuaccagugcgggcacuacaagcacaucaccuccaaggagacccucuacugcaucgacggcgcccugcugaccaagagcagcgaguacaaggggcccaucaccgacguguucuacaaggagaacuccuacaccaccacgaucaagcccgugaccuacaagcucgacggcgucgugugcaccgagaucgaccccaagcuggacaacuacuacaagaaggacaacagcuacuucaccgagcagccgaucgaccuggugcccaaccagcccuaccccaacgccuccuucgacaacuucaaguucgucugcgacaacaucaaguucgccgacgaccucaaccagcugacgggguacaagaagccggcgagccgcgagcugaaggugaccuucuuccccgaccucaacggcgacguggucgccaucgacuacaagcacuacacccccuccuucaagaagggcgccaagcugcugcacaagcccaucguguggcacgugaacaacgccaccaacaaggcgacguacaagccgaacaccuggugcauccggugccucuggagcaccaagcccgucgagaccuccaacagcuucgacgugcugaaguccgaggacgcccaggggauggacaaccuggccugcgaggaccucaagcccgugagcgaggaggucguggagaaccccacgauccagaaggacgugcuggagugcaacgucaagaccaccgagguggugggcgacaucauccugaagccggccaacaacucccucaagaucaccgaggaggucgggcacacggaccugauggccgcguacguggacaacagcucccugaccaucaagaagcccaacgagcucagccgcgugcugggccugaagacccucgccacccacgggcuggccgccgucaacuccgugcccugggacacgaucgccaacuacgcgaagccguuccugaacaagguggucagcaccaccaccaacaucgugacgcgcugccucaaccgggugugcaccaacuacaugcccuacuucuucacccugcugcuccagcugugcaccuucacgcgcuccaccaacagccggaucaaggccuccaugcccaccaccaucgccaagaacaccgucaagagcgugggcaaguucugccuggaggccagcuucaacuaccucaagucccccaacuucagcaagcugaucaacaucaucaucugguuccugcuccuguccgugugccugggcagccucaucuacuccacggccgcgcuggggguccugaugagcaaccucggcaugccguccuacugcaccggguaccgcgagggcuaccugaacagcaccaacgugaccaucgccacguacugcaccggcuccauccccugcagcgugugccuguccgggcucgacagccuggacaccuaccccucccuggagaccauccagaucacgaucagcuccuucaagugggaccucaccgccuucggccuggucgccgagugguuccuggccuacauccucuucacccgguucuucuacgugcuggggcuggcggccaucaugcagcuguucuucagcuacuucgccgugcacuucaucuccaacagcuggcucauguggcugaucaucaaccugguccagauggcccccaucuccgcgauggugcgcauguacaucuucuucgccagcuucuacuacguguggaaguccuacguccacgugguggacggcugcaacagcagcacgugcaugaugugcuacaagcggaaccgcgccacgcgggucgagugcaccaccaucgugaacgggguccgccgguccuucuacguguacgccaacggcggcaagggguucugcaagcuccacaacuggaacugcgugaacugcgacaccuucugcgccggcagcacguucaucuccgacgaggucgcgcgcgaccugagccugcaguucaagcggccgaucaaccccaccgaccaguccagcuacaucguggacuccgugaccgucaagaacgggagcauccaccucuacuucgacaaggccggccagaagaccuacgagcgccacucccugagccacuucgugaaccuggacaaccuccgggccaacaacacgaaggggucccugcccaucaacgugaucgucuucgacggcaagagcaagugcgaggaguccagcgccaaguccgccagcguguacuacucccagcugaugugccagcccauccuccugcuggaccaggcgcucgugagcgacgucggcgacagcgccgagguggccgugaagauguucgacgccuacgucaacaccuucuccagcaccuucaacgugccgauggagaagcugaagacccugguggccacggcggaggccgagcucgccaagaacgucucccuggacaacgugcugagcaccuucaucuccgccgcgcgccagggguucguggacagcgacgucgagaccaaggacgugguggagugccucaagcugucccaccagagcgacaucgaggucaccggcgacuccugcaacaacuacaugcugacguacaacaagguggagaacaugacgccccgggaccucggggccugcaucgacugcagcgcccgccacaucaacgcccagguggccaagucccacaacaucgcgcugaucuggaacgucaaggacuucaugagccuguccgagcagcuccggaagcagauccgcagcgccgccaagaagaacaaccugcccuucaagcugaccugcgccaccacccgccagguggugaacgucgugaccaccaagaucgcccucaagggcgggugaggacuagucccuguucccagagcccacuuuuuuuucuuuuuuugaaauaaaauagccugucuuucagaucuaaaaaaaaaaaaaaaaaaaaaaaaaaaaaaaaaaaaaaaaaaaaaaaaaaaaaaaaaaaaaaaaaaaaaaaaaaaaaaaaaaaaaaaaaaaaaaaaaaaa

SEQ ID NO: 28275 - RNA, 6089 nt, Artificial Sequence
  SARS-CoV-2/Wuhan/WIV05/2019__EPI_ISL_402128__non-structural protein 3 (NSP3) mRNA gc
aggagagucccgcagucggcguccagcggcucugcuuguucgugugugugucguugcaggccuuauucaagcuuaccauggcccccaccaaggugaccuucggcgacgacacggucaucgaggugcagggguacaagagcgugaacaucaccuucgagcuggacgagcgcaucgacaagguccucaacgagaagugcuccgccuacaccguggagcugggcaccgaggugaacgaguucgcgugcgucguggccgacgccgugaucaagacgcugcagccggucagcgagcuccugaccccccuggggaucgaccucgacgagugguccauggccaccuacuaccuguucgacgagagcggcgaguucaagcuggccucccacauguacugcagcuucuacccccccgacgaggacgaggaggagggggacugcgaggaggaggaguucgagccguccacccaguacgaguacggcacggaggacgacuaccagggcaagccccucgaguucggggcgaccagcgccgcccugcagcccgaggaggagcaggaggaggacuggcuggacgacgacucccagcagaccgugggccagcaggacgggagcgaggacaaccagaccacgaccauccagaccaucguggagguccagccccagcucgagauggagcugaccccgguggugcagacgaucgaggucaacuccuucagcggcuaccugaagcucaccgacaacguguacaucaagaacgccgacaucguggaggaggcgaagaaggucaagcccaccgugguggucaacgccgccaacguguaccugaagcacgggggcggcguggccggggcccugaacaaggcgaccaacaacgccaugcaggucgaguccgacgacuacaucgccacgaacggcccccucaagguggggggcagcugcguccuguccggccacaaccuggccaagcacugccuccacgugguggggcccaacgucaacaagggcgaggacauccagcugcugaagagcgccuacgagaacuucaaccagcacgaggugcuccuggcgccgcugcucuccgccgggaucuucggcgccgaccccauccacagccugcgggugugcgucgacaccgugcgcaccaacguguaccuggccgucuucgacaagaaccucuacgacaagcugguguccagcuuccuggagaugaagagcgagaagcagguggagcagaagaucgccgagauccccaaggaggaggucaagcccuucaucaccgaguccaagccgagcguggagcagcggaagcaggacgacaagaagaucaaggcgugcguggaggaggucacgaccacccucgaggagaccaaguuccugacggagaaccugcuccuguacaucgacaucaacgggaaccugcaccccgacuccgccacccucgugagcgacaucgacaucaccuuccugaagaaggacgcccccuacaucgugggcgacgucgugcaggagggcgugcugaccgccgucgugauccccacgaagaaggccgggggcaccaccgagaugcucgcgaaggcccugcgcaaggugccgaccgacaacuacaucacgaccuaccccgggcagggccugaacggguacaccgucgaggaggccaagaccgugcucaagaagugcaaguccgccuucuacauccugcccagcaucaucuccaacgagaagcaggagauccugggcaccgugagcuggaaccugcgggagaugcucgcgcacgccgaggagacgcgcaagcugaugcccgucugcguggagaccaaggccaucguguccaccauccagcggaaguacaagggcaucaagauccaggagggggucguggacuacggcgcccgcuucuacuucuacaccagcaagacgaccguggccucccugaucaacacccucaacgaccugaacgagacccuggucacgaugccgcucggguacgugacccacggccugaaccuggaggaggcggcccgguacaugcgcagccucaaggugcccgccaccgucuccgugagcucccccgacgccgugaccgccuacaacggguaccugacgagcuccagcaagacccccgaggagcacuucaucgagaccaucucccuggcgggcagcuacaaggacuggagcuacuccggccagagcacccagcucgggaucgaguuccugaagcggggcgacaaguccgucuacuacacgagcaacccgaccaccuuccaccuggacggggaggugaucaccuucgacaaccucaagacgcugcugucccuccgcgaggugcggaccaucaaggucuucaccaccguggacaacaucaaccugcacacgcagguggucgacaugagcaugaccuacggccagcaguucggccccaccuaccuggacggggccgacgugaccaagaucaagccccacaacucccacgagggcaagacguucuacgugcucccgaacgacgacacccugcgcgucgaggccuucgaguacuaccacaccaccgaccccagcuuccuggggcgguacauguccgcccucaaccacacgaagaaguggaaguacccccaggugaacggccugaccagcaucaagugggccgacaacaacugcuaccuggcgaccgcccuccugacccugcagcagaucgagcucaaguucaaccccccggcccugcaggacgccuacuaccgcgcgcgggccggggaggccgccaacuucugcgcccugauccucgcguacugcaacaagacggugggcgagcugggcgacguccgcgagaccauguccuaccuguuccagcacgccaaccucgacagcugcaagcgggugcugaacgucgugugcaagaccugcgggcagcagcagaccacccugaagggcguggaggccgucauguacauggggacgcucuccuacgagcaguucaagaagggcgugcagauccccugcaccugcgggaagcaggccaccaaguaccuggugcagcaggagagccccuucgucaugauguccgcccccccggcgcaguacgagcugaagcacggcaccuucacgugcgccagcgaguacaccggcaacuaccagugcgggcacuacaagcacaucaccuccaaggagacccucuacugcaucgacggcgcccugcugacgaagagcagcgaguacaaggggcccaucaccgacguguucuacaaggagaacuccuacaccaccacgaucaagcccgugaccuacaagcucgacggcgucgugugcaccgagaucgaccccaagcuggacaacuacuacaagaaggacaacagcuacuucaccgagcagccgaucgaccuggugcccaaccagcccuaccccaacgccuccuucgacaacuucaaguucgucugcgacaacaucaaguucgccgacgaccucaaccagcugacgggguacaagaagccggcgagccgcgagcugaaggugaccuucuuccccgaccucaacggcgacguggucgccaucgacuacaagcacuacacccccuccuucaagaagggcgccaagcugcugcacaagcccaucguguggcacgugaacaacgccaccaacaaggcgacguacaagccgaacaccuggugcauccggugccucuggagcaccaagcccgucgagaccuccaacagcuucgacgugcugaaguccgaggacgcccaggggauggacaaccuggccugcgaggaccucaagcccgugagcgaggaggucguggagaaccccacgauccagaaggacgugcuggagugcaacgucaagaccaccgagguggugggcgacaucauccugaagccggccaacaacucccucaagaucaccgaggaggucgggcacacggaccugauggccgcguacguggacaacagcucccugaccaucaagaagcccaacgagcucagccgcgugcugggccugaagacccucgccacccacgggcuggccgccgucaacuccgugcccugggacacgaucgccaacuacgcgaagccguuccugaacaagguggucagcaccaccaccaacaucgugacgcgcugccucaaccgggugugcaccaacuacaugcccuacuucuucacccugcugcuccagcugugcaccuucacgcgcuccaccaacagccggaucaaggccuccaugcccaccaccaucgccaagaacaccgucaagagcgugggcaaguucugccuggaggccagcuucaacuaccucaagucccccaacuucagcaagcugaucaacaucaucaucugguuccugcuccuguccgugugccugggcagccucaucuacuccacggccgcgcugagcguccugauguccaaccucgggaugccgagcuacugcaccggcuaccgcgagggguaccugaacuccaccaacgugaccaucgccacguacugcaccggcagcauccccugcuccgugugccugagcggccucgacucccuggacaccuaccccagccuggagaccauccagaucacgaucuccagcuucaagugggaccucaccgccuucgggcuggucgccgagugguuccuggccuacauccucuucacccgguucuucuacgugcugggccuggcggccaucaugcagcucuucuucuccuacuucgccgugcacuucaucagcaacuccuggcugauguggcugaucaucaaccugguccagauggcccccaucagcgcgauggugcgcauguacaucuucuucgccagcuucuacuacguguggaaguccuacguccacgugguggacgggugcaacagcuccaccugcaugaugugcuacaagcggaaccgcgccacgcgggucgagugcaccaccaucgugaacggcguccgccggagcuucuacguguacgccaacgggggcaagggcuucugcaagcuccacaacuggaacugcgugaacugcgacaccuucugcgccggguccacguucaucagcgacgaggucgcgcgcgaccugucccugcaguucaagcggccgaucaaccccaccgaccagagcuccuacaucguggacagcgugaccgucaagaacggcuccauccaccucuacuucgacaaggccgggcagaagaccuacgagcgccacagccugucccacuucgugaaccuggacaaccuccgggccaacaacacgaagggcagccugcccaucaacgugaucgucuucgacgggaaguccaagugcgaggagagcuccgccaagagcgccuccguguacuacagccagcugaugugccagcccauccuccugcuggaccaggcgcucgugagcgacgucggcgacuccgccgagguggccgugaagauguucgacgccuacgucaacaccuucagcuccaccuucaacgugccgauggagaagcugaagacccugguggccacggcggaggccgagcucgccaagaacgucagccuggacaacgugcuguccaccuucaucagcgccgcgcgccagggcuucguggacuccgacgucgagaccaaggacgugguggagugccucaagcugagccaccaguccgacaucgaggucaccggggacagcugcaacaacuacaugcugacguacaacaagguggagaacaugaccccccgggaccucggcgccugcaucgacugcuccgcccgccacaucaacgcccagguggccaagagccacaacaucgcgcugaucuggaacgucaaggacuucaugucccugagcgagcagcuccggaagcagauccgcuccgccgccaagaagaacaaccugcccuucaagcugaccugcgccaccacgcgccagguggugaacgucgugaccaccaagaucgcccucaaggggggcugaggacuagucccuguucccagagcccacuuuuuuuucuuuuuuugaaauaaaauagccugucuuucagaucuaaaaaaaaaaaaaaaaaaaaaaaaaaaaaaaaaaaaaaaaaaaaaaaaaaaaaaaaaaaaaaaaaaaaaaaaaaaaaaaaaaaaaaaaaaaaaaaaaaaa

SEQ ID NO: 28276 - RNA, 1754 nt, Artificial Sequence
  SARS-CoV-2/Wuhan-Hu-1__NC_045512.2/MN908947.2/EPI_ISL_402128__non -structural protein 4 (NSP4) mRNA gc
aggagagucccgcagucggcguccagcggcucugcuuguucgugugugugucguugcaggccuuauucaagcuuaccaugaagaucgugaacaacuggcugaagcagcucaucaaggucacccugguguuccuguucguggccgccaucuucuaccucaucacccccguccacgugaugagcaagcacacggacuucuccagcgagaucaucggcuacaaggcgaucgacgggggcgugacccgcgacaucgccuccaccgacacgugcuucgccaacaagcacgccgacuucgacaccugguucagccagcggggcggcuccuacaccaacgacaaggccugcccccugaucgcggccgucaucacccgcgaggugggguucgugguccccggccugcccggcaccauccuccggacgaccaacggggacuuccugcacuuccugccccgcguguucagcgccgugggcaacaucugcuacaccccguccaagcucaucgaguacaccgacuucgccacgagcgcgugcguccuggccgccgagugcaccaucuucaaggacgccuccgggaagcccgugcccuacugcuacgacaccaacgugcuggagggcagcgucgccuacgagucccuccggcccgacacccgcuacgugcugauggacgggagcaucauccaguucccgaacacguaccuggagggcuccgugcgggucgugaccaccuucgacagcgaguacugccgccacgggaccugcgagcgguccgaggcgggggugugcgucagcacguccggccgcugggugcucaacaacgacuacuaccggagccugcccgggguguucugcggcgucgacgccgugaaccugcucaccaacauguucacgccccugauccagcccaucggcgcccuggacaucuccgccagcaucgucgccgggggcaucguggcgaucguggugaccugccucgccuacuacuucaugcgcuuccggcgcgccuucggggaguacagccacgucguggccuucaacacccugcuguuccucauguccuucaccguccugugccugaccccgguguacagcuuccuccccggcguguacuccgucaucuaccuguaccugaccuucuaccucacgaacgacgugagcuuccuggcccacauccaguggauggugauguucacgccccugguccccuucuggaucaccaucgcguacaucaucugcaucuccaccaagcacuucuacugguucuucagcaacuaccucaagcggcgcgugguguucaacggggucuccuucagcaccuucgaggaggccgcccugugcaccuuccugcucaacaaggagauguaccugaagcugcgguccgacgugcuccugccgcugacccaguacaaccgcuaccucgcccuguacaacaaguacaaguacuucagcggcgccauggacaccacguccuaccgggaggcggccugcugccaccuggccaaggcccucaacgacuucagcaacuccggcagcgacgugcuguaccagccgccccagaccuccaucaccagcgcgguccugcagugaggacuagucccuguucccagagcccacuuuuuuuucuuuuuuugaaauaaaauagccugucuuucagaucuaaaaaaaaaaaaaaaaaaaaaaaaaaaaaaaaaaaaaaaaaaaaaaaaaaaaaaaaaaaaaaaaaaaaaaaaaaaaaaaaaaaaaaaaaaaaaaaaaaaa

SEQ ID NO: 28277 - RNA, 1124 nt, Artificial Sequence
  SARS-CoV-2/Wuhan-Hu-1__NC_045512.2/MN908947.2/EPI_ISL_402128__non -structural protein 6 (NSP6) mRNA gc
aggagagucccgcagucggcguccagcggcucugcuuguucgugugugugucguugcaggccuuauucaagcuuaccaugagcgccgugaagcgcaccaucaagggcacccaccacuggcugcuccugacgauccugaccucccuccugguccuggugcagagcacccaguggucccucuucuucuuccuguacgagaacgccuuccugcccuucgcgauggggaucaucgccaugagcgccuucgccaugauguucgugaagcacaagcacgccuuccucugccuguuccugcucccgucccuggcgaccgucgccuacuucaacaugguguacaugcccgccagcugggugaugcggaucaugacguggcuggacauggucgacaccucccucagcggcuucaagcugaaggacugcgugauguacgccuccgcggugguccugcucauccugaugaccgcccgcaccguguacgacgacggggcccggcgcguguggacgcugaugaacguccucacccugguguacaagguguacuacggcaacgcccuggaccaggccaucagcaugugggcgcucaucaucuccgucaccagcaacuacuccgggguggugaccacggucauguuccuggcccggggcaucguguucaugugcguggaguacugccccaucuucuucaucaccggcaacacccugcagugcaucaugcucgucuacugcuuccugggguacuucugcacgugcuacuucggccuguucugccuccugaaccgcuacuuccggcugacccucgggguguacgacuaccuggugagcacccaggaguuccgcuacaugaacucccagggccugcugcccccgaagaacagcaucgacgccuucaagcucaacaucaagcugcucggggucggcggcaagcccugcaucaagguggccaccguccagugaggacuagucccuguucccagagcccacuuuuuuuucuuuuuuugaaauaaaauagccugucuuucagaucuaaaaaaaaaaaaaaaaaaaaaaaaaaaaaaaaaaaaaaaaaaaaaaaaaaaaaaaaaaaaaaaaaaaaaaaaaaaaaaaaaaaaaaaaaaaaaaaaaaaa

SEQ ID NO: 28278 - RNA, 1076 nt, Artificial Sequence
  SARS-CoV-2/Wuhan-Hu-1__NC_045512.2/MN908947.2/EPI_ISL_402128__ORF 3 protein mRNA gc
aggagagucccgcagucggcguccagcggcucugcuuguucgugugugugucguugcaggccuuauucaagcuuaccauggaccuguucaugcgcaucuucaccaucggcaccgugacgcucaagcagggggagaucaaggacgccacccccagcgacuucguccgggccaccgcgaccaucccgauccaggccucccugcccuucggcuggcugaucguggggguggcccuccuggccgucuuccagagcgccuccaagaucaucacgcugaagaagcgcuggcagcucgcgcugagcaagggcgugcacuucgugugcaaccugcuccugcuguucgucaccguguacucccaccuccugcugguggccgccgggcucgaggcccccuuccuguaccuguacgcgcucgucuacuuccugcagagcaucaacuucgugcggaucaucaugcgccuguggcucugcuggaagugccgguccaagaacccccugcuguacgacgccaacuacuuccucugcuggcacaccaacugcuacgacuacugcaucccguacaacagcgugaccuccagcaucgucaucacguccggcgacggcaccaccagccccaucuccgagcacgacuaccagaucgggggcuacaccgagaagugggagagcggggugaaggacugcgugguccugcacuccuacuucacgagcgacuacuaccagcuguacuccacccagcucagcaccgacaccggcguggagcacgugacguucuucaucuacaacaagaucgucgacgagcccgaggagcacgugcagauccacaccaucgacggguccagcggcguggucaaccccgugauggagccgaucuacgacgagcccaccaccacgaccagcgugccccugugaggacuagucccuguucccagagcccacuuuuuuuucuuuuuuugaaauaaaauagccugucuuucagaucuaaaaaaaaaaaaaaaaaaaaaaaaaaaaaaaaaaaaaaaaaaaaaaaaaaaaaaaaaaaaaaaaaaaaaaaaaaaaaaaaaaaaaaaaaaaaaaaaaaaa

SEQ ID NO: 28279 - RNA, 614 nt, Artificial Sequence
  SARS-CoV-2/Wuhan-Hu-1__NC_045512.2/MN908947.2/EPI_ISL_402128__ORF 8 protein mRNA gc
aggagagucccgcagucggcguccagcggcucugcuuguucgugugugugucguugcaggccuuauucaagcuuaccaugaaguuccugguguuccucggcaucaucaccaccgucgccgccuuccaccaggagugcagccugcaguccugcacgcagcaccagcccuacgugguggacgacccgugccccauccacuucuacagcaagugguacauccgcgucggggcccggaaguccgcgccccugaucgagcucugcguggacgaggccggcagcaagucccccauccaguacaucgacaucgggaacuacaccgugagcugccugccguucaccaucaacugccaggagcccaagcugggcucccucgucgugcgcugcagcuucuacgaggacuuccuggaguaccacgacgugcgggucgugcuggacuucaucugaggacuagucccuguucccagagcccacuuuuuuuucuuuuuuugaaauaaaauagccugucuuucagaucuaaaaaaaaaaaaaaaaaaaaaaaaaaaaaaaaaaaaaaaaaaaaaaaaaaaaaaaaaaaaaaaaaaaaaaaaaaaaaaaaaaaaaaaaaaaaaaaaaaaa

SEQ ID NO: 28280 - RNA, 2057 nt, Artificial Sequence
  SARS-CoV-2/Wuhan-Hu-1__NC_045512.2/MN908947.2/EPI_ISL_402128__non -structural protein 13 (NSP13) mRNA gc
aggagagucccgcagucggcguccagcggcucugcuuguucgugugugugucguugcaggccuuauucaagcuuaccauggccgugggcgccugcguccugugcaacagccagaccucccuccgcugcggggcgugcauccggcgccccuuccugugcugcaagugcugcuacgaccacgugaucagcaccucccacaagcuggugcucagcgucaacccguacgugugcaacgcccccggcugcgacgugacggacgucacccagcuguaccucgggggcauguccuacuacugcaagagccacaagccgcccaucuccuucccccugugcgccaacggccagguguucggccuguacaagaacacgugcgugggcagcgacaacgucaccgacuucaacgccaucgcgaccugcgacuggaccaacgccggggacuacauccuggccaacacgugcaccgagcggcucaagcuguucgccgccgagacccugaaggcgaccgaggagaccuucaagcucuccuacggcaucgccaccgugcgcgaggugcugagcgaccgggagcugcaccucuccugggaggucgggaagccccgcccgccccugaaccggaacuacguguucacgggcuaccgcgugaccaagaacagcaagguccagaucggggaguacaccuucgagaagggcgacuacggcgacgccgugguguaccgggggaccacgaccuacaagcugaacgucggcgacuacuucgugcucaccucccacaccgugaugccccugagcgcccccacgcuggucccccaggagcacuacgugcgcaucaccgggcucuaccccacccugaacaucuccgacgaguucagcuccaacguggccaacuaccagaaggucggcaugcagaaguacagcacccugcagggcccgcccgggacgggcaagucccacuucgcgaucgggcucgcccuguacuaccccagcgcccggaucguguacaccgccugcagccacgccgcggucgacgcccugugcgagaaggcccucaaguaccugcccaucgacaagugcucccgcaucaucccggcccgggcccgcguggagugcuucgacaaguucaaggugaacagcacccuggagcaguacgucuucugcaccgugaacgcgcuccccgagacgaccgccgacaucguggucuucgacgagaucuccauggccaccaacuacgaccugagcguggugaacgcccggcugcgcgccaagcacuacgucuacaucggcgaccccgcgcagcuccccgccccgcggacccugcugacgaaggggacccucgagcccgaguacuucaacuccgugugccgccugaugaagaccaucggccccgacauguuccuggggaccugccggcgcugccccgccgagaucguggacacggucagcgcccucguguacgacaacaagcugaaggcgcacaaggacaaguccgcccagugcuucaagauguucuacaagggggugaucacccacgacgucagcuccgccaucaaccggccgcagaucggcguggugcgcgaguuccugacccgcaaccccgccuggcggaaggccgucuucaucagccccuacaacucccagaacgcgguggccagcaagauccucgggcugcccacccagaccguggacuccagccagggcuccgaguacgacuacgucaucuucacgcagaccaccgagaccgcccacagcugcaacgugaaccgcuucaacguggccaucacgcgggccaaggucgggauccugugcaucauguccgaccgcgaccucuacgacaagcugcaguucaccagccuggagaucccgcggcgcaacguggcgacccugcagugaggacuagucccuguucccagagcccacuuuuuuuucuuuuuuugaaauaaaauagccugucuuucagaucuaaaaaaaaaaaaaaaaaaaaaaaaaaaaaaaaaaaaaaaaaaaaaaaaaaaaaaaaaaaaaaaaaaaaaaaaaaaaaaaaaaaaaaaaaaaaaaaaaaaa

SEQ ID NO: 28281 - RNA, 1835 nt, Artificial Sequence
  SARS-CoV-2/Wuhan-Hu-1__NC_045512.2/MN908947.2/EPI_ISL_402128__non -structural protein 14 (NSP14) mRNA gc
aggagagucccgcagucggcguccagcggcucugcuuguucgugugugugucguugcaggccuuauucaagcuuaccauggccgagaacgugaccggccuguucaaggacugcagcaaggucaucaccgggcuccaccccacgcaggccccgacccaccuguccguggacaccaaguucaagaccgagggccugugcguggacauccccgggauccccaaggacaugacguaccgccggcucaucagcaugaugggcuucaagaugaacuaccaggucaacggguaccccaacauguucaucacccgcgaggaggcgauccggcacgugcgcgccuggaucggcuucgacguggagggcugccacgccacccgggaggccgucgggaccaaccugccgcugcagcucggcuucuccacgggggugaaccugguggccguccccaccggcuacguggacacccccaacaacaccgacuucagccgcguguccgcgaagcccccgcccggggaccaguucaagcaccugaucccccucauguacaagggccugcccuggaacgucgugcggaucaagaucgugcagaugcugagcgacacgcucaagaaccuguccgaccgcgucguguucgugcugugggcccacggcuucgagcucaccagcaugaaguacuucgucaagaucgggccggagcggaccugcugccugugcgaccgccgggcgaccugcuucuccacggccagcgacaccuacgccugcuggcaccacuccaucggcuucgacuacguguacaaccccuucaugaucgacgugcagcaguggggguucaccggcaaccugcagagcaaccacgaccucuacugccagguccacggcaacgcccacguggccuccugcgacgccaucaugacccgcugccuggccgugcacgagugcuucgucaagcggguggacuggacgaucgaguaccccaucaucggggacgagcugaagaucaacgcggccugccgcaagguccagcacaugguggugaaggccgcccuccuggccgacaaguuccccguccugcacgacaucggcaacccgaaggcgaucaagugcgugccccaggccgacguggaguggaaguucuacgacgcccagcccugcagcgacaaggccuacaagaucgaggagcuguucuacuccuacgccacccacagcgacaaguucaccgacggggucugccuguucuggaacugcaacguggaccgguaccccgcgaacuccaucgugugccgcuucgacacccggguccugagcaaccucaaccugccgggcugcgacgggggcucccuguacgugaacaagcacgccuuccacacgcccgccuucgacaagagcgccuucgugaaccucaagcagcugcccuucuucuacuacagcgacucccccugcgagagccacggcaagcaggucguguccgacaucgacuacgugccgcucaagagcgcgaccugcaucacccgcugcaaccucgggggcgccgucugccggcaccacgccaacgaguaccgccuguaccuggacgccuacaacaugaugaucuccgccggguucagccucuggguguacaagcaguucgacaccuacaaccuguggaacacguucacccggcugcagugaggacuagucccuguucccagagcccacuuuuuuuucuuuuuuugaaauaaaauagccugucuuucagaucuaaaaaaaaaaaaaaaaaaaaaaaaaaaaaaaaaaaaaaaaaaaaaaaaaaaaaaaaaaaaaaaaaaaaaaaaaaaaaaaaaaaaaaaaaaaaaaaaaaaa

SEQ ID NO: 28282 - RNA, 917 nt, Artificial Sequence
  SARS-CoV-2/Wuhan-Hu-1__NC_045512.2/MN908947.2/EPI_ISL_402128__mem brane protein (M) mRNA gc (1-222)(I82T)
aggagagucccgcagucggcguccagcggcucugcuuguucgugugugugucguugcaggccuuauucaagcuuaccauggccgacagcaacggcaccaucaccguggaggagcugaagaagcuccuggagcaguggaaccuggucaucggguuccucuuccugacguggaucugccugcuccaguucgccuacgcgaaccgcaaccgguuccuguacaucaucaagcugaucuuccucuggcugcuguggcccgugacccucgccugcuucgugcuggccgccgucuaccgcaucaacuggaucaccggcgggaucgccaccgcgauggccugccuggugggccucauguggcuguccuacuucaucgccagcuuccggcuguucgcccgcacccgguccauguggagcuucaacccggagacgaacauccuccugaacgugccccugcacgggaccauccucacccgcccccugcuggaguccgagcucgucaucggcgcggugauccugcggggccaccuccgcaucgccgggcaccaccugggccggugcgacaucaaggaccugcccaaggagaucaccguggccacgagccgcacccuguccuacuacaagcucggggccagccagcgggucgccggcgacuccggguucgcggccuacagccgcuaccggaucggcaacuacaagcugaacaccgaccacuccagcuccagcgacaacaucgcccugcucgugcagugaggacuagucccuguucccagagcccacuuuuuuuucuuuuuuugaaauaaaauagccugucuuucagaucuaaaaaaaaaaaaaaaaaaaaaaaaaaaaaaaaaaaaaaaaaaaaaaaaaaaaaaaaaaaaaaaaaaaaaaaaaaaaaaaaaaaaaaaaaaaaaaaaaaaa

SEQ ID NO: 28283 - RNA, 917 nt, Artificial Sequence
  SARS-CoV-2/Wuhan-Hu-1__NC_045512.2/MN908947.2/EPI_ISL_402128__mem brane protein (M) mRNA gc (1-222)(A2S_F28L_V70L)
aggagagucccgcagucggcguccagcggcucugcuuguucgugugugugucguugcaggccuuauucaagcuuaccaugagcgacagcaacggcaccaucaccguggaggagcugaagaagcuccuggagcaguggaaccuggucaucggguuccuccugcugacguggaucugccugcuccaguucgccuacgcgaaccgcaaccgguuccuguacaucaucaagcugaucuuccucuggcugcuguggcccgugacccucgccugcuucgugcuggccgcccuguaccgcaucaacuggaucaccggcgggaucgccaucgcgauggccugccuggugggccucauguggcuguccuacuucaucgccagcuuccggcuguucgcccgcacccgguccauguggagcuucaacccggagacgaacauccuccugaacgugccccugcacgggaccauccucacccgcccccugcuggaguccgagcucgucaucggcgcggugauccugcggggccaccuccgcaucgccgggcaccaccugggccggugcgacaucaaggaccugcccaaggagaucaccguggccacgagccgcacccuguccuacuacaagcucggggccagccagcgggucgccggcgacuccggguucgcggccuacagccgcuaccggaucggcaacuacaagcugaacaccgaccacuccagcuccagcgacaacaucgcccugcucgugcagugaggacuagucccuguucccagagcccacuuuuuuuucuuuuuuugaaauaaaauagccugucuuucagaucuaaaaaaaaaaaaaaaaaaaaaaaaaaaaaaaaaaaaaaaaaaaaaaaaaaaaaaaaaaaaaaaaaaaaaaaaaaaaaaaaaaaaaaaaaaaaaaaaaaaa

SEQ ID NO: 28284 - RNA, 917 nt, Artificial Sequence
  SARS-CoV-2/Wuhan-Hu-1__NC_045512.2/MN908947.2/EPI_ISL_402128__mem brane protein (M) mRNA gc (1-222)(A2T_I201V)
aggagagucccgcagucggcguccagcggcucugcuuguucgugugugugucguugcaggccuuauucaagcuuaccaugaccgacagcaacggcaccaucaccguggaggagcugaagaagcuccuggagcaguggaaccuggucaucggguuccucuuccugacguggaucugccugcuccaguucgccuacgcgaaccgcaaccgguuccuguacaucaucaagcugaucuuccucuggcugcuguggcccgugacccucgccugcuucgugcuggccgccgucuaccgcaucaacuggaucaccggcgggaucgccaucgcgauggccugccuggugggccucauguggcuguccuacuucaucgccagcuuccggcuguucgcccgcacccgguccauguggagcuucaacccggagacgaacauccuccugaacgugccccugcacgggaccauccucacccgcccccugcuggaguccgagcucgucaucggcgcggugauccugcggggccaccuccgcaucgccgggcaccaccugggccggugcgacaucaaggaccugcccaaggagaucaccguggccacgagccgcacccuguccuacuacaagcucggggccagccagcgggucgccggcgacuccggguucgcggccuacagccgcuaccgggugggcaacuacaagcugaacaccgaccacuccagcuccagcgacaacaucgcccugcucgugcagugaggacuagucccuguucccagagcccacuuuuuuuucuuuuuuugaaauaaaauagccugucuuucagaucuaaaaaaaaaaaaaaaaaaaaaaaaaaaaaaaaaaaaaaaaaaaaaaaaaaaaaaaaaaaaaaaaaaaaaaaaaaaaaaaaaaaaaaaaaaaaaaaaaaaa

SEQ ID NO: 28285 - RNA, 917 nt, Artificial Sequence
  SARS-CoV-2/Wuhan-Hu-1__NC_045512.2/MN908947.2/EPI_ISL_402128__mem brane protein (M) mRNA gc (1-222)(N121K_H125Y_H148Y_H155Y_K162N)
aggagagucccgcagucggcguccagcggcucugcuuguucgugugugugucguugcaggccuuauucaagcuuaccauggccgacagcaacggcaccaucaccguggaggagcugaagaagcuccuggagcaguggaaccuggucaucggguuccucuuccugacguggaucugccugcuccaguucgccuacgcgaaccgcaaccgguuccuguacaucaucaagcugaucuuccucuggcugcuguggcccgugacccucgccugcuucgugcuggccgccgucuaccgcaucaacuggaucaccggcgggaucgccaucgcgauggccugccuggugggccucauguggcuguccuacuucaucgccagcuuccggcuguucgcccgcacccgguccauguggagcuucaacccggagacgaacauccuccugaaggugccccuguacgggaccauccucacccgcccccugcuggaguccgagcucgucaucggcgcggugauccugcggggcuaccuccgcaucgccgggcacuaccugggccggugcgacaucaacgaccugcccaaggagaucaccguggccacgagccgcacccuguccuacuacaagcucggggccagccagcgggucgccggcgacuccggguucgcggccuacagccgcuaccggaucggcaacuacaagcugaacaccgaccacuccagcuccagcgacaacaucgcccugcucgugcagugaggacuagucccuguucccagagcccacuuuuuuuucuuuuuuugaaauaaaauagccugucuuucagaucuaaaaaaaaaaaaaaaaaaaaaaaaaaaaaaaaaaaaaaaaaaaaaaaaaaaaaaaaaaaaaaaaaaaaaaaaaaaaaaaaaaaaaaaaaaaaaaaaaaaa

SEQ ID NO: 28286 - RNA, 917 nt, Artificial Sequence
  SARS-CoV-2/Wuhan-Hu-1__NC_045512.2/MN908947.2/EPI_ISL_402128__mem brane protein (M) mRNA gc (1-222)(A63T_H125Y)
aggagagucccgcagucggcguccagcggcucugcuuguucgugugugugucguugcaggccuuauucaagcuuaccauggccgacagcaacggcaccaucaccguggaggagcugaagaagcuccuggagcaguggaaccuggucaucggguuccucuuccugacguggaucugccugcuccaguucgccuacgcgaaccgcaaccgguuccuguacaucaucaagcugaucuuccucuggcugcuguggcccgugacccucaccugcuucgugcuggccgccgucuaccgcaucaacuggaucaccggcgggaucgccaucgcgauggccugccuggugggccucauguggcuguccuacuucaucgccagcuuccggcuguucgcccgcacccgguccauguggagcuucaacccggagacgaacauccuccugaacgugccccuguacgggaccauccucacccgcccccugcuggaguccgagcucgucaucggcgcggugauccugcggggccaccuccgcaucgccgggcaccaccugggccggugcgacaucaaggaccugcccaaggagaucaccguggccacgagccgcacccuguccuacuacaagcucggggccagccagcgggucgccggcgacuccggguucgcggccuacagccgcuaccggaucggcaacuacaagcugaacaccgaccacuccagcuccagcgacaacaucgcccugcucgugcagugaggacuagucccuguucccagagcccacuuuuuuuucuuuuuuugaaauaaaauagccugucuuucagaucuaaaaaaaaaaaaaaaaaaaaaaaaaaaaaaaaaaaaaaaaaaaaaaaaaaaaaaaaaaaaaaaaaaaaaaaaaaaaaaaaaaaaaaaaaaaaaaaaaaaa

SEQ ID NO: 28287 - RNA, 917 nt, Artificial Sequence
  SARS-CoV-2/Wuhan-Hu-1__NC_045512.2/MN908947.2/EPI_ISL_402128__mem brane protein (M) mRNA gc (1-222)(A2S_M109I_H125Y)
aggagagucccgcagucggcguccagcggcucugcuuguucgugugugugucguugcaggccuuauucaagcuuaccaugagcgacagcaacggcaccaucaccguggaggagcugaagaagcuccuggagcaguggaaccuggucaucggguuccucuuccugacguggaucugccugcuccaguucgccuacgcgaaccgcaaccgguuccuguacaucaucaagcugaucuuccucuggcugcuguggcccgugacccucgccugcuucgugcuggccgccgucuaccgcaucaacuggaucaccggcgggaucgccaucgcgauggccugccuggugggccucauguggcuguccuacuucaucgccagcuuccggcuguucgcccgcacccgguccaucuggagcuucaacccggagacgaacauccuccugaacgugccccuguacgggaccauccucacccgcccccugcuggaguccgagcucgucaucggcgcggugauccugcggggccaccuccgcaucgccgggcaccaccugggccggugcgacaucaaggaccugcccaaggagaucaccguggccacgagccgcacccuguccuacuacaagcucggggccagccagcgggucgccggcgacuccggguucgcggccuacagccgcuaccggaucggcaacuacaagcugaacaccgaccacuccagcuccagcgacaacaucgcccugcucgugcagugaggacuagucccuguucccagagcccacuuuuuuuucuuuuuuugaaauaaaauagccugucuuucagaucuaaaaaaaaaaaaaaaaaaaaaaaaaaaaaaaaaaaaaaaaaaaaaaaaaaaaaaaaaaaaaaaaaaaaaaaaaaaaaaaaaaaaaaaaaaaaaaaaaaaa

SEQ ID NO: 28288 - RNA, 917 nt, Artificial Sequence
  SARS-CoV-2/Wuhan-Hu-1__NC_045512.2/MN908947.2/EPI_ISL_402128__mem brane protein (M) mRNA gc (1-222)(A2V_M109I_H125Y)
aggagagucccgcagucggcguccagcggcucugcuuguucgugugugugucguugcaggccuuauucaagcuuaccaugguggacagcaacggcaccaucaccguggaggagcugaagaagcuccuggagcaguggaaccuggucaucggguuccucuuccugacguggaucugccugcuccaguucgccuacgcgaaccgcaaccgguuccuguacaucaucaagcugaucuuccucuggcugcuguggcccgugacccucgccugcuucgugcuggccgccgucuaccgcaucaacuggaucaccggcgggaucgccaucgcgauggccugccuggugggccucauguggcuguccuacuucaucgccagcuuccggcuguucgcccgcacccgguccaucuggagcuucaacccggagacgaacauccuccugaacgugccccuguacgggaccauccucacccgcccccugcuggaguccgagcucgucaucggcgcggugauccugcggggccaccuccgcaucgccgggcaccaccugggccggugcgacaucaaggaccugcccaaggagaucaccguggccacgagccgcacccuguccuacuacaagcucggggccagccagcgggucgccggcgacuccggguucgcggccuacagccgcuaccggaucggcaacuacaagcugaacaccgaccacuccagcuccagcgacaacaucgcccugcucgugcagugaggacuagucccuguucccagagcccacuuuuuuuucuuuuuuugaaauaaaauagccugucuuucagaucuaaaaaaaaaaaaaaaaaaaaaaaaaaaaaaaaaaaaaaaaaaaaaaaaaaaaaaaaaaaaaaaaaaaaaaaaaaaaaaaaaaaaaaaaaaaaaaaaaaaa

SEQ ID NO: 28289 - RNA, 917 nt, Artificial Sequence
  SARS-CoV-2/Wuhan-Hu-1__NC_045512.2/MN908947.2/EPI_ISL_402128__mem brane protein (M) mRNA gc (1-222)(L17F_M109I)
aggagagucccgcagucggcguccagcggcucugcuuguucgugugugugucguugcaggccuuauucaagcuuaccauggccgacagcaacggcaccaucaccguggaggagcugaagaagcucuucgagcaguggaaccuggucaucggguuccucuuccugacguggaucugccugcuccaguucgccuacgcgaaccgcaaccgguuccuguacaucaucaagcugaucuuccucuggcugcuguggcccgugacccucgccugcuucgugcuggccgccgucuaccgcaucaacuggaucaccggcgggaucgccaucgcgauggccugccuggugggccucauguggcuguccuacuucaucgccagcuuccggcuguucgcccgcacccgguccaucuggagcuucaacccggagacgaacauccuccugaacgugccccugcacgggaccauccucacccgcccccugcuggaguccgagcucgucaucggcgcggugauccugcggggccaccuccgcaucgccgggcaccaccugggccggugcgacaucaaggaccugcccaaggagaucaccguggccacgagccgcacccuguccuacuacaagcucggggccagccagcgggucgccggcgacuccggguucgcggccuacagccgcuaccggaucggcaacuacaagcugaacaccgaccacuccagcuccagcgacaacaucgcccugcucgugcagugaggacuagucccuguucccagagcccacuuuuuuuucuuuuuuugaaauaaaauagccugucuuucagaucuaaaaaaaaaaaaaaaaaaaaaaaaaaaaaaaaaaaaaaaaaaaaaaaaaaaaaaaaaaaaaaaaaaaaaaaaaaaaaaaaaaaaaaaaaaaaaaaaaaaa

SEQ ID NO: 28290 - RNA, 1505 nt, Artificial Sequence
  SARS-CoV-2/Wuhan-Hu-1__NC_045512.2/MN908947.2/EPI_ISL_402128__nuc leocapsid protein (N) mRNA gc (1-419)(D3L_R203K_G204R_S235F)
aggagagucccgcagucggcguccagcggcucugcuuguucgugugugugucguugcaggccuuauucaagcuuaccaugagcaacggcccccagaaccagcgcaacgccccgcggaucaccuucgggggccccuccgacagcaccggguccaaccagaacggcgagcgcagcggggcccgguccaagcagcgccggccccagggccugcccaacaacacggcgagcugguucaccgcccucacccagcacggcaaggaggaccugaaguucccgcgcgggcagggcgugcccaucaacaccaacuccagccccgacgaccagaucggguacuaccggcgcgccacgcggcgcauccggggcggggacggcaagaugaaggaccugagcccccgcugguacuucuacuaccucggcaccgggccggaggccggccugcccuacggggccaacaaggacggcaucaucugggucgcgaccgagggcgcccugaacacccccaaggaccacaucgggacgcggaaccccgccaacaacgccgcgaucgugcuccagcugccgcagggcaccacccugcccaagggguucuacgccgagggcucccgcgggggcucccaggccagcucccggagcuccagccgcucccggaacagcucccgcaacagcacccccggcagcuccaagcgcacgagccccgcccgcauggccggcaacgggggcgacgcggcccucgcccugcugcuccuggaccggcugaaccagcucgaguccaagauguucgggaagggccagcagcagcagggccagaccgugaccaagaaguccgccgccgaggcgagcaagaagccgcgccagaagcgcaccgccacgaaggccuacaacgucacccaggccuucgggcggcgcggccccgagcagacccaggggaacuucggcgaccaggagcugauccggcaggggaccgacuacaagcacuggccccagaucgcccaguucgcgcccuccgccagcgccuucuucggcaugucccgcaucggcauggaggugacgccgagcgggaccuggcugaccuacaccggcgccaucaagcucgacgacaaggaccccaacuucaaggaccaggugauccugcugaacaagcacaucgacgccuacaagacguucccgcccaccgagcccaagaaggacaagaagaagaaggcggacgagacccaggcccucccccagcggcagaagaagcagcagaccgucacgcugcugcccgccgccgaccucgacgacuucuccaagcagcugcagcagagcauguccagcgcggacuccacccaggccugaggacuagucccuguucccagagcccacuuuuuuuucuuuuuuugaaauaaaauagccugucuuucagaucuaaaaaaaaaaaaaaaaaaaaaaaaaaaaaaaaaaaaaaaaaaaaaaaaaaaaaaaaaaaaaaaaaaaaaaaaaaaaaaaaaaaaaaaaaaaaaaaaaaaa

SEQ ID NO: 28291 - RNA, 1508 nt, Artificial Sequence
  SARS-CoV-2/Wuhan-Hu-1__NC_045512.2/MN908947.2/EPI_ISL_402128__nuc leocapsid protein (N) mRNA gc (1-419)(T205I)
aggagagucccgcagucggcguccagcggcucugcuuguucgugugugugucguugcaggccuuauucaagcuuaccaugagcgacaacggcccccagaaccagcgcaacgccccgcggaucaccuucgggggccccuccgacagcaccggguccaaccagaacggcgagcgcagcggggcccgguccaagcagcgccggccccagggccugcccaacaacacggcgagcugguucaccgcccucacccagcacggcaaggaggaccugaaguucccgcgcgggcagggcgugcccaucaacaccaacuccagccccgacgaccagaucggguacuaccggcgcgccacgcggcgcauccggggcggggacggcaagaugaaggaccugagcccccgcugguacuucuacuaccucggcaccgggccggaggccggccugcccuacggggccaacaaggacggcaucaucugggucgcgaccgagggcgcccugaacacccccaaggaccacaucgggacgcggaaccccgccaacaacgccgcgaucgugcuccagcugccgcagggcaccacccugcccaagggguucuacgccgagggcucccgcgggggcucccaggccagcucccggagcuccagccgcucccggaacagcucccgcaacagcacccccggcagcucccgggggaucagccccgcccgcauggccggcaacgggggcgacgcggcccucgcccugcugcuccuggaccggcugaaccagcucgaguccaagaugagcgggaagggccagcagcagcagggccagaccgugaccaagaaguccgccgccgaggcgagcaagaagccgcgccagaagcgcaccgccacgaaggccuacaacgucacccaggccuucgggcggcgcggccccgagcagacccaggggaacuucggcgaccaggagcugauccggcaggggaccgacuacaagcacuggccccagaucgcccaguucgcgcccuccgccagcgccuucuucggcaugucccgcaucggcauggaggugacgccgagcgggaccuggcugaccuacaccggcgccaucaagcucgacgacaaggaccccaacuucaaggaccaggugauccugcugaacaagcacaucgacgccuacaagacguucccgcccaccgagcccaagaaggacaagaagaagaaggcggacgagacccaggcccucccccagcggcagaagaagcagcagaccgucacgcugcugcccgccgccgaccucgacgacuucuccaagcagcugcagcagagcauguccagcgcggacuccacccaggccugaggacuagucccuguucccagagcccacuuuuuuuucuuuuuuugaaauaaaauagccugucuuucagaucuaaaaaaaaaaaaaaaaaaaaaaaaaaaaaaaaaaaaaaaaaaaaaaaaaaaaaaaaaaaaaaaaaaaaaaaaaaaaaaaaaaaaaaaaaaaaaaaaaaaa

SEQ ID NO: 28292 - RNA, 1508 nt, Artificial Sequence
  SARS-CoV-2/Wuhan-Hu-1__NC_045512.2/MN908947.2/EPI_ISL_402128__nuc leocapsid protein (N) mRNA gc (1-419)(P80R)
aggagagucccgcagucggcguccagcggcucugcuuguucgugugugugucguugcaggccuuauucaagcuuaccaugagcgacaacggcccccagaaccagcgcaacgccccgcggaucaccuucgggggccccuccgacagcaccggguccaaccagaacggcgagcgcagcggggcccgguccaagcagcgccggccccagggccugcccaacaacacggcgagcugguucaccgcccucacccagcacggcaaggaggaccugaaguucccgcgcgggcagggcgugcccaucaacaccaacuccagccgcgacgaccagaucggguacuaccggcgcgccacgcggcgcauccggggcggggacggcaagaugaaggaccugagcccccgcugguacuucuacuaccucggcaccgggccggaggccggccugcccuacggggccaacaaggacggcaucaucugggucgcgaccgagggcgcccugaacacccccaaggaccacaucgggacgcggaaccccgccaacaacgccgcgaucgugcuccagcugccgcagggcaccacccugcccaagggguucuacgccgagggcucccgcgggggcucccaggccagcucccggagcuccagccgcucccggaacagcucccgcaacagcacccccggcagcucccgggggacgagccccgcccgcauggccggcaacgggggcgacgcggcccucgcccugcugcuccuggaccggcugaaccagcucgaguccaagaugagcgggaagggccagcagcagcagggccagaccgugaccaagaaguccgccgccgaggcgagcaagaagccgcgccagaagcgcaccgccacgaaggccuacaacgucacccaggccuucgggcggcgcggccccgagcagacccaggggaacuucggcgaccaggagcugauccggcaggggaccgacuacaagcacuggccccagaucgcccaguucgcgcccuccgccagcgccuucuucggcaugucccgcaucggcauggaggugacgccgagcgggaccuggcugaccuacaccggcgccaucaagcucgacgacaaggaccccaacuucaaggaccaggugauccugcugaacaagcacaucgacgccuacaagacguucccgcccaccgagcccaagaaggacaagaagaagaaggcggacgagacccaggcccucccccagcggcagaagaagcagcagaccgucacgcugcugcccgccgccgaccucgacgacuucuccaagcagcugcagcagagcauguccagcgcggacuccacccaggccugaggacuagucccuguucccagagcccacuuuuuuuucuuuuuuugaaauaaaauagccugucuuucagaucuaaaaaaaaaaaaaaaaaaaaaaaaaaaaaaaaaaaaaaaaaaaaaaaaaaaaaaaaaaaaaaaaaaaaaaaaaaaaaaaaaaaaaaaaaaaaaaaaaaaa

SEQ ID NO: 28293 - RNA, 1508 nt, Artificial Sequence
  SARS-CoV-2/Wuhan-Hu-1__NC_045512.2/MN908947.2/EPI_ISL_402128__nuc leocapsid protein (N) mRNA gc (1-419)(P80R_R203K_G204R)
aggagagucccgcagucggcguccagcggcucugcuuguucgugugugugucguugcaggccuuauucaagcuuaccaugagcgacaacggcccccagaaccagcgcaacgccccgcggaucaccuucgggggccccuccgacagcaccggguccaaccagaacggcgagcgcagcggggcccgguccaagcagcgccggccccagggccugcccaacaacacggcgagcugguucaccgcccucacccagcacggcaaggaggaccugaaguucccgcgcgggcagggcgugcccaucaacaccaacuccagccgcgacgaccagaucggguacuaccggcgcgccacgcggcgcauccggggcggggacggcaagaugaaggaccugagcccccgcugguacuucuacuaccucggcaccgggccggaggccggccugcccuacggggccaacaaggacggcaucaucugggucgcgaccgagggcgcccugaacacccccaaggaccacaucgggacgcggaaccccgccaacaacgccgcgaucgugcuccagcugccgcagggcaccacccugcccaagggguucuacgccgagggcucccgcgggggcucccaggccagcucccggagcuccagccgcucccggaacagcucccgcaacagcacccccggcagcuccaagcgcacgagccccgcccgcauggccggcaacgggggcgacgcggcccucgcccugcugcuccuggaccggcugaaccagcucgaguccaagaugagcgggaagggccagcagcagcagggccagaccgugaccaagaaguccgccgccgaggcgagcaagaagccgcgccagaagcgcaccgccacgaaggccuacaacgucacccaggccuucgggcggcgcggccccgagcagacccaggggaacuucggcgaccaggagcugauccggcaggggaccgacuacaagcacuggccccagaucgcccaguucgcgcccuccgccagcgccuucuucggcaugucccgcaucggcauggaggugacgccgagcgggaccuggcugaccuacaccggcgccaucaagcucgacgacaaggaccccaacuucaaggaccaggugauccugcugaacaagcacaucgacgccuacaagacguucccgcccaccgagcccaagaaggacaagaagaagaaggcggacgagacccaggcccucccccagcggcagaagaagcagcagaccgucacgcugcugcccgccgccgaccucgacgacuucuccaagcagcugcagcagagcauguccagcgcggacuccacccaggccugaggacuagucccuguucccagagcccacuuuuuuuucuuuuuuugaaauaaaauagccugucuuucagaucuaaaaaaaaaaaaaaaaaaaaaaaaaaaaaaaaaaaaaaaaaaaaaaaaaaaaaaaaaaaaaaaaaaaaaaaaaaaaaaaaaaaaaaaaaaaaaaaaaaaa

SEQ ID NO: 28294 - RNA, 1508 nt, Artificial Sequence
  SARS-CoV-2/Wuhan-Hu-1__NC_045512.2/MN908947.2/EPI_ISL_402128__nuc leocapsid protein (N) mRNA gc (1-419)(D63G_R203M_G215C_D377Y)
aggagagucccgcagucggcguccagcggcucugcuuguucgugugugugucguugcaggccuuauucaagcuuaccaugagcgacaacggcccccagaaccagcgcaacgccccgcggaucaccuucgggggccccuccgacagcaccggguccaaccagaacggcgagcgcagcggggcccgguccaagcagcgccggccccagggccugcccaacaacacggcgagcugguucaccgcccucacccagcacggcaaggagggccugaaguucccgcgcgggcagggcgugcccaucaacaccaacuccagccccgacgaccagaucggguacuaccggcgcgccacgcggcgcauccggggcggggacggcaagaugaaggaccugagcccccgcugguacuucuacuaccucggcaccgggccggaggccggccugcccuacggggccaacaaggacggcaucaucugggucgcgaccgagggcgcccugaacacccccaaggaccacaucgggacgcggaaccccgccaacaacgccgcgaucgugcuccagcugccgcagggcaccacccugcccaagggguucuacgccgagggcucccgcgggggcucccaggccagcucccggagcuccagccgcucccggaacagcucccgcaacagcacccccggcagcuccauggggacgagccccgcccgcauggccggcaacgggugcgacgcggcccucgcccugcugcuccuggaccggcugaaccagcucgaguccaagaugagcgggaagggccagcagcagcagggccagaccgugaccaagaaguccgccgccgaggcgagcaagaagccgcgccagaagcgcaccgccacgaaggccuacaacgucacccaggccuucgggcggcgcggccccgagcagacccaggggaacuucggcgaccaggagcugauccggcaggggaccgacuacaagcacuggccccagaucgcccaguucgcgcccuccgccagcgccuucuucggcaugucccgcaucggcauggaggugacgccgagcgggaccuggcugaccuacaccggcgccaucaagcucgacgacaaggaccccaacuucaaggaccaggugauccugcugaacaagcacaucgacgccuacaagacguucccgcccaccgagcccaagaaggacaagaagaagaaggcguacgagacccaggcccucccccagcggcagaagaagcagcagaccgucacgcugcugcccgccgccgaccucgacgacuucuccaagcagcugcagcagagcauguccagcgcggacuccacccaggccugaggacuagucccuguucccagagcccacuuuuuuuucuuuuuuugaaauaaaauagccugucuuucagaucuaaaaaaaaaaaaaaaaaaaaaaaaaaaaaaaaaaaaaaaaaaaaaaaaaaaaaaaaaaaaaaaaaaaaaaaaaaaaaaaaaaaaaaaaaaaaaaaaaaaa

SEQ ID NO: 28295 - RNA, 1508 nt, Artificial Sequence
  SARS-CoV-2/Wuhan-Hu-1__NC_045512.2/MN908947.2/EPI_ISL_402128__nuc leocapsid protein (N) mRNA gc (1-419)(D63G_R203M_D377Y)
aggagagucccgcagucggcguccagcggcucugcuuguucgugugugugucguugcaggccuuauucaagcuuaccaugagcgacaacggcccccagaaccagcgcaacgccccgcggaucaccuucgggggccccuccgacagcaccggguccaaccagaacggcgagcgcagcggggcccgguccaagcagcgccggccccagggccugcccaacaacacggcgagcugguucaccgcccucacccagcacggcaaggagggccugaaguucccgcgcgggcagggcgugcccaucaacaccaacuccagccccgacgaccagaucggguacuaccggcgcgccacgcggcgcauccggggcggggacggcaagaugaaggaccugagcccccgcugguacuucuacuaccucggcaccgggccggaggccggccugcccuacggggccaacaaggacggcaucaucugggucgcgaccgagggcgcccugaacacccccaaggaccacaucgggacgcggaaccccgccaacaacgccgcgaucgugcuccagcugccgcagggcaccacccugcccaagggguucuacgccgagggcucccgcgggggcucccaggccagcucccggagcuccagccgcucccggaacagcucccgcaacagcacccccggcagcuccauggggacgagccccgcccgcauggccggcaacgggggcgacgcggcccucgcccugcugcuccuggaccggcugaaccagcucgaguccaagaugagcgggaagggccagcagcagcagggccagaccgugaccaagaaguccgccgccgaggcgagcaagaagccgcgccagaagcgcaccgccacgaaggccuacaacgucacccaggccuucgggcggcgcggccccgagcagacccaggggaacuucggcgaccaggagcugauccggcaggggaccgacuacaagcacuggccccagaucgcccaguucgcgcccuccgccagcgccuucuucggcaugucccgcaucggcauggaggugacgccgagcgggaccuggcugaccuacaccggcgccaucaagcucgacgacaaggaccccaacuucaaggaccaggugauccugcugaacaagcacaucgacgccuacaagacguucccgcccaccgagcccaagaaggacaagaagaagaaggcguacgagacccaggcccucccccagcggcagaagaagcagcagaccgucacgcugcugcccgccgccgaccucgacgacuucuccaagcagcugcagcagagcauguccagcgcggacuccacccaggccugaggacuagucccuguucccagagcccacuuuuuuuucuuuuuuugaaauaaaauagccugucuuucagaucuaaaaaaaaaaaaaaaaaaaaaaaaaaaaaaaaaaaaaaaaaaaaaaaaaaaaaaaaaaaaaaaaaaaaaaaaaaaaaaaaaaaaaaaaaaaaaaaaaaaa

SEQ ID NO: 28296 - RNA, 1508 nt, Artificial Sequence
  SARS-CoV-2/Wuhan-Hu-1__NC_045512.2/MN908947.2/EPI_ISL_402128__nuc leocapsid protein (N) mRNA gc (1-419)(T205I_T362I)
aggagagucccgcagucggcguccagcggcucugcuuguucgugugugugucguugcaggccuuauucaagcuuaccaugagcgacaacggcccccagaaccagcgcaacgccccgcggaucaccuucgggggccccuccgacagcaccggguccaaccagaacggcgagcgcagcggggcccgguccaagcagcgccggccccagggccugcccaacaacacggcgagcugguucaccgcccucacccagcacggcaaggaggaccugaaguucccgcgcgggcagggcgugcccaucaacaccaacuccagccccgacgaccagaucggguacuaccggcgcgccacgcggcgcauccggggcggggacggcaagaugaaggaccugagcccccgcugguacuucuacuaccucggcaccgggccggaggccggccugcccuacggggccaacaaggacggcaucaucugggucgcgaccgagggcgcccugaacacccccaaggaccacaucgggacgcggaaccccgccaacaacgccgcgaucgugcuccagcugccgcagggcaccacccugcccaagggguucuacgccgagggcucccgcgggggcucccaggccagcucccggagcuccagccgcucccggaacagcucccgcaacagcacccccggcagcucccgggggaucagccccgcccgcauggccggcaacgggggcgacgcggcccucgcccugcugcuccuggaccggcugaaccagcucgaguccaagaugagcgggaagggccagcagcagcagggccagaccgugaccaagaaguccgccgccgaggcgagcaagaagccgcgccagaagcgcaccgccacgaaggccuacaacgucacccaggccuucgggcggcgcggccccgagcagacccaggggaacuucggcgaccaggagcugauccggcaggggaccgacuacaagcacuggccccagaucgcccaguucgcgcccuccgccagcgccuucuucggcaugucccgcaucggcauggaggugacgccgagcgggaccuggcugaccuacaccggcgccaucaagcucgacgacaaggaccccaacuucaaggaccaggugauccugcugaacaagcacaucgacgccuacaagaucuucccgcccaccgagcccaagaaggacaagaagaagaaggcggacgagacccaggcccucccccagcggcagaagaagcagcagaccgucacgcugcugcccgccgccgaccucgacgacuucuccaagcagcugcagcagagcauguccagcgcggacuccacccaggccugaggacuagucccuguucccagagcccacuuuuuuuucuuuuuuugaaauaaaauagccugucuuucagaucuaaaaaaaaaaaaaaaaaaaaaaaaaaaaaaaaaaaaaaaaaaaaaaaaaaaaaaaaaaaaaaaaaaaaaaaaaaaaaaaaaaaaaaaaaaaaaaaaaaaa

SEQ ID NO: 28297 - RNA, 1505 nt, Artificial Sequence
  SARS-CoV-2/Wuhan-Hu-1__NC_045512.2/MN908947.2/EPI_ISL_402128__nuc leocapsid protein (N) mRNA gc (1-419)(S2Y_D3del_A12G_T205I)
aggagagucccgcagucggcguccagcggcucugcuuguucgugugugugucguugcaggccuuauucaagcuuaccauguacaacggcccccagaaccagcgcaacggcccgcggaucaccuucgggggccccuccgacagcaccggguccaaccagaacggcgagcgcagcggggcccgguccaagcagcgccggccccagggccugcccaacaacacggcgagcugguucaccgcccucacccagcacggcaaggaggaccugaaguucccgcgcgggcagggcgugcccaucaacaccaacuccagccccgacgaccagaucggguacuaccggcgcgccacgcggcgcauccggggcggggacggcaagaugaaggaccugagcccccgcugguacuucuacuaccucggcaccgggccggaggccggccugcccuacggggccaacaaggacggcaucaucugggucgcgaccgagggcgcccugaacacccccaaggaccacaucgggacgcggaaccccgccaacaacgccgcgaucgugcuccagcugccgcagggcaccacccugcccaagggguucuacgccgagggcucccgcgggggcucccaggccagcucccggagcuccagccgcucccggaacagcucccgcaacagcacccccggcagcucccgggggaucagccccgcccgcauggccggcaacgggggcgacgcggcccucgcccugcugcuccuggaccggcugaaccagcucgaguccaagaugagcgggaagggccagcagcagcagggccagaccgugaccaagaaguccgccgccgaggcgagcaagaagccgcgccagaagcgcaccgccacgaaggccuacaacgucacccaggccuucgggcggcgcggccccgagcagacccaggggaacuucggcgaccaggagcugauccggcaggggaccgacuacaagcacuggccccagaucgcccaguucgcgcccuccgccagcgccuucuucggcaugucccgcaucggcauggaggugacgccgagcgggaccuggcugaccuacaccggcgccaucaagcucgacgacaaggaccccaacuucaaggaccaggugauccugcugaacaagcacaucgacgccuacaagacguucccgcccaccgagcccaagaaggacaagaagaagaaggcggacgagacccaggcccucccccagcggcagaagaagcagcagaccgucacgcugcugcccgccgccgaccucgacgacuucuccaagcagcugcagcagagcauguccagcgcggacuccacccaggccugaggacuagucccuguucccagagcccacuuuuuuuucuuuuuuugaaauaaaauagccugucuuucagaucuaaaaaaaaaaaaaaaaaaaaaaaaaaaaaaaaaaaaaaaaaaaaaaaaaaaaaaaaaaaaaaaaaaaaaaaaaaaaaaaaaaaaaaaaaaaaaaaaaaaa

SEQ ID NO: 28298 - RNA, 1508 nt, Artificial Sequence
  SARS-CoV-2/Wuhan-Hu-1__NC_045512.2/MN908947.2/EPI_ISL_402128__nuc leocapsid protein (N) mRNA gc (1-419)(P13L_R203K_G204R_G214C)
aggagagucccgcagucggcguccagcggcucugcuuguucgugugugugucguugcaggccuuauucaagcuuaccaugagcgacaacggcccccagaaccagcgcaacgcccugcggaucaccuucgggggccccuccgacagcaccggguccaaccagaacggcgagcgcagcggggcccgguccaagcagcgccggccccagggccugcccaacaacacggcgagcugguucaccgcccucacccagcacggcaaggaggaccugaaguucccgcgcgggcagggcgugcccaucaacaccaacuccagccccgacgaccagaucggguacuaccggcgcgccacgcggcgcauccggggcggggacggcaagaugaaggaccugagcccccgcugguacuucuacuaccucggcaccgggccggaggccggccugcccuacggggccaacaaggacggcaucaucugggucgcgaccgagggcgcccugaacacccccaaggaccacaucgggacgcggaaccccgccaacaacgccgcgaucgugcuccagcugccgcagggcaccacccugcccaagggguucuacgccgagggcucccgcgggggcucccaggccagcucccggagcuccagccgcucccggaacagcucccgcaacagcacccccggcagcuccaagcgcacgagccccgcccgcauggccggcaacugcggcgacgcggcccucgcccugcugcuccuggaccggcugaaccagcucgaguccaagaugagcgggaagggccagcagcagcagggccagaccgugaccaagaaguccgccgccgaggcgagcaagaagccgcgccagaagcgcaccgccacgaaggccuacaacgucacccaggccuucgggcggcgcggccccgagcagacccaggggaacuucggcgaccaggagcugauccggcaggggaccgacuacaagcacuggccccagaucgcccaguucgcgcccuccgccagcgccuucuucggcaugucccgcaucggcauggaggugacgccgagcgggaccuggcugaccuacaccggcgccaucaagcucgacgacaaggaccccaacuucaaggaccaggugauccugcugaacaagcacaucgacgccuacaagacguucccgcccaccgagcccaagaaggacaagaagaagaaggcggacgagacccaggcccucccccagcggcagaagaagcagcagaccgucacgcugcugcccgccgccgaccucgacgacuucuccaagcagcugcagcagagcauguccagcgcggacuccacccaggccugaggacuagucccuguucccagagcccacuuuuuuuucuuuuuuugaaauaaaauagccugucuuucagaucuaaaaaaaaaaaaaaaaaaaaaaaaaaaaaaaaaaaaaaaaaaaaaaaaaaaaaaaaaaaaaaaaaaaaaaaaaaaaaaaaaaaaaaaaaaaaaaaaaaaa

SEQ ID NO: 28299 - RNA, 1508 nt, Artificial Sequence
  SARS-CoV-2/Wuhan-Hu-1__NC_045512.2/MN908947.2/EPI_ISL_402128__nuc leocapsid protein (N) mRNA gc (1-419)(P67S_R203M_D377Y)
aggagagucccgcagucggcguccagcggcucugcuuguucgugugugugucguugcaggccuuauucaagcuuaccaugagcgacaacggcccccagaaccagcgcaacgccccgcggaucaccuucgggggccccuccgacagcaccggguccaaccagaacggcgagcgcagcggggcccgguccaagcagcgccggccccagggccugcccaacaacacggcgagcugguucaccgcccucacccagcacggcaaggaggaccugaaguucagccgcgggcagggcgugcccaucaacaccaacuccagccccgacgaccagaucggguacuaccggcgcgccacgcggcgcauccggggcggggacggcaagaugaaggaccugagcccccgcugguacuucuacuaccucggcaccgggccggaggccggccugcccuacggggccaacaaggacggcaucaucugggucgcgaccgagggcgcccugaacacccccaaggaccacaucgggacgcggaaccccgccaacaacgccgcgaucgugcuccagcugccgcagggcaccacccugcccaagggguucuacgccgagggcucccgcgggggcucccaggccagcucccggagcuccagccgcucccggaacagcucccgcaacagcacccccggcagcuccauggggacgagccccgcccgcauggccggcaacgggggcgacgcggcccucgcccugcugcuccuggaccggcugaaccagcucgaguccaagaugagcgggaagggccagcagcagcagggccagaccgugaccaagaaguccgccgccgaggcgagcaagaagccgcgccagaagcgcaccgccacgaaggccuacaacgucacccaggccuucgggcggcgcggccccgagcagacccaggggaacuucggcgaccaggagcugauccggcaggggaccgacuacaagcacuggccccagaucgcccaguucgcgcccuccgccagcgccuucuucggcaugucccgcaucggcauggaggugacgccgagcgggaccuggcugaccuacaccggcgccaucaagcucgacgacaaggaccccaacuucaaggaccaggugauccugcugaacaagcacaucgacgccuacaagacguucccgcccaccgagcccaagaaggacaagaagaagaaggcguacgagacccaggcccucccccagcggcagaagaagcagcagaccgucacgcugcugcccgccgccgaccucgacgacuucuccaagcagcugcagcagagcauguccagcgcggacuccacccaggccugaggacuagucccuguucccagagcccacuuuuuuuucuuuuuuugaaauaaaauagccugucuuucagaucuaaaaaaaaaaaaaaaaaaaaaaaaaaaaaaaaaaaaaaaaaaaaaaaaaaaaaaaaaaaaaaaaaaaaaaaaaaaaaaaaaaaaaaaaaaaaaaaaaaaa

SEQ ID NO: 28300 - RNA, 1508 nt, Artificial Sequence
  SARS-CoV-2/Wuhan-Hu-1__NC_045512.2/MN908947.2/EPI_ISL_402128__nuc leocapsid protein (N) mRNA gc (1-419)(I157V_R203K_G204R)
aggagagucccgcagucggcguccagcggcucugcuuguucgugugugugucguugcaggccuuauucaagcuuaccaugagcgacaacggcccccagaaccagcgcaacgccccgcggaucaccuucgggggccccuccgacagcaccggguccaaccagaacggcgagcgcagcggggcccgguccaagcagcgccggccccagggccugcccaacaacacggcgagcugguucaccgcccucacccagcacggcaaggaggaccugaaguucccgcgcgggcagggcgugcccaucaacaccaacuccagccccgacgaccagaucggguacuaccggcgcgccacgcggcgcauccggggcggggacggcaagaugaaggaccugagcccccgcugguacuucuacuaccucggcaccgggccggaggccggccugcccuacggggccaacaaggacggcaucaucugggucgcgaccgagggcgcccugaacacccccaaggaccacaucgggacgcggaaccccgccaacaacgccgcgguggugcuccagcugccgcagggcaccacccugcccaagggguucuacgccgagggcucccgcgggggcucccaggccagcucccggagcuccagccgcucccggaacagcucccgcaacagcacccccggcagcuccaagcgcacgagccccgcccgcauggccggcaacgggggcgacgcggcccucgcccugcugcuccuggaccggcugaaccagcucgaguccaagaugagcgggaagggccagcagcagcagggccagaccgugaccaagaaguccgccgccgaggcgagcaagaagccgcgccagaagcgcaccgccacgaaggccuacaacgucacccaggccuucgggcggcgcggccccgagcagacccaggggaacuucggcgaccaggagcugauccggcaggggaccgacuacaagcacuggccccagaucgcccaguucgcgcccuccgccagcgccuucuucggcaugucccgcaucggcauggaggugacgccgagcgggaccuggcugaccuacaccggcgccaucaagcucgacgacaaggaccccaacuucaaggaccaggugauccugcugaacaagcacaucgacgccuacaagacguucccgcccaccgagcccaagaaggacaagaagaagaaggcggacgagacccaggcccucccccagcggcagaagaagcagcagaccgucacgcugcugcccgccgccgaccucgacgacuucuccaagcagcugcagcagagcauguccagcgcggacuccacccaggccugaggacuagucccuguucccagagcccacuuuuuuuucuuuuuuugaaauaaaauagccugucuuucagaucuaaaaaaaaaaaaaaaaaaaaaaaaaaaaaaaaaaaaaaaaaaaaaaaaaaaaaaaaaaaaaaaaaaaaaaaaaaaaaaaaaaaaaaaaaaaaaaaaaaaa

SEQ ID NO: 28301 - RNA, 1508 nt, Artificial Sequence
  SARS-CoV-2/Wuhan-Hu-1__NC_045512.2/MN908947.2/EPI_ISL_402128__nuc leocapsid protein (N) mRNA gc (1-419)(A119S_R203K_G204R_M234I)
aggagagucccgcagucggcguccagcggcucugcuuguucgugugugugucguugcaggccuuauucaagcuuaccaugagcgacaacggcccccagaaccagcgcaacgccccgcggaucaccuucgggggccccuccgacagcaccggguccaaccagaacggcgagcgcagcggggcccgguccaagcagcgccggccccagggccugcccaacaacacggcgagcugguucaccgcccucacccagcacggcaaggaggaccugaaguucccgcgcgggcagggcgugcccaucaacaccaacuccagccccgacgaccagaucggguacuaccggcgcgccacgcggcgcauccggggcggggacggcaagaugaaggaccugagcccccgcugguacuucuacuaccucggcaccgggccggagagcggccugcccuacggggccaacaaggacggcaucaucugggucgcgaccgagggcgcccugaacacccccaaggaccacaucgggacgcggaaccccgccaacaacgccgcgaucgugcuccagcugccgcagggcaccacccugcccaagggguucuacgccgagggcucccgcgggggcucccaggccagcucccggagcuccagccgcucccggaacagcucccgcaacagcacccccggcagcuccaagcgcacgagccccgcccgcauggccggcaacgggggcgacgcggcccucgcccugcugcuccuggaccggcugaaccagcucgaguccaagaucagcgggaagggccagcagcagcagggccagaccgugaccaagaaguccgccgccgaggcgagcaagaagccgcgccagaagcgcaccgccacgaaggccuacaacgucacccaggccuucgggcggcgcggccccgagcagacccaggggaacuucggcgaccaggagcugauccggcaggggaccgacuacaagcacuggccccagaucgcccaguucgcgcccuccgccagcgccuucuucggcaugucccgcaucggcauggaggugacgccgagcgggaccuggcugaccuacaccggcgccaucaagcucgacgacaaggaccccaacuucaaggaccaggugauccugcugaacaagcacaucgacgccuacaagacguucccgcccaccgagcccaagaaggacaagaagaagaaggcggacgagacccaggcccucccccagcggcagaagaagcagcagaccgucacgcugcugcccgccgccgaccucgacgacuucuccaagcagcugcagcagagcauguccagcgcggacuccacccaggccugaggacuagucccuguucccagagcccacuuuuuuuucuuuuuuugaaauaaaauagccugucuuucagaucuaaaaaaaaaaaaaaaaaaaaaaaaaaaaaaaaaaaaaaaaaaaaaaaaaaaaaaaaaaaaaaaaaaaaaaaaaaaaaaaaaaaaaaaaaaaaaaaaaaaa

SEQ ID NO: 28302 - RNA, 1508 nt, Artificial Sequence
  SARS-CoV-2/Wuhan-Hu-1__NC_045512.2/MN908947.2/EPI_ISL_402128__nuc leocapsid protein (N) mRNA gc (1-419)(R203K_G204R)
aggagagucccgcagucggcguccagcggcucugcuuguucgugugugugucguugcaggccuuauucaagcuuaccaugagcgacaacggcccccagaaccagcgcaacgccccgcggaucaccuucgggggccccuccgacagcaccggguccaaccagaacggcgagcgcagcggggcccgguccaagcagcgccggccccagggccugcccaacaacacggcgagcugguucaccgcccucacccagcacggcaaggaggaccugaaguucccgcgcgggcagggcgugcccaucaacaccaacuccagccccgacgaccagaucggguacuaccggcgcgccacgcggcgcauccggggcggggacggcaagaugaaggaccugagcccccgcugguacuucuacuaccucggcaccgggccggaggccggccugcccuacggggccaacaaggacggcaucaucugggucgcgaccgagggcgcccugaacacccccaaggaccacaucgggacgcggaaccccgccaacaacgccgcgaucgugcuccagcugccgcagggcaccacccugcccaagggguucuacgccgagggcucccgcgggggcucccaggccagcucccggagcuccagccgcucccggaacagcucccgcaacagcacccccggcagcuccaagcgcacgagccccgcccgcauggccggcaacgggggcgacgcggcccucgcccugcugcuccuggaccggcugaaccagcucgaguccaagaugagcgggaagggccagcagcagcagggccagaccgugaccaagaaguccgccgccgaggcgagcaagaagccgcgccagaagcgcaccgccacgaaggccuacaacgucacccaggccuucgggcggcgcggccccgagcagacccaggggaacuucggcgaccaggagcugauccggcaggggaccgacuacaagcacuggccccagaucgcccaguucgcgcccuccgccagcgccuucuucggcaugucccgcaucggcauggaggugacgccgagcgggaccuggcugaccuacaccggcgccaucaagcucgacgacaaggaccccaacuucaaggaccaggugauccugcugaacaagcacaucgacgccuacaagacguucccgcccaccgagcccaagaaggacaagaagaagaaggcggacgagacccaggcccucccccagcggcagaagaagcagcagaccgucacgcugcugcccgccgccgaccucgacgacuucuccaagcagcugcagcagagcauguccagcgcggacuccacccaggccugaggacuagucccuguucccagagcccacuuuuuuuucuuuuuuugaaauaaaauagccugucuuucagaucuaaaaaaaaaaaaaaaaaaaaaaaaaaaaaaaaaaaaaaaaaaaaaaaaaaaaaaaaaaaaaaaaaaaaaaaaaaaaaaaaaaaaaaaaaaaaaaaaaaaa

SEQ ID NO: 28303 - RNA, 1508 nt, Artificial Sequence
  SARS-CoV-2/Wuhan-Hu-1__NC_045512.2/MN908947.2/EPI_ISL_402128__nuc leocapsid protein (N) mRNA gc (1-419)(R203K_G204R_G212V)
aggagagucccgcagucggcguccagcggcucugcuuguucgugugugugucguugcaggccuuauucaagcuuaccaugagcgacaacggcccccagaaccagcgcaacgccccgcggaucaccuucgggggccccuccgacagcaccggguccaaccagaacggcgagcgcagcggggcccgguccaagcagcgccggccccagggccugcccaacaacacggcgagcugguucaccgcccucacccagcacggcaaggaggaccugaaguucccgcgcgggcagggcgugcccaucaacaccaacuccagccccgacgaccagaucggguacuaccggcgcgccacgcggcgcauccggggcggggacggcaagaugaaggaccugagcccccgcugguacuucuacuaccucggcaccgggccggaggccggccugcccuacggggccaacaaggacggcaucaucugggucgcgaccgagggcgcccugaacacccccaaggaccacaucgggacgcggaaccccgccaacaacgccgcgaucgugcuccagcugccgcagggcaccacccugcccaagggguucuacgccgagggcucccgcgggggcucccaggccagcucccggagcuccagccgcucccggaacagcucccgcaacagcacccccggcagcuccaagcgcacgagccccgcccgcauggccgugaacgggggcgacgcggcccucgcccugcugcuccuggaccggcugaaccagcucgaguccaagaugagcgggaagggccagcagcagcagggccagaccgugaccaagaaguccgccgccgaggcgagcaagaagccgcgccagaagcgcaccgccacgaaggccuacaacgucacccaggccuucgggcggcgcggccccgagcagacccaggggaacuucggcgaccaggagcugauccggcaggggaccgacuacaagcacuggccccagaucgcccaguucgcgcccuccgccagcgccuucuucggcaugucccgcaucggcauggaggugacgccgagcgggaccuggcugaccuacaccggcgccaucaagcucgacgacaaggaccccaacuucaaggaccaggugauccugcugaacaagcacaucgacgccuacaagacguucccgcccaccgagcccaagaaggacaagaagaagaaggcggacgagacccaggcccucccccagcggcagaagaagcagcagaccgucacgcugcugcccgccgccgaccucgacgacuucuccaagcagcugcagcagagcauguccagcgcggacuccacccaggccugaggacuagucccuguucccagagcccacuuuuuuuucuuuuuuugaaauaaaauagccugucuuucagaucuaaaaaaaaaaaaaaaaaaaaaaaaaaaaaaaaaaaaaaaaaaaaaaaaaaaaaaaaaaaaaaaaaaaaaaaaaaaaaaaaaaaaaaaaaaaaaaaaaaaa

SEQ ID NO: 28304 - RNA, 1505 nt, Artificial Sequence
  SARS-CoV-2/Wuhan-Hu-1__NC_045512.2/MN908947.2/EPI_ISL_402128__nuc leocapsid protein (N) mRNA gc (1-419)(R203K_G204R_A208G_R209del)
aggagagucccgcagucggcguccagcggcucugcuuguucgugugugugucguugcaggccuuauucaagcuuaccaugagcgacaacggcccccagaaccagcgcaacgccccgcggaucaccuucgggggccccuccgacagcaccggguccaaccagaacggcgagcgcagcggggcccgguccaagcagcgccggccccagggccugcccaacaacacggcgagcugguucaccgcccucacccagcacggcaaggaggaccugaaguucccgcgcgggcagggcgugcccaucaacaccaacuccagccccgacgaccagaucggguacuaccggcgcgccacgcggcgcauccggggcggggacggcaagaugaaggaccugagcccccgcugguacuucuacuaccucggcaccgggccggaggccggccugcccuacggggccaacaaggacggcaucaucugggucgcgaccgagggcgcccugaacacccccaaggaccacaucgggacgcggaaccccgccaacaacgccgcgaucgugcuccagcugccgcagggcaccacccugcccaagggguucuacgccgagggcucccgcgggggcucccaggccagcucccggagcuccagccgcucccggaacagcucccgcaacagcacccccggcagcuccaagcgcacgagccccggcauggccggcaacgggggcgacgcggcccucgcccugcugcuccuggaccggcugaaccagcucgaguccaagaugagcgggaagggccagcagcagcagggccagaccgugaccaagaaguccgccgccgaggcgagcaagaagccgcgccagaagcgcaccgccacgaaggccuacaacgucacccaggccuucgggcggcgcggccccgagcagacccaggggaacuucggcgaccaggagcugauccggcaggggaccgacuacaagcacuggccccagaucgcccaguucgcgcccuccgccagcgccuucuucggcaugucccgcaucggcauggaggugacgccgagcgggaccuggcugaccuacaccggcgccaucaagcucgacgacaaggaccccaacuucaaggaccaggugauccugcugaacaagcacaucgacgccuacaagacguucccgcccaccgagcccaagaaggacaagaagaagaaggcggacgagacccaggcccucccccagcggcagaagaagcagcagaccgucacgcugcugcccgccgccgaccucgacgacuucuccaagcagcugcagcagagcauguccagcgcggacuccacccaggccugaggacuagucccuguucccagagcccacuuuuuuuucuuuuuuugaaauaaaauagccugucuuucagaucuaaaaaaaaaaaaaaaaaaaaaaaaaaaaaaaaaaaaaaaaaaaaaaaaaaaaaaaaaaaaaaaaaaaaaaaaaaaaaaaaaaaaaaaaaaaaaaaaaaaa

SEQ ID NO: 28305 - RNA, 1508 nt, Artificial Sequence
  SARS-CoV-2/Wuhan-Hu-1__NC_045512.2/MN908947.2/EPI_ISL_402128__nuc leocapsid protein (N) mRNA gc (1-419)(R203M_D377Y)
aggagagucccgcagucggcguccagcggcucugcuuguucgugugugugucguugcaggccuuauucaagcuuaccaugagcgacaacggcccccagaaccagcgcaacgccccgcggaucaccuucgggggccccuccgacagcaccggguccaaccagaacggcgagcgcagcggggcccgguccaagcagcgccggccccagggccugcccaacaacacggcgagcugguucaccgcccucacccagcacggcaaggaggaccugaaguucccgcgcgggcagggcgugcccaucaacaccaacuccagccccgacgaccagaucggguacuaccggcgcgccacgcggcgcauccggggcggggacggcaagaugaaggaccugagcccccgcugguacuucuacuaccucggcaccgggccggaggccggccugcccuacggggccaacaaggacggcaucaucugggucgcgaccgagggcgcccugaacacccccaaggaccacaucgggacgcggaaccccgccaacaacgccgcgaucgugcuccagcugccgcagggcaccacccugcccaagggguucuacgccgagggcucccgcgggggcucccaggccagcucccggagcuccagccgcucccggaacagcucccgcaacagcacccccggcagcuccauggggacgagccccgcccgcauggccggcaacgggggcgacgcggcccucgcccugcugcuccuggaccggcugaaccagcucgaguccaagaugagcgggaagggccagcagcagcagggccagaccgugaccaagaaguccgccgccgaggcgagcaagaagccgcgccagaagcgcaccgccacgaaggccuacaacgucacccaggccuucgggcggcgcggccccgagcagacccaggggaacuucggcgaccaggagcugauccggcaggggaccgacuacaagcacuggccccagaucgcccaguucgcgcccuccgccagcgccuucuucggcaugucccgcaucggcauggaggugacgccgagcgggaccuggcugaccuacaccggcgccaucaagcucgacgacaaggaccccaacuucaaggaccaggugauccugcugaacaagcacaucgacgccuacaagacguucccgcccaccgagcccaagaaggacaagaagaagaaggcguacgagacccaggcccucccccagcggcagaagaagcagcagaccgucacgcugcugcccgccgccgaccucgacgacuucuccaagcagcugcagcagagcauguccagcgcggacuccacccaggccugaggacuagucccuguucccagagcccacuuuuuuuucuuuuuuugaaauaaaauagccugucuuucagaucuaaaaaaaaaaaaaaaaaaaaaaaaaaaaaaaaaaaaaaaaaaaaaaaaaaaaaaaaaaaaaaaaaaaaaaaaaaaaaaaaaaaaaaaaaaaaaaaaaaaa

SEQ ID NO: 28306 - RNA, 1508 nt, Artificial Sequence
  SARS-CoV-2/Wuhan-Hu-1__NC_045512.2/MN908947.2/EPI_ISL_402128__nuc leocapsid protein (N) mRNA gc (1-419)(T205I_M234I)
aggagagucccgcagucggcguccagcggcucugcuuguucgugugugugucguugcaggccuuauucaagcuuaccaugagcgacaacggcccccagaaccagcgcaacgccccgcggaucaccuucgggggccccuccgacagcaccggguccaaccagaacggcgagcgcagcggggcccgguccaagcagcgccggccccagggccugcccaacaacacggcgagcugguucaccgcccucacccagcacggcaaggaggaccugaaguucccgcgcgggcagggcgugcccaucaacaccaacuccagccccgacgaccagaucggguacuaccggcgcgccacgcggcgcauccggggcggggacggcaagaugaaggaccugagcccccgcugguacuucuacuaccucggcaccgggccggaggccggccugcccuacggggccaacaaggacggcaucaucugggucgcgaccgagggcgcccugaacacccccaaggaccacaucgggacgcggaaccccgccaacaacgccgcgaucgugcuccagcugccgcagggcaccacccugcccaagggguucuacgccgagggcucccgcgggggcucccaggccagcucccggagcuccagccgcucccggaacagcucccgcaacagcacccccggcagcucccgggggaucagccccgcccgcauggccggcaacgggggcgacgcggcccucgcccugcugcuccuggaccggcugaaccagcucgaguccaagaucagcgggaagggccagcagcagcagggccagaccgugaccaagaaguccgccgccgaggcgagcaagaagccgcgccagaagcgcaccgccacgaaggccuacaacgucacccaggccuucgggcggcgcggccccgagcagacccaggggaacuucggcgaccaggagcugauccggcaggggaccgacuacaagcacuggccccagaucgcccaguucgcgcccuccgccagcgccuucuucggcaugucccgcaucggcauggaggugacgccgagcgggaccuggcugaccuacaccggcgccaucaagcucgacgacaaggaccccaacuucaaggaccaggugauccugcugaacaagcacaucgacgccuacaagacguucccgcccaccgagcccaagaaggacaagaagaagaaggcggacgagacccaggcccucccccagcggcagaagaagcagcagaccgucacgcugcugcccgccgccgaccucgacgacuucuccaagcagcugcagcagagcauguccagcgcggacuccacccaggccugaggacuagucccuguucccagagcccacuuuuuuuucuuuuuuugaaauaaaauagccugucuuucagaucuaaaaaaaaaaaaaaaaaaaaaaaaaaaaaaaaaaaaaaaaaaaaaaaaaaaaaaaaaaaaaaaaaaaaaaaaaaaaaaaaaaaaaaaaaaaaaaaaaaaa

SEQ ID NO: 28307 - RNA, 1508 nt, Artificial Sequence
  SARS-CoV-2/Wuhan-Hu-1__NC_045512.2/MN908947.2/EPI_ISL_402128__nuc leocapsid protein (N) mRNA gc (1-419)(M234I)
aggagagucccgcagucggcguccagcggcucugcuuguucgugugugugucguugcaggccuuauucaagcuuaccaugagcgacaacggcccccagaaccagcgcaacgccccgcggaucaccuucgggggccccuccgacagcaccggguccaaccagaacggcgagcgcagcggggcccgguccaagcagcgccggccccagggccugcccaacaacacggcgagcugguucaccgcccucacccagcacggcaaggaggaccugaaguucccgcgcgggcagggcgugcccaucaacaccaacuccagccccgacgaccagaucggguacuaccggcgcgccacgcggcgcauccggggcggggacggcaagaugaaggaccugagcccccgcugguacuucuacuaccucggcaccgggccggaggccggccugcccuacggggccaacaaggacggcaucaucugggucgcgaccgagggcgcccugaacacccccaaggaccacaucgggacgcggaaccccgccaacaacgccgcgaucgugcuccagcugccgcagggcaccacccugcccaagggguucuacgccgagggcucccgcgggggcucccaggccagcucccggagcuccagccgcucccggaacagcucccgcaacagcacccccggcagcucccgggggacgagccccgcccgcauggccggcaacgggggcgacgcggcccucgcccugcugcuccuggaccggcugaaccagcucgaguccaagaucagcgggaagggccagcagcagcagggccagaccgugaccaagaaguccgccgccgaggcgagcaagaagccgcgccagaagcgcaccgccacgaaggccuacaacgucacccaggccuucgggcggcgcggccccgagcagacccaggggaacuucggcgaccaggagcugauccggcaggggaccgacuacaagcacuggccccagaucgcccaguucgcgcccuccgccagcgccuucuucggcaugucccgcaucggcauggaggugacgccgagcgggaccuggcugaccuacaccggcgccaucaagcucgacgacaaggaccccaacuucaaggaccaggugauccugcugaacaagcacaucgacgccuacaagacguucccgcccaccgagcccaagaaggacaagaagaagaaggcggacgagacccaggcccucccccagcggcagaagaagcagcagaccgucacgcugcugcccgccgccgaccucgacgacuucuccaagcagcugcagcagagcauguccagcgcggacuccacccaggccugaggacuagucccuguucccagagcccacuuuuuuuucuuuuuuugaaauaaaauagccugucuuucagaucuaaaaaaaaaaaaaaaaaaaaaaaaaaaaaaaaaaaaaaaaaaaaaaaaaaaaaaaaaaaaaaaaaaaaaaaaaaaaaaaaaaaaaaaaaaaaaaaaaaaa

SEQ ID NO: 28308 - RNA, 1508 nt, Artificial Sequence
  SARS-CoV-2/Wuhan-Hu-1__NC_045512.2/MN908947.2/EPI_ISL_402128__nuc leocapsid protein (N) mRNA gc (1-419)(A12G_T205I)
aggagagucccgcagucggcguccagcggcucugcuuguucgugugugugucguugcaggccuuauucaagcuuaccaugagcgacaacggcccccagaaccagcgcaacggcccgcggaucaccuucgggggccccuccgacagcaccggguccaaccagaacggcgagcgcagcggggcccgguccaagcagcgccggccccagggccugcccaacaacacggcgagcugguucaccgcccucacccagcacggcaaggaggaccugaaguucccgcgcgggcagggcgugcccaucaacaccaacuccagccccgacgaccagaucggguacuaccggcgcgccacgcggcgcauccggggcggggacggcaagaugaaggaccugagcccccgcugguacuucuacuaccucggcaccgggccggaggccggccugcccuacggggccaacaaggacggcaucaucugggucgcgaccgagggcgcccugaacacccccaaggaccacaucgggacgcggaaccccgccaacaacgccgcgaucgugcuccagcugccgcagggcaccacccugcccaagggguucuacgccgagggcucccgcgggggcucccaggccagcucccggagcuccagccgcucccggaacagcucccgcaacagcacccccggcagcucccgggggaucagccccgcccgcauggccggcaacgggggcgacgcggcccucgcccugcugcuccuggaccggcugaaccagcucgaguccaagaugagcgggaagggccagcagcagcagggccagaccgugaccaagaaguccgccgccgaggcgagcaagaagccgcgccagaagcgcaccgccacgaaggccuacaacgucacccaggccuucgggcggcgcggccccgagcagacccaggggaacuucggcgaccaggagcugauccggcaggggaccgacuacaagcacuggccccagaucgcccaguucgcgcccuccgccagcgccuucuucggcaugucccgcaucggcauggaggugacgccgagcgggaccuggcugaccuacaccggcgccaucaagcucgacgacaaggaccccaacuucaaggaccaggugauccugcugaacaagcacaucgacgccuacaagacguucccgcccaccgagcccaagaaggacaagaagaagaaggcggacgagacccaggcccucccccagcggcagaagaagcagcagaccgucacgcugcugcccgccgccgaccucgacgacuucuccaagcagcugcagcagagcauguccagcgcggacuccacccaggccugaggacuagucccuguucccagagcccacuuuuuuuucuuuuuuugaaauaaaauagccugucuuucagaucuaaaaaaaaaaaaaaaaaaaaaaaaaaaaaaaaaaaaaaaaaaaaaaaaaaaaaaaaaaaaaaaaaaaaaaaaaaaaaaaaaaaaaaaaaaaaaaaaaaaa

SEQ ID NO: 28309 - RNA, 1508 nt, Artificial Sequence
  SARS-CoV-2/Wuhan-Hu-1__NC_045512.2/MN908947.2/EPI_ISL_402128__nuc leocapsid protein (N) mRNA gc (1-419)(P13L_P199L_S202R_T205I_M234I)
aggagagucccgcagucggcguccagcggcucugcuuguucgugugugugucguugcaggccuuauucaagcuuaccaugagcgacaacggcccccagaaccagcgcaacgcccugcggaucaccuucgggggccccuccgacagcaccggguccaaccagaacggcgagcgcagcggggcccgguccaagcagcgccggccccagggccugcccaacaacacggcgagcugguucaccgcccucacccagcacggcaaggaggaccugaaguucccgcgcgggcagggcgugcccaucaacaccaacuccagccccgacgaccagaucggguacuaccggcgcgccacgcggcgcauccggggcggggacggcaagaugaaggaccugagcccccgcugguacuucuacuaccucggcaccgggccggaggccggccugcccuacggggccaacaaggacggcaucaucugggucgcgaccgagggcgcccugaacacccccaaggaccacaucgggacgcggaaccccgccaacaacgccgcgaucgugcuccagcugccgcagggcaccacccugcccaagggguucuacgccgagggcucccgcgggggcucccaggccagcucccggagcuccagccgcucccggaacagcucccgcaacagcacccugggcagccgccgggggaucagccccgcccgcauggccggcaacgggggcgacgcggcccucgcccugcugcuccuggaccggcugaaccagcucgaguccaagaucagcgggaagggccagcagcagcagggccagaccgugaccaagaaguccgccgccgaggcgagcaagaagccgcgccagaagcgcaccgccacgaaggccuacaacgucacccaggccuucgggcggcgcggccccgagcagacccaggggaacuucggcgaccaggagcugauccggcaggggaccgacuacaagcacuggccccagaucgcccaguucgcgcccuccgccagcgccuucuucggcaugucccgcaucggcauggaggugacgccgagcgggaccuggcugaccuacaccggcgccaucaagcucgacgacaaggaccccaacuucaaggaccaggugauccugcugaacaagcacaucgacgccuacaagacguucccgcccaccgagcccaagaaggacaagaagaagaaggcggacgagacccaggcccucccccagcggcagaagaagcagcagaccgucacgcugcugcccgccgccgaccucgacgacuucuccaagcagcugcagcagagcauguccagcgcggacuccacccaggccugaggacuagucccuguucccagagcccacuuuuuuuucuuuuuuugaaauaaaauagccugucuuucagaucuaaaaaaaaaaaaaaaaaaaaaaaaaaaaaaaaaaaaaaaaaaaaaaaaaaaaaaaaaaaaaaaaaaaaaaaaaaaaaaaaaaaaaaaaaaaaaaaaaaaa

SEQ ID NO: 28310 - RNA, 1508 nt, Artificial Sequence
  SARS-CoV-2/Wuhan-Hu-1__NC_045512.2/MN908947.2/EPI_ISL_402128__nuc leocapsid protein (N) mRNA gc (1-419)(P13L_R203K_G204R_G214C_T366I)
aggagagucccgcagucggcguccagcggcucugcuuguucgugugugugucguugcaggccuuauucaagcuuaccaugagcgacaacggcccccagaaccagcgcaacgcccugcggaucaccuucgggggccccuccgacagcaccggguccaaccagaacggcgagcgcagcggggcccgguccaagcagcgccggccccagggccugcccaacaacacggcgagcugguucaccgcccucacccagcacggcaaggaggaccugaaguucccgcgcgggcagggcgugcccaucaacaccaacuccagccccgacgaccagaucggguacuaccggcgcgccacgcggcgcauccggggcggggacggcaagaugaaggaccugagcccccgcugguacuucuacuaccucggcaccgggccggaggccggccugcccuacggggccaacaaggacggcaucaucugggucgcgaccgagggcgcccugaacacccccaaggaccacaucgggacgcggaaccccgccaacaacgccgcgaucgugcuccagcugccgcagggcaccacccugcccaagggguucuacgccgagggcucccgcgggggcucccaggccagcucccggagcuccagccgcucccggaacagcucccgcaacagcacccccggcagcuccaagcgcacgagccccgcccgcauggccggcaacugcggcgacgcggcccucgcccugcugcuccuggaccggcugaaccagcucgaguccaagaugagcgggaagggccagcagcagcagggccagaccgugaccaagaaguccgccgccgaggcgagcaagaagccgcgccagaagcgcaccgccacgaaggccuacaacgucacccaggccuucgggcggcgcggccccgagcagacccaggggaacuucggcgaccaggagcugauccggcaggggaccgacuacaagcacuggccccagaucgcccaguucgcgcccuccgccagcgccuucuucggcaugucccgcaucggcauggaggugacgccgagcgggaccuggcugaccuacaccggcgccaucaagcucgacgacaaggaccccaacuucaaggaccaggugauccugcugaacaagcacaucgacgccuacaagacguucccgcccaucgagcccaagaaggacaagaagaagaaggcggacgagacccaggcccucccccagcggcagaagaagcagcagaccgucacgcugcugcccgccgccgaccucgacgacuucuccaagcagcugcagcagagcauguccagcgcggacuccacccaggccugaggacuagucccuguucccagagcccacuuuuuuuucuuuuuuugaaauaaaauagccugucuuucagaucuaaaaaaaaaaaaaaaaaaaaaaaaaaaaaaaaaaaaaaaaaaaaaaaaaaaaaaaaaaaaaaaaaaaaaaaaaaaaaaaaaaaaaaaaaaaaaaaaaaaa

SEQ ID NO: 28311 - RNA, 1505 nt, Artificial Sequence
  SARS-CoV-2/Wuhan-Hu-1__NC_045512.2/MN908947.2/EPI_ISL_402128__nuc leocapsid protein (N) mRNA gc (1-419)(R203K_G204R_A208G_R209del_M234I)
aggagagucccgcagucggcguccagcggcucugcuuguucgugugugugucguugcaggccuuauucaagcuuaccaugagcgacaacggcccccagaaccagcgcaacgccccgcggaucaccuucgggggccccuccgacagcaccggguccaaccagaacggcgagcgcagcggggcccgguccaagcagcgccggccccagggccugcccaacaacacggcgagcugguucaccgcccucacccagcacggcaaggaggaccugaaguucccgcgcgggcagggcgugcccaucaacaccaacuccagccccgacgaccagaucggguacuaccggcgcgccacgcggcgcauccggggcggggacggcaagaugaaggaccugagcccccgcugguacuucuacuaccucggcaccgggccggaggccggccugcccuacggggccaacaaggacggcaucaucugggucgcgaccgagggcgcccugaacacccccaaggaccacaucgggacgcggaaccccgccaacaacgccgcgaucgugcuccagcugccgcagggcaccacccugcccaagggguucuacgccgagggcucccgcgggggcucccaggccagcucccggagcuccagccgcucccggaacagcucccgcaacagcacccccggcagcuccaagcgcacgagccccggcauggccggcaacgggggcgacgcggcccucgcccugcugcuccuggaccggcugaaccagcucgaguccaagaucagcgggaagggccagcagcagcagggccagaccgugaccaagaaguccgccgccgaggcgagcaagaagccgcgccagaagcgcaccgccacgaaggccuacaacgucacccaggccuucgggcggcgcggccccgagcagacccaggggaacuucggcgaccaggagcugauccggcaggggaccgacuacaagcacuggccccagaucgcccaguucgcgcccuccgccagcgccuucuucggcaugucccgcaucggcauggaggugacgccgagcgggaccuggcugaccuacaccggcgccaucaagcucgacgacaaggaccccaacuucaaggaccaggugauccugcugaacaagcacaucgacgccuacaagacguucccgcccaccgagcccaagaaggacaagaagaagaaggcggacgagacccaggcccucccccagcggcagaagaagcagcagaccgucacgcugcugcccgccgccgaccucgacgacuucuccaagcagcugcagcagagcauguccagcgcggacuccacccaggccugaggacuagucccuguucccagagcccacuuuuuuuucuuuuuuugaaauaaaauagccugucuuucagaucuaaaaaaaaaaaaaaaaaaaaaaaaaaaaaaaaaaaaaaaaaaaaaaaaaaaaaaaaaaaaaaaaaaaaaaaaaaaaaaaaaaaaaaaaaaaaaaaaaaaa

SEQ ID NO: 28312 - RNA, 476 nt, Artificial Sequence
  SARS-CoV-2/Wuhan-Hu-1__NC_045512.2/MN908947.2/EPI_ISL_402128__env elope protein (E) mRNA gc (1-75)(P71L)
aggagagucccgcagucggcguccagcggcucugcuuguucgugugugugucguugcaggccuuauucaagcuuaccauguacagcuucguguccgaggagaccggcacccugaucgucaacagcgugcuccuguuccuggccuucguggucuuccuccuggugacgcuggccauccucaccgcgcugcgccugugcgccuacugcugcaacaucgugaacgucucccucgugaagcccagcuucuacguguacucccgggucaagaaccugaacagcucccgcgugcuggaccugcucgugugaggacuagucccuguucccagagcccacuuuuuuuucuuuuuuugaaauaaaauagccugucuuucagaucuaaaaaaaaaaaaaaaaaaaaaaaaaaaaaaaaaaaaaaaaaaaaaaaaaaaaaaaaaaaaaaaaaaaaaaaaaaaaaaaaaaaaaaaaaaaaaaaaaaaa

SEQ ID NO: 28313 - RNA, 476 nt, Artificial Sequence
  SARS-CoV-2/Wuhan-Hu-1__NC_045512.2/MN908947.2/EPI_ISL_402128__env elope protein (E) mRNA gc (1-75)(T9I_C43F_V49L_V58F_V62F_L73F)
aggagagucccgcagucggcguccagcggcucugcuuguucgugugugugucguugcaggccuuauucaagcuuaccauguacagcuucguguccgaggagaucggcacccugaucgucaacagcgugcuccuguuccuggccuucguggucuuccuccuggugacgcuggccauccucaccgcgcugcgccugugcgccuacuucugcaacaucgugaaccugucccucgugaagcccagcuucuacuucuacucccgguucaagaaccugaacagcucccgcgugccggacuuccucgugugaggacuagucccuguucccagagcccacuuuuuuuucuuuuuuugaaauaaaauagccugucuuucagaucuaaaaaaaaaaaaaaaaaaaaaaaaaaaaaaaaaaaaaaaaaaaaaaaaaaaaaaaaaaaaaaaaaaaaaaaaaaaaaaaaaaaaaaaaaaaaaaaaaaaa

SEQ ID NO: 28314 - RNA, 476 nt, Artificial Sequence
  SARS-CoV-2/Wuhan-Hu-1__NC_045512.2/MN908947.2/EPI_ISL_402128__env elope protein (E) mRNA gc (1-75)(T9I_V58F_V62F_S68F_L73F)
aggagagucccgcagucggcguccagcggcucugcuuguucgugugugugucguugcaggccuuauucaagcuuaccauguacagcuucguguccgaggagaucggcacccugaucgucaacagcgugcuccuguuccuggccuucguggucuuccuccuggugacgcuggccauccucaccgcgcugcgccugugcgccuacugcugcaacaucgugaacgucucccucgugaagcccagcuucuacuucuacucccgguucaagaaccugaacagcuuccgcgugccggacuuccucgugugaggacuagucccuguucccagagcccacuuuuuuuucuuuuuuugaaauaaaauagccugucuuucagaucuaaaaaaaaaaaaaaaaaaaaaaaaaaaaaaaaaaaaaaaaaaaaaaaaaaaaaaaaaaaaaaaaaaaaaaaaaaaaaaaaaaaaaaaaaaaaaaaaaaaa

SEQ ID NO: 28315 - RNA, 476 nt, Artificial Sequence
  SARS-CoV-2/Wuhan-Hu-1__NC_045512.2/MN908947.2/EPI_ISL_402128__env elope protein (E) mRNA gc (1-75)(T9I_V58F_S68A_R69G_P71S)
aggagagucccgcagucggcguccagcggcucugcuuguucgugugugugucguugcaggccuuauucaagcuuaccauguacagcuucguguccgaggagaucggcacccugaucgucaacagcgugcuccuguuccuggccuucguggucuuccuccuggugacgcuggccauccucaccgcgcugcgccugugcgccuacugcugcaacaucgugaacgucucccucgugaagcccagcuucuacuucuacucccgggucaagaaccugaacagcgccggcgugagcgaccugcucgugugaggacuagucccuguucccagagcccacuuuuuuuucuuuuuuugaaauaaaauagccugucuuucagaucuaaaaaaaaaaaaaaaaaaaaaaaaaaaaaaaaaaaaaaaaaaaaaaaaaaaaaaaaaaaaaaaaaaaaaaaaaaaaaaaaaaaaaaaaaaaaaaaaaaaa

SEQ ID NO: 28316 - RNA, 476 nt, Artificial Sequence
  SARS-CoV-2/Wuhan-Hu-1__NC_045512.2/MN908947.2/EPI_ISL_402128__env elope protein (E) mRNA gc (1-75)(L21F)
aggagagucccgcagucggcguccagcggcucugcuuguucgugugugugucguugcaggccuuauucaagcuuaccauguacagcuucguguccgaggagaccggcacccugaucgucaacagcgugcuccuguucuucgccuucguggucuuccuccuggugacgcuggccauccucaccgcgcugcgccugugcgccuacugcugcaacaucgugaacgucucccucgugaagcccagcuucuacguguacucccgggucaagaaccugaacagcucccgcgugccggaccugcucgugugaggacuagucccuguucccagagcccacuuuuuuuucuuuuuuugaaauaaaauagccugucuuucagaucuaaaaaaaaaaaaaaaaaaaaaaaaaaaaaaaaaaaaaaaaaaaaaaaaaaaaaaaaaaaaaaaaaaaaaaaaaaaaaaaaaaaaaaaaaaaaaaaaaaaa

SEQ ID NO: 28317 - RNA, 476 nt, Artificial Sequence
  SARS-CoV-2/Wuhan-Hu-1__NC_045512.2/MN908947.2/EPI_ISL_402128__env elope protein (E) mRNA gc (1-75)(T9I_L21F_S55F_V58F_S68F_L73F)
aggagagucccgcagucggcguccagcggcucugcuuguucgugugugugucguugcaggccuuauucaagcuuaccauguacagcuucguguccgaggagaucggcacccugaucgucaacagcgugcuccuguucuucgccuucguggucuuccuccuggugacgcuggccauccucaccgcgcugcgccugugcgccuacugcugcaacaucgugaacgucucccucgugaagcccuucuucuacuucuacucccgggucaagaaccugaacagcuuccgcgugccggacuuccucgugugaggacuagucccuguucccagagcccacuuuuuuuucuuuuuuugaaauaaaauagccugucuuucagaucuaaaaaaaaaaaaaaaaaaaaaaaaaaaaaaaaaaaaaaaaaaaaaaaaaaaaaaaaaaaaaaaaaaaaaaaaaaaaaaaaaaaaaaaaaaaaaaaaaaaa

SEQ ID NO: 28318 - RNA, 476 nt, Artificial Sequence
  SARS-CoV-2/Wuhan-Hu-1__NC_045512.2/MN908947.2/EPI_ISL_402128__env elope protein (E) mRNA gc (1-75)(T9I_S55F_V58F_S68F_P71L_D72Y_L73F)
aggagagucccgcagucggcguccagcggcucugcuuguucgugugugugucguugcaggccuuauucaagcuuaccauguacagcuucguguccgaggagaucggcacccugaucgucaacagcgugcuccuguuccuggccuucguggucuuccuccuggugacgcuggccauccucaccgcgcugcgccugugcgccuacugcugcaacaucgugaacgucucccucgugaagcccuucuucuacuucuacucccgggucaagaaccugaacagcuuccgcgugcuguacuuccucgugugaggacuagucccuguucccagagcccacuuuuuuuucuuuuuuugaaauaaaauagccugucuuucagaucuaaaaaaaaaaaaaaaaaaaaaaaaaaaaaaaaaaaaaaaaaaaaaaaaaaaaaaaaaaaaaaaaaaaaaaaaaaaaaaaaaaaaaaaaaaaaaaaaaaaa

SEQ ID NO: 28319 - RNA, 476 nt, Artificial Sequence
  SARS-CoV-2/Wuhan-Hu-1__NC_045512.2/MN908947.2/EPI_ISL_402128__env elope protein (E) mRNA gc (1-75)(T9I_S55F_V58F_S68F_D72Y_L73F)
aggagagucccgcagucggcguccagcggcucugcuuguucgugugugugucguugcaggccuuauucaagcuuaccauguacagcuucguguccgaggagaucggcacccugaucgucaacagcgugcuccuguuccuggccuucguggucuuccuccuggugacgcuggccauccucaccgcgcugcgccugugcgccuacugcugcaacaucgugaacgucucccucgugaagcccuucuucuacuucuacucccgggucaagaaccugaacagcuuccgcgugccguacuuccucgugugaggacuagucccuguucccagagcccacuuuuuuuucuuuuuuugaaauaaaauagccugucuuucagaucuaaaaaaaaaaaaaaaaaaaaaaaaaaaaaaaaaaaaaaaaaaaaaaaaaaaaaaaaaaaaaaaaaaaaaaaaaaaaaaaaaaaaaaaaaaaaaaaaaaaa

SEQ ID NO: 28320 - RNA, 6089 nt, Artificial Sequence
  SARS-CoV-2/Wuhan-Hu-1__NC_045512.2/MN908947.2__non-structural protein 3 (NSP3) mRNA gc (1-1946)(T184I_A891D_I1413T)
aggagagucccgcagucggcguccagcggcucugcuuguucgugugugugucguugcaggccuuauucaagcuuaccauggcccccaccaaggugaccuucggcgacgacaccgucaucgaggugcagggguacaagagcgugaacaucaccuucgagcuggacgagcgcaucgacaagguccucaacgagaagugcuccgccuacaccguggagcugggcaccgaggugaacgaguucgcgugcgucguggccgacgccgugaucaagacgcugcagccggucagcgagcuccugacgccccuggggaucgaccucgacgagugguccauggccaccuacuaccuguucgacgagagcggcgaguucaagcuggccucccacauguacugcagcuucuacccgcccgacgaggacgaggaggagggggacugcgaggaggaggaguucgagcccuccacccaguacgaguacggcacggaggacgacuaccagggcaagccccucgaguucggggcgaccagcgccgcccugcagcccgaggaggagcaggaggaggacuggcuggacgacgacucccagcagaccgugggccagcaggacgggagcgaggacaaccagaccacgaucauccagaccaucguggagguccagccccagcucgagauggagcugaccccgguggugcagacgaucgaggucaacuccuucagcggcuaccugaagcucaccgacaacguguacaucaagaacgccgacaucguggaggaggcgaagaaggucaagcccaccgugguggucaacgccgccaacguguaccugaagcacgggggcggcguggccggggcccugaacaaggcgaccaacaacgccaugcaggucgaguccgacgacuacaucgccacgaacggcccccucaaggucgggggcagcugcgugcuguccggccacaaccuggccaagcacugccuccacgugguggggcccaacgucaacaagggcgaggacauccagcugcucaagagcgccuacgagaacuucaaccagcacgaggugcugcuggcgccgcugcucuccgccgggaucuucggcgccgaccccauccacagccugcgggugugcgucgacaccgugcgcaccaacguguaccuggccgucuucgacaagaaccucuacgacaagcugguguccagcuuccuggagaugaaguccgagaagcaggucgagcagaagaucgccgagauccccaaggaggaggugaagcccuucaucaccgagagcaagccgagcguggagcagcggaagcaggacgacaagaagaucaaggcgugcguggaggaggucacgaccacccucgaggagaccaaguuccugacggagaaccugcuccuguacaucgacaucaacgggaaccugcaccccgacuccgccacccucgugagcgacaucgacaucaccuuccugaagaaggacgcccccuacaucgugggcgacgucgugcaggagggcgugcugaccgccgucgugauccccacgaagaaggccgggggcaccaccgagaugcucgcgaaggcccugcgcaaggugccgaccgacaacuacaucacgaccuaccccgggcagggccugaacggguacaccgucgaggaggccaagaccgugcucaagaagugcaaguccgccuucuacauccugcccagcaucaucuccaacgagaagcaggagauccugggcaccgugagcuggaaccugcgggagaugcucgcgcacgccgaggagacgcgcaagcugaugcccgucugcguggagaccaaggccaucguguccaccauccagcggaaguacaagggcaucaagauccaggagggggucguggacuacggcgcccgcuucuacuucuacaccagcaagacgaccguggccucccugaucaacacccucaacgaccugaacgagacccuggucacgaugccgcucggguacgugacccacggccugaaccuggaggaggcggcccgguacaugcgcagccucaaggugcccgccaccgucuccgugagcucccccgacgccgugaccgccuacaacggguaccugacgagcuccagcaagacccccgaggagcacuucaucgagaccaucucccuggcgggcagcuacaaggacuggagcuacuccggccagagcacccagcucgggaucgaguuccugaagcggggcgacaaguccgucuacuacacgagcaacccgaccaccuuccaccuggacggggaggugaucaccuucgacaaccucaagacgcugcugucccuccgcgaggugcggaccaucaaggucuucaccaccguggacaacaucaaccugcacacccagguggucgacaugagcaugaccuacggccagcaguucggccccaccuaccuggacggggccgacgugaccaagaucaagccccacaacucccacgagggcaagacguucuacgugcucccgaacgacgacacccugcgcgucgaggccuucgaguacuaccacaccaccgaccccagcuuccuggggcgguacauguccgcccucaaccacacgaagaaguggaaguacccccaggugaacggccugaccagcaucaagugggccgacaacaacugcuaccuggcgaccgcccuccugacccugcagcagaucgagcucaaguucaacccgcccgcccugcaggacgccuacuaccgcgcgcgggccggggaggccgacaacuucugcgcccugauccucgcguacugcaacaagacggugggcgagcugggcgacguccgcgagaccauguccuaccuguuccagcacgccaaccucgacagcugcaagcgggugcugaacgucgugugcaagaccugcgggcagcagcagaccacccugaagggcguggaggccgucauguacauggggacgcucuccuacgagcaguucaagaagggcgugcagauccccugcacgugcgggaagcaggccaccaaguaccuggugcagcaggagagccccuucgucaugauguccgcgcccccggcccaguacgagcugaagcacggcaccuucacgugcgccagcgaguacaccggcaacuaccagugcgggcacuacaagcacaucaccuccaaggagacccucuacugcaucgacggcgcccugcugaccaagagcagcgaguacaaggggcccaucaccgacguguucuacaaggagaacuccuacaccaccacgaucaagcccgugaccuacaagcucgacggcgucgugugcaccgagaucgaccccaagcuggacaacuacuacaagaaggacaacagcuacuucaccgagcagccgaucgaccuggugcccaaccagcccuaccccaacgccuccuucgacaacuucaaguucgucugcgacaacaucaaguucgccgacgaccucaaccagcugacgggguacaagaagccggcgagccgcgagcugaaggugaccuucuuccccgaccucaacggcgacguggucgccaucgacuacaagcacuacacccccuccuucaagaagggcgccaagcugcugcacaagcccaucguguggcacgugaacaacgccaccaacaaggcgacguacaagccgaacaccuggugcauccggugccucuggagcaccaagcccgucgagaccuccaacagcuucgacgugcugaaguccgaggacgcccaggggauggacaaccuggccugcgaggaccucaagcccgugagcgaggaggucguggagaaccccacgauccagaaggacgugcuggagugcaacgucaagaccaccgagguggugggcgacaucauccugaagccggccaacaacucccucaagaucaccgaggaggucgggcacacggaccugauggccgcguacguggacaacagcucccugaccaucaagaagcccaacgagcucagccgcgugcugggccugaagacccucgccacccacgggcuggccgccgucaacuccgugcccugggacacgaucgccaacuacgcgaagccguuccugaacaagguggucagcaccaccaccaacaucgugacgcgcugccucaaccgggugugcaccaacuacaugcccuacuucuucacccugcugcuccagcugugcaccuucacgcgcuccaccaacagccggaucaaggccuccaugcccaccaccaucgccaagaacaccgucaagagcgugggcaaguucugccuggaggccagcuucaacuaccucaagucccccaacuucagcaagcugaucaacaucaccaucugguuccugcuccuguccgugugccugggcagccucaucuacuccacggccgcgcuggggguccugaugagcaaccucggcaugccguccuacugcaccggguaccgcgagggcuaccugaacagcaccaacgugaccaucgccacguacugcaccggcuccauccccugcagcgugugccuguccgggcucgacagccuggacaccuaccccucccuggagaccauccagaucacgaucagcuccuucaagugggaccucaccgccuucggccuggucgccgagugguuccuggccuacauccucuucacccgguucuucuacgugcuggggcuggcggccaucaugcagcuguucuucagcuacuucgccgugcacuucaucuccaacagcuggcucauguggcugaucaucaaccugguccagauggcccccaucuccgcgauggugcgcauguacaucuucuucgccagcuucuacuacguguggaaguccuacguccacgugguggacggcugcaacagcagcacgugcaugaugugcuacaagcggaaccgcgccacgcgggucgagugcaccaccaucgugaacgggguccgccgguccuucuacguguacgccaacggcggcaagggguucugcaagcuccacaacuggaacugcgugaacugcgacaccuucugcgccggcagcacguucaucuccgacgaggucgcgcgcgaccugagccugcaguucaagcggccgaucaaccccaccgaccaguccagcuacaucguggacuccgugaccgucaagaacgggagcauccaccucuacuucgacaaggccggccagaagaccuacgagcgccacucccugagccacuucgugaaccuggacaaccuccgggccaacaacacgaaggggucccugcccaucaacgugaucgucuucgacggcaagagcaagugcgaggaguccagcgccaaguccgccagcguguacuacucccagcugaugugccagcccauccuccugcuggaccaggcgcucgugagcgacgucggcgacagcgccgagguggccgugaagauguucgacgccuacgucaacaccuucuccagcaccuucaacgugccgauggagaagcugaagacccugguggccacggcggaggccgagcucgccaagaacgucucccuggacaacgugcugagcaccuucaucuccgccgcgcgccagggguucguggacagcgacgucgagaccaaggacgugguggagugccucaagcugucccaccagagcgacaucgaggucaccggcgacuccugcaacaacuacaugcugacguacaacaagguggagaacaugacgccccgggaccucggggccugcaucgacugcagcgcccgccacaucaacgcccagguggccaagucccacaacaucgcgcugaucuggaacgucaaggacuucaugagccuguccgagcagcuccggaagcagauccgcagcgccgccaagaagaacaaccugcccuucaagcugaccugcgccaccacccgccagguggugaacgucgugaccaccaagaucgcccucaagggcgggugaggacuagucccuguucccagagcccacuuuuuuuucuuuuuuugaaauaaaauagccugucuuucagaucuaaaaaaaaaaaaaaaaaaaaaaaaaaaaaaaaaaaaaaaaaaaaaaaaaaaaaaaaaaaaaaaaaaaaaaaaaaaaaaaaaaaaaaaaaaaaaaaaaaaa

SEQ ID NO: 28321 - RNA, 6089 nt, Artificial Sequence
  SARS-CoV-2/Wuhan-Hu-1__NC_045512.2/MN908947.2__non-structural protein 3 (NSP3) mRNA gc (1-1946)(A329T_P823L)
aggagagucccgcagucggcguccagcggcucugcuuguucgugugugugucguugcaggccuuauucaagcuuaccauggcccccaccaaggugaccuucggcgacgacaccgucaucgaggugcagggguacaagagcgugaacaucaccuucgagcuggacgagcgcaucgacaagguccucaacgagaagugcuccgccuacaccguggagcugggcaccgaggugaacgaguucgcgugcgucguggccgacgccgugaucaagacgcugcagccggucagcgagcuccugacgccccuggggaucgaccucgacgagugguccauggccaccuacuaccuguucgacgagagcggcgaguucaagcuggccucccacauguacugcagcuucuacccgcccgacgaggacgaggaggagggggacugcgaggaggaggaguucgagcccuccacccaguacgaguacggcacggaggacgacuaccagggcaagccccucgaguucggggcgaccagcgccgcccugcagcccgaggaggagcaggaggaggacuggcuggacgacgacucccagcagaccgugggccagcaggacgggagcgaggacaaccagaccacgaccauccagaccaucguggagguccagccccagcucgagauggagcugaccccgguggugcagacgaucgaggucaacuccuucagcggcuaccugaagcucaccgacaacguguacaucaagaacgccgacaucguggaggaggcgaagaaggucaagcccaccgugguggucaacgccgccaacguguaccugaagcacgggggcggcguggccggggcccugaacaaggcgaccaacaacgccaugcaggucgaguccgacgacuacaucgccacgaacggcccccucaaggucgggggcagcugcgugcuguccggccacaaccuggccaagcacugccuccacgugguggggcccaacgucaacaagggcgaggacauccagcugcucaagagcgccuacgagaacuucaaccagcacgaggugcugcugaccccgcugcucuccgccgggaucuucggcgccgaccccauccacagccugcgggugugcgucgacaccgugcgcaccaacguguaccuggccgucuucgacaagaaccucuacgacaagcugguguccagcuuccuggagaugaaguccgagaagcaggucgagcagaagaucgccgagauccccaaggaggaggugaagcccuucaucaccgagagcaagccgagcguggagcagcggaagcaggacgacaagaagaucaaggcgugcguggaggaggucacgaccacccucgaggagaccaaguuccugacggagaaccugcuccuguacaucgacaucaacgggaaccugcaccccgacuccgccacccucgugagcgacaucgacaucaccuuccugaagaaggacgcccccuacaucgugggcgacgucgugcaggagggcgugcugaccgccgucgugauccccacgaagaaggccgggggcaccaccgagaugcucgcgaaggcccugcgcaaggugccgaccgacaacuacaucacgaccuaccccgggcagggccugaacggguacaccgucgaggaggccaagaccgugcucaagaagugcaaguccgccuucuacauccugcccagcaucaucuccaacgagaagcaggagauccugggcaccgugagcuggaaccugcgggagaugcucgcgcacgccgaggagacgcgcaagcugaugcccgucugcguggagaccaaggccaucguguccaccauccagcggaaguacaagggcaucaagauccaggagggggucguggacuacggcgcccgcuucuacuucuacaccagcaagacgaccguggccucccugaucaacacccucaacgaccugaacgagacccuggucacgaugccgcucggguacgugacccacggccugaaccuggaggaggcggcccgguacaugcgcagccucaaggugcccgccaccgucuccgugagcucccccgacgccgugaccgccuacaacggguaccugacgagcuccagcaagacccccgaggagcacuucaucgagaccaucucccuggcgggcagcuacaaggacuggagcuacuccggccagagcacccagcucgggaucgaguuccugaagcggggcgacaaguccgucuacuacacgagcaacccgaccaccuuccaccuggacggggaggugaucaccuucgacaaccucaagacgcugcugucccuccgcgaggugcggaccaucaaggucuucaccaccguggacaacaucaaccugcacacccagguggucgacaugagcaugaccuacggccagcaguucggccccaccuaccuggacggggccgacgugaccaagaucaagccccacaacucccacgagggcaagacguucuacgugcucccgaacgacgacacccugcgcgucgaggccuucgaguacuaccacaccaccgaccugagcuuccuggggcgguacauguccgcccucaaccacacgaagaaguggaaguacccccaggugaacggccugaccagcaucaagugggccgacaacaacugcuaccuggcgaccgcccuccugacccugcagcagaucgagcucaaguucaacccgcccgcccugcaggacgccuacuaccgcgcgcgggccggggaggccgccaacuucugcgcccugauccucgcguacugcaacaagacggugggcgagcugggcgacguccgcgagaccauguccuaccuguuccagcacgccaaccucgacagcugcaagcgggugcugaacgucgugugcaagaccugcgggcagcagcagaccacccugaagggcguggaggccgucauguacauggggacgcucuccuacgagcaguucaagaagggcgugcagauccccugcacgugcgggaagcaggccaccaaguaccuggugcagcaggagagccccuucgucaugauguccgcgcccccggcccaguacgagcugaagcacggcaccuucacgugcgccagcgaguacaccggcaacuaccagugcgggcacuacaagcacaucaccuccaaggagacccucuacugcaucgacggcgcccugcugaccaagagcagcgaguacaaggggcccaucaccgacguguucuacaaggagaacuccuacaccaccacgaucaagcccgugaccuacaagcucgacggcgucgugugcaccgagaucgaccccaagcuggacaacuacuacaagaaggacaacagcuacuucaccgagcagccgaucgaccuggugcccaaccagcccuaccccaacgccuccuucgacaacuucaaguucgucugcgacaacaucaaguucgccgacgaccucaaccagcugacgggguacaagaagccggcgagccgcgagcugaaggugaccuucuuccccgaccucaacggcgacguggucgccaucgacuacaagcacuacacccccuccuucaagaagggcgccaagcugcugcacaagcccaucguguggcacgugaacaacgccaccaacaaggcgacguacaagccgaacaccuggugcauccggugccucuggagcaccaagcccgucgagaccuccaacagcuucgacgugcugaaguccgaggacgcccaggggauggacaaccuggccugcgaggaccucaagcccgugagcgaggaggucguggagaaccccacgauccagaaggacgugcuggagugcaacgucaagaccaccgagguggugggcgacaucauccugaagccggccaacaacucccucaagaucaccgaggaggucgggcacacggaccugauggccgcguacguggacaacagcucccugaccaucaagaagcccaacgagcucagccgcgugcugggccugaagacccucgccacccacgggcuggccgccgucaacuccgugcccugggacacgaucgccaacuacgcgaagccguuccugaacaagguggucagcaccaccaccaacaucgugacgcgcugccucaaccgggugugcaccaacuacaugcccuacuucuucacccugcugcuccagcugugcaccuucacgcgcuccaccaacagccggaucaaggccuccaugcccaccaccaucgccaagaacaccgucaagagcgugggcaaguucugccuggaggccagcuucaacuaccucaagucccccaacuucagcaagcugaucaacaucaucaucugguuccugcuccuguccgugugccugggcagccucaucuacuccacggccgcgcuggggguccugaugagcaaccucggcaugccguccuacugcaccggguaccgcgagggcuaccugaacagcaccaacgugaccaucgccacguacugcaccggcuccauccccugcagcgugugccuguccgggcucgacagccuggacaccuaccccucccuggagaccauccagaucacgaucagcuccuucaagugggaccucaccgccuucggccuggucgccgagugguuccuggccuacauccucuucacccgguucuucuacgugcuggggcuggcggccaucaugcagcuguucuucagcuacuucgccgugcacuucaucuccaacagcuggcucauguggcugaucaucaaccugguccagauggcccccaucuccgcgauggugcgcauguacaucuucuucgccagcuucuacuacguguggaaguccuacguccacgugguggacggcugcaacagcagcacgugcaugaugugcuacaagcggaaccgcgccacgcgggucgagugcaccaccaucgugaacgggguccgccgguccuucuacguguacgccaacggcggcaagggguucugcaagcuccacaacuggaacugcgugaacugcgacaccuucugcgccggcagcacguucaucuccgacgaggucgcgcgcgaccugagccugcaguucaagcggccgaucaaccccaccgaccaguccagcuacaucguggacuccgugaccgucaagaacgggagcauccaccucuacuucgacaaggccggccagaagaccuacgagcgccacucccugagccacuucgugaaccuggacaaccuccgggccaacaacacgaaggggucccugcccaucaacgugaucgucuucgacggcaagagcaagugcgaggaguccagcgccaaguccgccagcguguacuacucccagcugaugugccagcccauccuccugcuggaccaggcgcucgugagcgacgucggcgacagcgccgagguggccgugaagauguucgacgccuacgucaacaccuucuccagcaccuucaacgugccgauggagaagcugaagacccugguggccacggcggaggccgagcucgccaagaacgucucccuggacaacgugcugagcaccuucaucuccgccgcgcgccagggguucguggacagcgacgucgagaccaaggacgugguggagugccucaagcugucccaccagagcgacaucgaggucaccggcgacuccugcaacaacuacaugcugacguacaacaagguggagaacaugacgccccgggaccucggggccugcaucgacugcagcgcccgccacaucaacgcccagguggccaagucccacaacaucgcgcugaucuggaacgucaaggacuucaugagccuguccgagcagcuccggaagcagauccgcagcgccgccaagaagaacaaccugcccuucaagcugaccugcgccaccacccgccagguggugaacgucgugaccaccaagaucgcccucaagggcgggugaggacuagucccuguucccagagcccacuuuuuuuucuuuuuuugaaauaaaauagccugucuuucagaucuaaaaaaaaaaaaaaaaaaaaaaaaaaaaaaaaaaaaaaaaaaaaaaaaaaaaaaaaaaaaaaaaaaaaaaaaaaaaaaaaaaaaaaaaaaaaaaaaaaaa

SEQ ID NO: 28322 - RNA, 6089 nt, Artificial Sequence
  SARS-CoV-2/Wuhan-Hu-1__NC_045512.2/MN908947.2__non-structural protein 3 (NSP3) mRNA gc (1-1946)(S371L_K978Q)
aggagagucccgcagucggcguccagcggcucugcuuguucgugugugugucguugcaggccuuauucaagcuuaccauggcccccaccaaggugaccuucggcgacgacaccgucaucgaggugcagggguacaagagcgugaacaucaccuucgagcuggacgagcgcaucgacaagguccucaacgagaagugcuccgccuacaccguggagcugggcaccgaggugaacgaguucgcgugcgucguggccgacgccgugaucaagacgcugcagccggucagcgagcuccugacgccccuggggaucgaccucgacgagugguccauggccaccuacuaccuguucgacgagagcggcgaguucaagcuggccucccacauguacugcagcuucuacccgcccgacgaggacgaggaggagggggacugcgaggaggaggaguucgagcccuccacccaguacgaguacggcacggaggacgacuaccagggcaagccccucgaguucggggcgaccagcgccgcccugcagcccgaggaggagcaggaggaggacuggcuggacgacgacucccagcagaccgugggccagcaggacgggagcgaggacaaccagaccacgaccauccagaccaucguggagguccagccccagcucgagauggagcugaccccgguggugcagacgaucgaggucaacuccuucagcggcuaccugaagcucaccgacaacguguacaucaagaacgccgacaucguggaggaggcgaagaaggucaagcccaccgugguggucaacgccgccaacguguaccugaagcacgggggcggcguggccggggcccugaacaaggcgaccaacaacgccaugcaggucgaguccgacgacuacaucgccacgaacggcccccucaaggucgggggcagcugcgugcuguccggccacaaccuggccaagcacugccuccacgugguggggcccaacgucaacaagggcgaggacauccagcugcucaagagcgccuacgagaacuucaaccagcacgaggugcugcuggcgccgcugcucuccgccgggaucuucggcgccgaccccauccacagccugcgggugugcgucgacaccgugcgcaccaacguguaccuggccgucuucgacaagaaccucuacgacaagcuggugcugagcuuccuggagaugaaguccgagaagcaggucgagcagaagaucgccgagauccccaaggaggaggugaagcccuucaucaccgagagcaagccgagcguggagcagcggaagcaggacgacaagaagaucaaggcgugcguggaggaggucacgaccacccucgaggagaccaaguuccugacggagaaccugcuccuguacaucgacaucaacgggaaccugcaccccgacuccgccacccucgugagcgacaucgacaucaccuuccugaagaaggacgcccccuacaucgugggcgacgucgugcaggagggcgugcugaccgccgucgugauccccacgaagaaggccgggggcaccaccgagaugcucgcgaaggcccugcgcaaggugccgaccgacaacuacaucacgaccuaccccgggcagggccugaacggguacaccgucgaggaggccaagaccgugcucaagaagugcaaguccgccuucuacauccugcccagcaucaucuccaacgagaagcaggagauccugggcaccgugagcuggaaccugcgggagaugcucgcgcacgccgaggagacgcgcaagcugaugcccgucugcguggagaccaaggccaucguguccaccauccagcggaaguacaagggcaucaagauccaggagggggucguggacuacggcgcccgcuucuacuucuacaccagcaagacgaccguggccucccugaucaacacccucaacgaccugaacgagacccuggucacgaugccgcucggguacgugacccacggccugaaccuggaggaggcggcccgguacaugcgcagccucaaggugcccgccaccgucuccgugagcucccccgacgccgugaccgccuacaacggguaccugacgagcuccagcaagacccccgaggagcacuucaucgagaccaucucccuggcgggcagcuacaaggacuggagcuacuccggccagagcacccagcucgggaucgaguuccugaagcggggcgacaaguccgucuacuacacgagcaacccgaccaccuuccaccuggacggggaggugaucaccuucgacaaccucaagacgcugcugucccuccgcgaggugcggaccaucaaggucuucaccaccguggacaacaucaaccugcacacccagguggucgacaugagcaugaccuacggccagcaguucggccccaccuaccuggacggggccgacgugaccaagaucaagccccacaacucccacgagggcaagacguucuacgugcucccgaacgacgacacccugcgcgucgaggccuucgaguacuaccacaccaccgaccccagcuuccuggggcgguacauguccgcccucaaccacacgaagaaguggaaguacccccaggugaacggccugaccagcaucaagugggccgacaacaacugcuaccuggcgaccgcccuccugacccugcagcagaucgagcucaaguucaacccgcccgcccugcaggacgccuacuaccgcgcgcgggccggggaggccgccaacuucugcgcccugauccucgcguacugcaacaagacggugggcgagcugggcgacguccgcgagaccauguccuaccuguuccagcacgccaaccucgacagcugcaagcgggugcugaacgucgugugcaagaccugcgggcagcagcagaccacccugaagggcguggaggccgucauguacauggggacgcucuccuacgagcaguucaagaagggcgugcagauccccugcacgugcgggaagcaggccacccaguaccuggugcagcaggagagccccuucgucaugauguccgcgcccccggcccaguacgagcugaagcacggcaccuucacgugcgccagcgaguacaccggcaacuaccagugcgggcacuacaagcacaucaccuccaaggagacccucuacugcaucgacggcgcccugcugaccaagagcagcgaguacaaggggcccaucaccgacguguucuacaaggagaacuccuacaccaccacgaucaagcccgugaccuacaagcucgacggcgucgugugcaccgagaucgaccccaagcuggacaacuacuacaagaaggacaacagcuacuucaccgagcagccgaucgaccuggugcccaaccagcccuaccccaacgccuccuucgacaacuucaaguucgucugcgacaacaucaaguucgccgacgaccucaaccagcugacgggguacaagaagccggcgagccgcgagcugaaggugaccuucuuccccgaccucaacggcgacguggucgccaucgacuacaagcacuacacccccuccuucaagaagggcgccaagcugcugcacaagcccaucguguggcacgugaacaacgccaccaacaaggcgacguacaagccgaacaccuggugcauccggugccucuggagcaccaagcccgucgagaccuccaacagcuucgacgugcugaaguccgaggacgcccaggggauggacaaccuggccugcgaggaccucaagcccgugagcgaggaggucguggagaaccccacgauccagaaggacgugcuggagugcaacgucaagaccaccgagguggugggcgacaucauccugaagccggccaacaacucccucaagaucaccgaggaggucgggcacacggaccugauggccgcguacguggacaacagcucccugaccaucaagaagcccaacgagcucagccgcgugcugggccugaagacccucgccacccacgggcuggccgccgucaacuccgugcccugggacacgaucgccaacuacgcgaagccguuccugaacaagguggucagcaccaccaccaacaucgugacgcgcugccucaaccgggugugcaccaacuacaugcccuacuucuucacccugcugcuccagcugugcaccuucacgcgcuccaccaacagccggaucaaggccuccaugcccaccaccaucgccaagaacaccgucaagagcgugggcaaguucugccuggaggccagcuucaacuaccucaagucccccaacuucagcaagcugaucaacaucaucaucugguuccugcuccuguccgugugccugggcagccucaucuacuccacggccgcgcuggggguccugaugagcaaccucggcaugccguccuacugcaccggguaccgcgagggcuaccugaacagcaccaacgugaccaucgccacguacugcaccggcuccauccccugcagcgugugccuguccgggcucgacagccuggacaccuaccccucccuggagaccauccagaucacgaucagcuccuucaagugggaccucaccgccuucggccuggucgccgagugguuccuggccuacauccucuucacccgguucuucuacgugcuggggcuggcggccaucaugcagcuguucuucagcuacuucgccgugcacuucaucuccaacagcuggcucauguggcugaucaucaaccugguccagauggcccccaucuccgcgauggugcgcauguacaucuucuucgccagcuucuacuacguguggaaguccuacguccacgugguggacggcugcaacagcagcacgugcaugaugugcuacaagcggaaccgcgccacgcgggucgagugcaccaccaucgugaacgggguccgccgguccuucuacguguacgccaacggcggcaagggguucugcaagcuccacaacuggaacugcgugaacugcgacaccuucugcgccggcagcacguucaucuccgacgaggucgcgcgcgaccugagccugcaguucaagcggccgaucaaccccaccgaccaguccagcuacaucguggacuccgugaccgucaagaacgggagcauccaccucuacuucgacaaggccggccagaagaccuacgagcgccacucccugagccacuucgugaaccuggacaaccuccgggccaacaacacgaaggggucccugcccaucaacgugaucgucuucgacggcaagagcaagugcgaggaguccagcgccaaguccgccagcguguacuacucccagcugaugugccagcccauccuccugcuggaccaggcgcucgugagcgacgucggcgacagcgccgagguggccgugaagauguucgacgccuacgucaacaccuucuccagcaccuucaacgugccgauggagaagcugaagacccugguggccacggcggaggccgagcucgccaagaacgucucccuggacaacgugcugagcaccuucaucuccgccgcgcgccagggguucguggacagcgacgucgagaccaaggacgugguggagugccucaagcugucccaccagagcgacaucgaggucaccggcgacuccugcaacaacuacaugcugacguacaacaagguggagaacaugacgccccgggaccucggggccugcaucgacugcagcgcccgccacaucaacgcccagguggccaagucccacaacaucgcgcugaucuggaacgucaaggacuucaugagccuguccgagcagcuccggaagcagauccgcagcgccgccaagaagaacaaccugcccuucaagcugaccugcgccaccacccgccagguggugaacgucgugaccaccaagaucgcccucaagggcgggugaggacuagucccuguucccagagcccacuuuuuuuucuuuuuuugaaauaaaauagccugucuuucagaucuaaaaaaaaaaaaaaaaaaaaaaaaaaaaaaaaaaaaaaaaaaaaaaaaaaaaaaaaaaaaaaaaaaaaaaaaaaaaaaaaaaaaaaaaaaaaaaaaaaaa

SEQ ID NO: 28323 - RNA, 6089 nt, Artificial Sequence
  SARS-CoV-2/Wuhan-Hu-1__NC_045512.2/MN908947.2__non-structural protein 3 (NSP3) mRNA gc (1-1946)(A489S_P1229L_P1470S)
aggagagucccgcagucggcguccagcggcucugcuuguucgugugugugucguugcaggccuuauucaagcuuaccauggcccccaccaaggugaccuucggcgacgacaccgucaucgaggugcagggguacaagagcgugaacaucaccuucgagcuggacgagcgcaucgacaagguccucaacgagaagugcuccgccuacaccguggagcugggcaccgaggugaacgaguucgcgugcgucguggccgacgccgugaucaagacgcugcagccggucagcgagcuccugacgccccuggggaucgaccucgacgagugguccauggccaccuacuaccuguucgacgagagcggcgaguucaagcuggccucccacauguacugcagcuucuacccgcccgacgaggacgaggaggagggggacugcgaggaggaggaguucgagcccuccacccaguacgaguacggcacggaggacgacuaccagggcaagccccucgaguucggggcgaccagcgccgcccugcagcccgaggaggagcaggaggaggacuggcuggacgacgacucccagcagaccgugggccagcaggacgggagcgaggacaaccagaccacgaccauccagaccaucguggagguccagccccagcucgagauggagcugaccccgguggugcagacgaucgaggucaacuccuucagcggcuaccugaagcucaccgacaacguguacaucaagaacgccgacaucguggaggaggcgaagaaggucaagcccaccgugguggucaacgccgccaacguguaccugaagcacgggggcggcguggccggggcccugaacaaggcgaccaacaacgccaugcaggucgaguccgacgacuacaucgccacgaacggcccccucaaggucgggggcagcugcgugcuguccggccacaaccuggccaagcacugccuccacgugguggggcccaacgucaacaagggcgaggacauccagcugcucaagagcgccuacgagaacuucaaccagcacgaggugcugcuggcgccgcugcucuccgccgggaucuucggcgccgaccccauccacagccugcgggugugcgucgacaccgugcgcaccaacguguaccuggccgucuucgacaagaaccucuacgacaagcugguguccagcuuccuggagaugaaguccgagaagcaggucgagcagaagaucgccgagauccccaaggaggaggugaagcccuucaucaccgagagcaagccgagcguggagcagcggaagcaggacgacaagaagaucaaggcgugcguggaggaggucacgaccacccucgaggagaccaaguuccugacggagaaccugcuccuguacaucgacaucaacgggaaccugcaccccgacuccgccacccucgugagcgacaucgacaucaccuuccugaagaaggacgcccccuacaucgugggcgacgucgugcaggagggcgugcugaccgccgucgugauccccacgaagaagagcgggggcaccaccgagaugcucgcgaaggcccugcgcaaggugccgaccgacaacuacaucacgaccuaccccgggcagggccugaacggguacaccgucgaggaggccaagaccgugcucaagaagugcaaguccgccuucuacauccugcccagcaucaucuccaacgagaagcaggagauccugggcaccgugagcuggaaccugcgggagaugcucgcgcacgccgaggagacgcgcaagcugaugcccgucugcguggagaccaaggccaucguguccaccauccagcggaaguacaagggcaucaagauccaggagggggucguggacuacggcgcccgcuucuacuucuacaccagcaagacgaccguggccucccugaucaacacccucaacgaccugaacgagacccuggucacgaugccgcucggguacgugacccacggccugaaccuggaggaggcggcccgguacaugcgcagccucaaggugcccgccaccgucuccgugagcucccccgacgccgugaccgccuacaacggguaccugacgagcuccagcaagacccccgaggagcacuucaucgagaccaucucccuggcgggcagcuacaaggacuggagcuacuccggccagagcacccagcucgggaucgaguuccugaagcggggcgacaaguccgucuacuacacgagcaacccgaccaccuuccaccuggacggggaggugaucaccuucgacaaccucaagacgcugcugucccuccgcgaggugcggaccaucaaggucuucaccaccguggacaacaucaaccugcacacccagguggucgacaugagcaugaccuacggccagcaguucggccccaccuaccuggacggggccgacgugaccaagaucaagccccacaacucccacgagggcaagacguucuacgugcucccgaacgacgacacccugcgcgucgaggccuucgaguacuaccacaccaccgaccccagcuuccuggggcgguacauguccgcccucaaccacacgaagaaguggaaguacccccaggugaacggccugaccagcaucaagugggccgacaacaacugcuaccuggcgaccgcccuccugacccugcagcagaucgagcucaaguucaacccgcccgcccugcaggacgccuacuaccgcgcgcgggccggggaggccgccaacuucugcgcccugauccucgcguacugcaacaagacggugggcgagcugggcgacguccgcgagaccauguccuaccuguuccagcacgccaaccucgacagcugcaagcgggugcugaacgucgugugcaagaccugcgggcagcagcagaccacccugaagggcguggaggccgucauguacauggggacgcucuccuacgagcaguucaagaagggcgugcagauccccugcacgugcgggaagcaggccaccaaguaccuggugcagcaggagagccccuucgucaugauguccgcgcccccggcccaguacgagcugaagcacggcaccuucacgugcgccagcgaguacaccggcaacuaccagugcgggcacuacaagcacaucaccuccaaggagacccucuacugcaucgacggcgcccugcugaccaagagcagcgaguacaaggggcccaucaccgacguguucuacaaggagaacuccuacaccaccacgaucaagcccgugaccuacaagcucgacggcgucgugugcaccgagaucgaccccaagcuggacaacuacuacaagaaggacaacagcuacuucaccgagcagccgaucgaccuggugcccaaccagcccuaccccaacgccuccuucgacaacuucaaguucgucugcgacaacaucaaguucgccgacgaccucaaccagcugacgggguacaagaagccggcgagccgcgagcugaaggugaccuucuuccccgaccucaacggcgacguggucgccaucgacuacaagcacuacacccccuccuucaagaagggcgccaagcugcugcacaagcccaucguguggcacgugaacaacgccaccaacaaggcgacguacaagccgaacaccuggugcauccggugccucuggagcaccaagcccgucgagaccuccaacagcuucgacgugcugaaguccgaggacgcccaggggauggacaaccuggccugcgaggaccucaagcuggugagcgaggaggucguggagaaccccacgauccagaaggacgugcuggagugcaacgucaagaccaccgagguggugggcgacaucauccugaagccggccaacaacucccucaagaucaccgaggaggucgggcacacggaccugauggccgcguacguggacaacagcucccugaccaucaagaagcccaacgagcucagccgcgugcugggccugaagacccucgccacccacgggcuggccgccgucaacuccgugcccugggacacgaucgccaacuacgcgaagccguuccugaacaagguggucagcaccaccaccaacaucgugacgcgcugccucaaccgggugugcaccaacuacaugcccuacuucuucacccugcugcuccagcugugcaccuucacgcgcuccaccaacagccggaucaaggccuccaugcccaccaccaucgccaagaacaccgucaagagcgugggcaaguucugccuggaggccagcuucaacuaccucaagucccccaacuucagcaagcugaucaacaucaucaucugguuccugcuccuguccgugugccugggcagccucaucuacuccacggccgcgcuggggguccugaugagcaaccucggcaugccguccuacugcaccggguaccgcgagggcuaccugaacagcaccaacgugaccaucgccacguacugcaccggcuccaucagcugcagcgugugccuguccgggcucgacagccuggacaccuaccccucccuggagaccauccagaucacgaucagcuccuucaagugggaccucaccgccuucggccuggucgccgagugguuccuggccuacauccucuucacccgguucuucuacgugcuggggcuggcggccaucaugcagcuguucuucagcuacuucgccgugcacuucaucuccaacagcuggcucauguggcugaucaucaaccugguccagauggcccccaucuccgcgauggugcgcauguacaucuucuucgccagcuucuacuacguguggaaguccuacguccacgugguggacggcugcaacagcagcacgugcaugaugugcuacaagcggaaccgcgccacgcgggucgagugcaccaccaucgugaacgggguccgccgguccuucuacguguacgccaacggcggcaagggguucugcaagcuccacaacuggaacugcgugaacugcgacaccuucugcgccggcagcacguucaucuccgacgaggucgcgcgcgaccugagccugcaguucaagcggccgaucaaccccaccgaccaguccagcuacaucguggacuccgugaccgucaagaacgggagcauccaccucuacuucgacaaggccggccagaagaccuacgagcgccacucccugagccacuucgugaaccuggacaaccuccgggccaacaacacgaaggggucccugcccaucaacgugaucgucuucgacggcaagagcaagugcgaggaguccagcgccaaguccgccagcguguacuacucccagcugaugugccagcccauccuccugcuggaccaggcgcucgugagcgacgucggcgacagcgccgagguggccgugaagauguucgacgccuacgucaacaccuucuccagcaccuucaacgugccgauggagaagcugaagacccugguggccacggcggaggccgagcucgccaagaacgucucccuggacaacgugcugagcaccuucaucuccgccgcgcgccagggguucguggacagcgacgucgagaccaaggacgugguggagugccucaagcugucccaccagagcgacaucgaggucaccggcgacuccugcaacaacuacaugcugacguacaacaagguggagaacaugacgccccgggaccucggggccugcaucgacugcagcgcccgccacaucaacgcccagguggccaagucccacaacaucgcgcugaucuggaacgucaaggacuucaugagccuguccgagcagcuccggaagcagauccgcagcgccgccaagaagaacaaccugcccuucaagcugaccugcgccaccacccgccagguggugaacgucgugaccaccaagaucgcccucaagggcgggugaggacuagucccuguucccagagcccacuuuuuuuucuuuuuuugaaauaaaauagccugucuuucagaucuaaaaaaaaaaaaaaaaaaaaaaaaaaaaaaaaaaaaaaaaaaaaaaaaaaaaaaaaaaaaaaaaaaaaaaaaaaaaaaaaaaaaaaaaaaaaaaaaaaaa

SEQ ID NO: 28324 - RNA, 6089 nt, Artificial Sequence
  SARS-CoV-2/Wuhan-Hu-1__NC_045512.2/MN908947.2__non-structural protein 3 (NSP3) mRNA gc (1-1946)(K838N)
aggagagucccgcagucggcguccagcggcucugcuuguucgugugugugucguugcaggccuuauucaagcuuaccauggcccccaccaaggugaccuucggcgacgacaccgucaucgaggugcagggguacaagagcgugaacaucaccuucgagcuggacgagcgcaucgacaagguccucaacgagaagugcuccgccuacaccguggagcugggcaccgaggugaacgaguucgcgugcgucguggccgacgccgugaucaagacgcugcagccggucagcgagcuccugacgccccuggggaucgaccucgacgagugguccauggccaccuacuaccuguucgacgagagcggcgaguucaagcuggccucccacauguacugcagcuucuacccgcccgacgaggacgaggaggagggggacugcgaggaggaggaguucgagcccuccacccaguacgaguacggcacggaggacgacuaccagggcaagccccucgaguucggggcgaccagcgccgcccugcagcccgaggaggagcaggaggaggacuggcuggacgacgacucccagcagaccgugggccagcaggacgggagcgaggacaaccagaccacgaccauccagaccaucguggagguccagccccagcucgagauggagcugaccccgguggugcagacgaucgaggucaacuccuucagcggcuaccugaagcucaccgacaacguguacaucaagaacgccgacaucguggaggaggcgaagaaggucaagcccaccgugguggucaacgccgccaacguguaccugaagcacgggggcggcguggccggggcccugaacaaggcgaccaacaacgccaugcaggucgaguccgacgacuacaucgccacgaacggcccccucaaggucgggggcagcugcgugcuguccggccacaaccuggccaagcacugccuccacgugguggggcccaacgucaacaagggcgaggacauccagcugcucaagagcgccuacgagaacuucaaccagcacgaggugcugcuggcgccgcugcucuccgccgggaucuucggcgccgaccccauccacagccugcgggugugcgucgacaccgugcgcaccaacguguaccuggccgucuucgacaagaaccucuacgacaagcugguguccagcuuccuggagaugaaguccgagaagcaggucgagcagaagaucgccgagauccccaaggaggaggugaagcccuucaucaccgagagcaagccgagcguggagcagcggaagcaggacgacaagaagaucaaggcgugcguggaggaggucacgaccacccucgaggagaccaaguuccugacggagaaccugcuccuguacaucgacaucaacgggaaccugcaccccgacuccgccacccucgugagcgacaucgacaucaccuuccugaagaaggacgcccccuacaucgugggcgacgucgugcaggagggcgugcugaccgccgucgugauccccacgaagaaggccgggggcaccaccgagaugcucgcgaaggcccugcgcaaggugccgaccgacaacuacaucacgaccuaccccgggcagggccugaacggguacaccgucgaggaggccaagaccgugcucaagaagugcaaguccgccuucuacauccugcccagcaucaucuccaacgagaagcaggagauccugggcaccgugagcuggaaccugcgggagaugcucgcgcacgccgaggagacgcgcaagcugaugcccgucugcguggagaccaaggccaucguguccaccauccagcggaaguacaagggcaucaagauccaggagggggucguggacuacggcgcccgcuucuacuucuacaccagcaagacgaccguggccucccugaucaacacccucaacgaccugaacgagacccuggucacgaugccgcucggguacgugacccacggccugaaccuggaggaggcggcccgguacaugcgcagccucaaggugcccgccaccgucuccgugagcucccccgacgccgugaccgccuacaacggguaccugacgagcuccagcaagacccccgaggagcacuucaucgagaccaucucccuggcgggcagcuacaaggacuggagcuacuccggccagagcacccagcucgggaucgaguuccugaagcggggcgacaaguccgucuacuacacgagcaacccgaccaccuuccaccuggacggggaggugaucaccuucgacaaccucaagacgcugcugucccuccgcgaggugcggaccaucaaggucuucaccaccguggacaacaucaaccugcacacccagguggucgacaugagcaugaccuacggccagcaguucggccccaccuaccuggacggggccgacgugaccaagaucaagccccacaacucccacgagggcaagacguucuacgugcucccgaacgacgacacccugcgcgucgaggccuucgaguacuaccacaccaccgaccccagcuuccuggggcgguacauguccgcccucaaccacacgaagaacuggaaguacccccaggugaacggccugaccagcaucaagugggccgacaacaacugcuaccuggcgaccgcccuccugacccugcagcagaucgagcucaaguucaacccgcccgcccugcaggacgccuacuaccgcgcgcgggccggggaggccgccaacuucugcgcccugauccucgcguacugcaacaagacggugggcgagcugggcgacguccgcgagaccauguccuaccuguuccagcacgccaaccucgacagcugcaagcgggugcugaacgucgugugcaagaccugcgggcagcagcagaccacccugaagggcguggaggccgucauguacauggggacgcucuccuacgagcaguucaagaagggcgugcagauccccugcacgugcgggaagcaggccaccaaguaccuggugcagcaggagagccccuucgucaugauguccgcgcccccggcccaguacgagcugaagcacggcaccuucacgugcgccagcgaguacaccggcaacuaccagugcgggcacuacaagcacaucaccuccaaggagacccucuacugcaucgacggcgcccugcugaccaagagcagcgaguacaaggggcccaucaccgacguguucuacaaggagaacuccuacaccaccacgaucaagcccgugaccuacaagcucgacggcgucgugugcaccgagaucgaccccaagcuggacaacuacuacaagaaggacaacagcuacuucaccgagcagccgaucgaccuggugcccaaccagcccuaccccaacgccuccuucgacaacuucaaguucgucugcgacaacaucaaguucgccgacgaccucaaccagcugacgggguacaagaagccggcgagccgcgagcugaaggugaccuucuuccccgaccucaacggcgacguggucgccaucgacuacaagcacuacacccccuccuucaagaagggcgccaagcugcugcacaagcccaucguguggcacgugaacaacgccaccaacaaggcgacguacaagccgaacaccuggugcauccggugccucuggagcaccaagcccgucgagaccuccaacagcuucgacgugcugaaguccgaggacgcccaggggauggacaaccuggccugcgaggaccucaagcccgugagcgaggaggucguggagaaccccacgauccagaaggacgugcuggagugcaacgucaagaccaccgagguggugggcgacaucauccugaagccggccaacaacucccucaagaucaccgaggaggucgggcacacggaccugauggccgcguacguggacaacagcucccugaccaucaagaagcccaacgagcucagccgcgugcugggccugaagacccucgccacccacgggcuggccgccgucaacuccgugcccugggacacgaucgccaacuacgcgaagccguuccugaacaagguggucagcaccaccaccaacaucgugacgcgcugccucaaccgggugugcaccaacuacaugcccuacuucuucacccugcugcuccagcugugcaccuucacgcgcuccaccaacagccggaucaaggccuccaugcccaccaccaucgccaagaacaccgucaagagcgugggcaaguucugccuggaggccagcuucaacuaccucaagucccccaacuucagcaagcugaucaacaucaucaucugguuccugcuccuguccgugugccugggcagccucaucuacuccacggccgcgcuggggguccugaugagcaaccucggcaugccguccuacugcaccggguaccgcgagggcuaccugaacagcaccaacgugaccaucgccacguacugcaccggcuccauccccugcagcgugugccuguccgggcucgacagccuggacaccuaccccucccuggagaccauccagaucacgaucagcuccuucaagugggaccucaccgccuucggccuggucgccgagugguuccuggccuacauccucuucacccgguucuucuacgugcuggggcuggcggccaucaugcagcuguucuucagcuacuucgccgugcacuucaucuccaacagcuggcucauguggcugaucaucaaccugguccagauggcccccaucuccgcgauggugcgcauguacaucuucuucgccagcuucuacuacguguggaaguccuacguccacgugguggacggcugcaacagcagcacgugcaugaugugcuacaagcggaaccgcgccacgcgggucgagugcaccaccaucgugaacgggguccgccgguccuucuacguguacgccaacggcggcaagggguucugcaagcuccacaacuggaacugcgugaacugcgacaccuucugcgccggcagcacguucaucuccgacgaggucgcgcgcgaccugagccugcaguucaagcggccgaucaaccccaccgaccaguccagcuacaucguggacuccgugaccgucaagaacgggagcauccaccucuacuucgacaaggccggccagaagaccuacgagcgccacucccugagccacuucgugaaccuggacaaccuccgggccaacaacacgaaggggucccugcccaucaacgugaucgucuucgacggcaagagcaagugcgaggaguccagcgccaaguccgccagcguguacuacucccagcugaugugccagcccauccuccugcuggaccaggcgcucgugagcgacgucggcgacagcgccgagguggccgugaagauguucgacgccuacgucaacaccuucuccagcaccuucaacgugccgauggagaagcugaagacccugguggccacggcggaggccgagcucgccaagaacgucucccuggacaacgugcugagcaccuucaucuccgccgcgcgccagggguucguggacagcgacgucgagaccaaggacgugguggagugccucaagcugucccaccagagcgacaucgaggucaccggcgacuccugcaacaacuacaugcugacguacaacaagguggagaacaugacgccccgggaccucggggccugcaucgacugcagcgcccgccacaucaacgcccagguggccaagucccacaacaucgcgcugaucuggaacgucaaggacuucaugagccuguccgagcagcuccggaagcagauccgcagcgccgccaagaagaacaaccugcccuucaagcugaccugcgccaccacccgccagguggugaacgucgugaccaccaagaucgcccucaagggcgggugaggacuagucccuguucccagagcccacuuuuuuuucuuuuuuugaaauaaaauagccugucuuucagaucuaaaaaaaaaaaaaaaaaaaaaaaaaaaaaaaaaaaaaaaaaaaaaaaaaaaaaaaaaaaaaaaaaaaaaaaaaaaaaaaaaaaaaaaaaaaaaaaaaaaa

SEQ ID NO: 28325 - RNA, 6089 nt, Artificial Sequence
  SARS-CoV-2/Wuhan-Hu-1__NC_045512.2/MN908947.2__non-structural protein 3 (NSP3) mRNA gc (1-1946)(K838N_P1229L_N1779S)
aggagagucccgcagucggcguccagcggcucugcuuguucgugugugugucguugcaggccuuauucaagcuuaccauggcccccaccaaggugaccuucggcgacgacaccgucaucgaggugcagggguacaagagcgugaacaucaccuucgagcuggacgagcgcaucgacaagguccucaacgagaagugcuccgccuacaccguggagcugggcaccgaggugaacgaguucgcgugcgucguggccgacgccgugaucaagacgcugcagccggucagcgagcuccugacgccccuggggaucgaccucgacgagugguccauggccaccuacuaccuguucgacgagagcggcgaguucaagcuggccucccacauguacugcagcuucuacccgcccgacgaggacgaggaggagggggacugcgaggaggaggaguucgagcccuccacccaguacgaguacggcacggaggacgacuaccagggcaagccccucgaguucggggcgaccagcgccgcccugcagcccgaggaggagcaggaggaggacuggcuggacgacgacucccagcagaccgugggccagcaggacgggagcgaggacaaccagaccacgaccauccagaccaucguggagguccagccccagcucgagauggagcugaccccgguggugcagacgaucgaggucaacuccuucagcggcuaccugaagcucaccgacaacguguacaucaagaacgccgacaucguggaggaggcgaagaaggucaagcccaccgugguggucaacgccgccaacguguaccugaagcacgggggcggcguggccggggcccugaacaaggcgaccaacaacgccaugcaggucgaguccgacgacuacaucgccacgaacggcccccucaaggucgggggcagcugcgugcuguccggccacaaccuggccaagcacugccuccacgugguggggcccaacgucaacaagggcgaggacauccagcugcucaagagcgccuacgagaacuucaaccagcacgaggugcugcuggcgccgcugcucuccgccgggaucuucggcgccgaccccauccacagccugcgggugugcgucgacaccgugcgcaccaacguguaccuggccgucuucgacaagaaccucuacgacaagcugguguccagcuuccuggagaugaaguccgagaagcaggucgagcagaagaucgccgagauccccaaggaggaggugaagcccuucaucaccgagagcaagccgagcguggagcagcggaagcaggacgacaagaagaucaaggcgugcguggaggaggucacgaccacccucgaggagaccaaguuccugacggagaaccugcuccuguacaucgacaucaacgggaaccugcaccccgacuccgccacccucgugagcgacaucgacaucaccuuccugaagaaggacgcccccuacaucgugggcgacgucgugcaggagggcgugcugaccgccgucgugauccccacgaagaaggccgggggcaccaccgagaugcucgcgaaggcccugcgcaaggugccgaccgacaacuacaucacgaccuaccccgggcagggccugaacggguacaccgucgaggaggccaagaccgugcucaagaagugcaaguccgccuucuacauccugcccagcaucaucuccaacgagaagcaggagauccugggcaccgugagcuggaaccugcgggagaugcucgcgcacgccgaggagacgcgcaagcugaugcccgucugcguggagaccaaggccaucguguccaccauccagcggaaguacaagggcaucaagauccaggagggggucguggacuacggcgcccgcuucuacuucuacaccagcaagacgaccguggccucccugaucaacacccucaacgaccugaacgagacccuggucacgaugccgcucggguacgugacccacggccugaaccuggaggaggcggcccgguacaugcgcagccucaaggugcccgccaccgucuccgugagcucccccgacgccgugaccgccuacaacggguaccugacgagcuccagcaagacccccgaggagcacuucaucgagaccaucucccuggcgggcagcuacaaggacuggagcuacuccggccagagcacccagcucgggaucgaguuccugaagcggggcgacaaguccgucuacuacacgagcaacccgaccaccuuccaccuggacggggaggugaucaccuucgacaaccucaagacgcugcugucccuccgcgaggugcggaccaucaaggucuucaccaccguggacaacaucaaccugcacacccagguggucgacaugagcaugaccuacggccagcaguucggccccaccuaccuggacggggccgacgugaccaagaucaagccccacaacucccacgagggcaagacguucuacgugcucccgaacgacgacacccugcgcgucgaggccuucgaguacuaccacaccaccgaccccagcuuccuggggcgguacauguccgcccucaaccacacgaagaacuggaaguacccccaggugaacggccugaccagcaucaagugggccgacaacaacugcuaccuggcgaccgcccuccugacccugcagcagaucgagcucaaguucaacccgcccgcccugcaggacgccuacuaccgcgcgcgggccggggaggccgccaacuucugcgcccugauccucgcguacugcaacaagacggugggcgagcugggcgacguccgcgagaccauguccuaccuguuccagcacgccaaccucgacagcugcaagcgggugcugaacgucgugugcaagaccugcgggcagcagcagaccacccugaagggcguggaggccgucauguacauggggacgcucuccuacgagcaguucaagaagggcgugcagauccccugcacgugcgggaagcaggccaccaaguaccuggugcagcaggagagccccuucgucaugauguccgcgcccccggcccaguacgagcugaagcacggcaccuucacgugcgccagcgaguacaccggcaacuaccagugcgggcacuacaagcacaucaccuccaaggagacccucuacugcaucgacggcgcccugcugaccaagagcagcgaguacaaggggcccaucaccgacguguucuacaaggagaacuccuacaccaccacgaucaagcccgugaccuacaagcucgacggcgucgugugcaccgagaucgaccccaagcuggacaacuacuacaagaaggacaacagcuacuucaccgagcagccgaucgaccuggugcccaaccagcccuaccccaacgccuccuucgacaacuucaaguucgucugcgacaacaucaaguucgccgacgaccucaaccagcugacgggguacaagaagccggcgagccgcgagcugaaggugaccuucuuccccgaccucaacggcgacguggucgccaucgacuacaagcacuacacccccuccuucaagaagggcgccaagcugcugcacaagcccaucguguggcacgugaacaacgccaccaacaaggcgacguacaagccgaacaccuggugcauccggugccucuggagcaccaagcccgucgagaccuccaacagcuucgacgugcugaaguccgaggacgcccaggggauggacaaccuggccugcgaggaccucaagcuggugagcgaggaggucguggagaaccccacgauccagaaggacgugcuggagugcaacgucaagaccaccgagguggugggcgacaucauccugaagccggccaacaacucccucaagaucaccgaggaggucgggcacacggaccugauggccgcguacguggacaacagcucccugaccaucaagaagcccaacgagcucagccgcgugcugggccugaagacccucgccacccacgggcuggccgccgucaacuccgugcccugggacacgaucgccaacuacgcgaagccguuccugaacaagguggucagcaccaccaccaacaucgugacgcgcugccucaaccgggugugcaccaacuacaugcccuacuucuucacccugcugcuccagcugugcaccuucacgcgcuccaccaacagccggaucaaggccuccaugcccaccaccaucgccaagaacaccgucaagagcgugggcaaguucugccuggaggccagcuucaacuaccucaagucccccaacuucagcaagcugaucaacaucaucaucugguuccugcuccuguccgugugccugggcagccucaucuacuccacggccgcgcuggggguccugaugagcaaccucggcaugccguccuacugcaccggguaccgcgagggcuaccugaacagcaccaacgugaccaucgccacguacugcaccggcuccauccccugcagcgugugccuguccgggcucgacagccuggacaccuaccccucccuggagaccauccagaucacgaucagcuccuucaagugggaccucaccgccuucggccuggucgccgagugguuccuggccuacauccucuucacccgguucuucuacgugcuggggcuggcggccaucaugcagcuguucuucagcuacuucgccgugcacuucaucuccaacagcuggcucauguggcugaucaucaaccugguccagauggcccccaucuccgcgauggugcgcauguacaucuucuucgccagcuucuacuacguguggaaguccuacguccacgugguggacggcugcaacagcagcacgugcaugaugugcuacaagcggaaccgcgccacgcgggucgagugcaccaccaucgugaacgggguccgccgguccuucuacguguacgccaacggcggcaagggguucugcaagcuccacaacuggaacugcgugaacugcgacaccuucugcgccggcagcacguucaucuccgacgaggucgcgcgcgaccugagccugcaguucaagcggccgaucaaccccaccgaccaguccagcuacaucguggacuccgugaccgucaagaacgggagcauccaccucuacuucgacaaggccggccagaagaccuacgagcgccacucccugagccacuucgugaaccuggacaaccuccgggccaacaacacgaaggggucccugcccaucaacgugaucgucuucgacggcaagagcaagugcgaggaguccagcgccaaguccgccagcguguacuacucccagcugaugugccagcccauccuccugcuggaccaggcgcucgugagcgacgucggcgacagcgccgagguggccgugaagauguucgacgccuacgucagcaccuucuccagcaccuucaacgugccgauggagaagcugaagacccugguggccacggcggaggccgagcucgccaagaacgucucccuggacaacgugcugagcaccuucaucuccgccgcgcgccagggguucguggacagcgacgucgagaccaaggacgugguggagugccucaagcugucccaccagagcgacaucgaggucaccggcgacuccugcaacaacuacaugcugacguacaacaagguggagaacaugacgccccgggaccucggggccugcaucgacugcagcgcccgccacaucaacgcccagguggccaagucccacaacaucgcgcugaucuggaacgucaaggacuucaugagccuguccgagcagcuccggaagcagauccgcagcgccgccaagaagaacaaccugcccuucaagcugaccugcgccaccacccgccagguggugaacgucgugaccaccaagaucgcccucaagggcgggugaggacuagucccuguucccagagcccacuuuuuuuucuuuuuuugaaauaaaauagccugucuuucagaucuaaaaaaaaaaaaaaaaaaaaaaaaaaaaaaaaaaaaaaaaaaaaaaaaaaaaaaaaaaaaaaaaaaaaaaaaaaaaaaaaaaaaaaaaaaaaaaaaaaaa

SEQ ID NO: 28326 - RNA, 6089 nt, Artificial Sequence
  SARS-CoV-2/Wuhan-Hu-1__NC_045512.2/MN908947.2__non-structural protein 3 (NSP3) mRNA gc (1-1946)(K838N_N1779S)
aggagagucccgcagucggcguccagcggcucugcuuguucgugugugugucguugcaggccuuauucaagcuuaccauggcccccaccaaggugaccuucggcgacgacaccgucaucgaggugcagggguacaagagcgugaacaucaccuucgagcuggacgagcgcaucgacaagguccucaacgagaagugcuccgccuacaccguggagcugggcaccgaggugaacgaguucgcgugcgucguggccgacgccgugaucaagacgcugcagccggucagcgagcuccugacgccccuggggaucgaccucgacgagugguccauggccaccuacuaccuguucgacgagagcggcgaguucaagcuggccucccacauguacugcagcuucuacccgcccgacgaggacgaggaggagggggacugcgaggaggaggaguucgagcccuccacccaguacgaguacggcacggaggacgacuaccagggcaagccccucgaguucggggcgaccagcgccgcccugcagcccgaggaggagcaggaggaggacuggcuggacgacgacucccagcagaccgugggccagcaggacgggagcgaggacaaccagaccacgaccauccagaccaucguggagguccagccccagcucgagauggagcugaccccgguggugcagacgaucgaggucaacuccuucagcggcuaccugaagcucaccgacaacguguacaucaagaacgccgacaucguggaggaggcgaagaaggucaagcccaccgugguggucaacgccgccaacguguaccugaagcacgggggcggcguggccggggcccugaacaaggcgaccaacaacgccaugcaggucgaguccgacgacuacaucgccacgaacggcccccucaaggucgggggcagcugcgugcuguccggccacaaccuggccaagcacugccuccacgugguggggcccaacgucaacaagggcgaggacauccagcugcucaagagcgccuacgagaacuucaaccagcacgaggugcugcuggcgccgcugcucuccgccgggaucuucggcgccgaccccauccacagccugcgggugugcgucgacaccgugcgcaccaacguguaccuggccgucuucgacaagaaccucuacgacaagcugguguccagcuuccuggagaugaaguccgagaagcaggucgagcagaagaucgccgagauccccaaggaggaggugaagcccuucaucaccgagagcaagccgagcguggagcagcggaagcaggacgacaagaagaucaaggcgugcguggaggaggucacgaccacccucgaggagaccaaguuccugacggagaaccugcuccuguacaucgacaucaacgggaaccugcaccccgacuccgccacccucgugagcgacaucgacaucaccuuccugaagaaggacgcccccuacaucgugggcgacgucgugcaggagggcgugcugaccgccgucgugauccccacgaagaaggccgggggcaccaccgagaugcucgcgaaggcccugcgcaaggugccgaccgacaacuacaucacgaccuaccccgggcagggccugaacggguacaccgucgaggaggccaagaccgugcucaagaagugcaaguccgccuucuacauccugcccagcaucaucuccaacgagaagcaggagauccugggcaccgugagcuggaaccugcgggagaugcucgcgcacgccgaggagacgcgcaagcugaugcccgucugcguggagaccaaggccaucguguccaccauccagcggaaguacaagggcaucaagauccaggagggggucguggacuacggcgcccgcuucuacuucuacaccagcaagacgaccguggccucccugaucaacacccucaacgaccugaacgagacccuggucacgaugccgcucggguacgugacccacggccugaaccuggaggaggcggcccgguacaugcgcagccucaaggugcccgccaccgucuccgugagcucccccgacgccgugaccgccuacaacggguaccugacgagcuccagcaagacccccgaggagcacuucaucgagaccaucucccuggcgggcagcuacaaggacuggagcuacuccggccagagcacccagcucgggaucgaguuccugaagcggggcgacaaguccgucuacuacacgagcaacccgaccaccuuccaccuggacggggaggugaucaccuucgacaaccucaagacgcugcugucccuccgcgaggugcggaccaucaaggucuucaccaccguggacaacaucaaccugcacacccagguggucgacaugagcaugaccuacggccagcaguucggccccaccuaccuggacggggccgacgugaccaagaucaagccccacaacucccacgagggcaagacguucuacgugcucccgaacgacgacacccugcgcgucgaggccuucgaguacuaccacaccaccgaccccagcuuccuggggcgguacauguccgcccucaaccacacgaagaacuggaaguacccccaggugaacggccugaccagcaucaagugggccgacaacaacugcuaccuggcgaccgcccuccugacccugcagcagaucgagcucaaguucaacccgcccgcccugcaggacgccuacuaccgcgcgcgggccggggaggccgccaacuucugcgcccugauccucgcguacugcaacaagacggugggcgagcugggcgacguccgcgagaccauguccuaccuguuccagcacgccaaccucgacagcugcaagcgggugcugaacgucgugugcaagaccugcgggcagcagcagaccacccugaagggcguggaggccgucauguacauggggacgcucuccuacgagcaguucaagaagggcgugcagauccccugcacgugcgggaagcaggccaccaaguaccuggugcagcaggagagccccuucgucaugauguccgcgcccccggcccaguacgagcugaagcacggcaccuucacgugcgccagcgaguacaccggcaacuaccagugcgggcacuacaagcacaucaccuccaaggagacccucuacugcaucgacggcgcccugcugaccaagagcagcgaguacaaggggcccaucaccgacguguucuacaaggagaacuccuacaccaccacgaucaagcccgugaccuacaagcucgacggcgucgugugcaccgagaucgaccccaagcuggacaacuacuacaagaaggacaacagcuacuucaccgagcagccgaucgaccuggugcccaaccagcccuaccccaacgccuccuucgacaacuucaaguucgucugcgacaacaucaaguucgccgacgaccucaaccagcugacgggguacaagaagccggcgagccgcgagcugaaggugaccuucuuccccgaccucaacggcgacguggucgccaucgacuacaagcacuacacccccuccuucaagaagggcgccaagcugcugcacaagcccaucguguggcacgugaacaacgccaccaacaaggcgacguacaagccgaacaccuggugcauccggugccucuggagcaccaagcccgucgagaccuccaacagcuucgacgugcugaaguccgaggacgcccaggggauggacaaccuggccugcgaggaccucaagcccgugagcgaggaggucguggagaaccccacgauccagaaggacgugcuggagugcaacgucaagaccaccgagguggugggcgacaucauccugaagccggccaacaacucccucaagaucaccgaggaggucgggcacacggaccugauggccgcguacguggacaacagcucccugaccaucaagaagcccaacgagcucagccgcgugcugggccugaagacccucgccacccacgggcuggccgccgucaacuccgugcccugggacacgaucgccaacuacgcgaagccguuccugaacaagguggucagcaccaccaccaacaucgugacgcgcugccucaaccgggugugcaccaacuacaugcccuacuucuucacccugcugcuccagcugugcaccuucacgcgcuccaccaacagccggaucaaggccuccaugcccaccaccaucgccaagaacaccgucaagagcgugggcaaguucugccuggaggccagcuucaacuaccucaagucccccaacuucagcaagcugaucaacaucaucaucugguuccugcuccuguccgugugccugggcagccucaucuacuccacggccgcgcuggggguccugaugagcaaccucggcaugccguccuacugcaccggguaccgcgagggcuaccugaacagcaccaacgugaccaucgccacguacugcaccggcuccauccccugcagcgugugccuguccgggcucgacagccuggacaccuaccccucccuggagaccauccagaucacgaucagcuccuucaagugggaccucaccgccuucggccuggucgccgagugguuccuggccuacauccucuucacccgguucuucuacgugcuggggcuggcggccaucaugcagcuguucuucagcuacuucgccgugcacuucaucuccaacagcuggcucauguggcugaucaucaaccugguccagauggcccccaucuccgcgauggugcgcauguacaucuucuucgccagcuucuacuacguguggaaguccuacguccacgugguggacggcugcaacagcagcacgugcaugaugugcuacaagcggaaccgcgccacgcgggucgagugcaccaccaucgugaacgggguccgccgguccuucuacguguacgccaacggcggcaagggguucugcaagcuccacaacuggaacugcgugaacugcgacaccuucugcgccggcagcacguucaucuccgacgaggucgcgcgcgaccugagccugcaguucaagcggccgaucaaccccaccgaccaguccagcuacaucguggacuccgugaccgucaagaacgggagcauccaccucuacuucgacaaggccggccagaagaccuacgagcgccacucccugagccacuucgugaaccuggacaaccuccgggccaacaacacgaaggggucccugcccaucaacgugaucgucuucgacggcaagagcaagugcgaggaguccagcgccaaguccgccagcguguacuacucccagcugaugugccagcccauccuccugcuggaccaggcgcucgugagcgacgucggcgacagcgccgagguggccgugaagauguucgacgccuacgucagcaccuucuccagcaccuucaacgugccgauggagaagcugaagacccugguggccacggcggaggccgagcucgccaagaacgucucccuggacaacgugcugagcaccuucaucuccgccgcgcgccagggguucguggacagcgacgucgagaccaaggacgugguggagugccucaagcugucccaccagagcgacaucgaggucaccggcgacuccugcaacaacuacaugcugacguacaacaagguggagaacaugacgccccgggaccucggggccugcaucgacugcagcgcccgccacaucaacgcccagguggccaagucccacaacaucgcgcugaucuggaacgucaaggacuucaugagccuguccgagcagcuccggaagcagauccgcagcgccgccaagaagaacaaccugcccuucaagcugaccugcgccaccacccgccagguggugaacgucgugaccaccaagaucgcccucaagggcgggugaggacuagucccuguucccagagcccacuuuuuuuucuuuuuuugaaauaaaauagccugucuuucagaucuaaaaaaaaaaaaaaaaaaaaaaaaaaaaaaaaaaaaaaaaaaaaaaaaaaaaaaaaaaaaaaaaaaaaaaaaaaaaaaaaaaaaaaaaaaaaaaaaaaaa

SEQ ID NO: 28327 - RNA, 6089 nt, Artificial Sequence
  SARS-CoV-2/Wuhan-Hu-1__NC_045512.2/MN908947.2__non-structural protein 3 (NSP3) mRNA gc (1-1946)(A489S_P1229L_P1470S_A1712V)
aggagagucccgcagucggcguccagcggcucugcuuguucgugugugugucguugcaggccuuauucaagcuuaccauggcccccaccaaggugaccuucggcgacgacaccgucaucgaggugcagggguacaagagcgugaacaucaccuucgagcuggacgagcgcaucgacaagguccucaacgagaagugcuccgccuacaccguggagcugggcaccgaggugaacgaguucgcgugcgucguggccgacgccgugaucaagacgcugcagccggucagcgagcuccugacgccccuggggaucgaccucgacgagugguccauggccaccuacuaccuguucgacgagagcggcgaguucaagcuggccucccacauguacugcagcuucuacccgcccgacgaggacgaggaggagggggacugcgaggaggaggaguucgagcccuccacccaguacgaguacggcacggaggacgacuaccagggcaagccccucgaguucggggcgaccagcgccgcccugcagcccgaggaggagcaggaggaggacuggcuggacgacgacucccagcagaccgugggccagcaggacgggagcgaggacaaccagaccacgaccauccagaccaucguggagguccagccccagcucgagauggagcugaccccgguggugcagacgaucgaggucaacuccuucagcggcuaccugaagcucaccgacaacguguacaucaagaacgccgacaucguggaggaggcgaagaaggucaagcccaccgugguggucaacgccgccaacguguaccugaagcacgggggcggcguggccggggcccugaacaaggcgaccaacaacgccaugcaggucgaguccgacgacuacaucgccacgaacggcccccucaaggucgggggcagcugcgugcuguccggccacaaccuggccaagcacugccuccacgugguggggcccaacgucaacaagggcgaggacauccagcugcucaagagcgccuacgagaacuucaaccagcacgaggugcugcuggcgccgcugcucuccgccgggaucuucggcgccgaccccauccacagccugcgggugugcgucgacaccgugcgcaccaacguguaccuggccgucuucgacaagaaccucuacgacaagcugguguccagcuuccuggagaugaaguccgagaagcaggucgagcagaagaucgccgagauccccaaggaggaggugaagcccuucaucaccgagagcaagccgagcguggagcagcggaagcaggacgacaagaagaucaaggcgugcguggaggaggucacgaccacccucgaggagaccaaguuccugacggagaaccugcuccuguacaucgacaucaacgggaaccugcaccccgacuccgccacccucgugagcgacaucgacaucaccuuccugaagaaggacgcccccuacaucgugggcgacgucgugcaggagggcgugcugaccgccgucgugauccccacgaagaagagcgggggcaccaccgagaugcucgcgaaggcccugcgcaaggugccgaccgacaacuacaucacgaccuaccccgggcagggccugaacggguacaccgucgaggaggccaagaccgugcucaagaagugcaaguccgccuucuacauccugcccagcaucaucuccaacgagaagcaggagauccugggcaccgugagcuggaaccugcgggagaugcucgcgcacgccgaggagacgcgcaagcugaugcccgucugcguggagaccaaggccaucguguccaccauccagcggaaguacaagggcaucaagauccaggagggggucguggacuacggcgcccgcuucuacuucuacaccagcaagacgaccguggccucccugaucaacacccucaacgaccugaacgagacccuggucacgaugccgcucggguacgugacccacggccugaaccuggaggaggcggcccgguacaugcgcagccucaaggugcccgccaccgucuccgugagcucccccgacgccgugaccgccuacaacggguaccugacgagcuccagcaagacccccgaggagcacuucaucgagaccaucucccuggcgggcagcuacaaggacuggagcuacuccggccagagcacccagcucgggaucgaguuccugaagcggggcgacaaguccgucuacuacacgagcaacccgaccaccuuccaccuggacggggaggugaucaccuucgacaaccucaagacgcugcugucccuccgcgaggugcggaccaucaaggucuucaccaccguggacaacaucaaccugcacacccagguggucgacaugagcaugaccuacggccagcaguucggccccaccuaccuggacggggccgacgugaccaagaucaagccccacaacucccacgagggcaagacguucuacgugcucccgaacgacgacacccugcgcgucgaggccuucgaguacuaccacaccaccgaccccagcuuccuggggcgguacauguccgcccucaaccacacgaagaaguggaaguacccccaggugaacggccugaccagcaucaagugggccgacaacaacugcuaccuggcgaccgcccuccugacccugcagcagaucgagcucaaguucaacccgcccgcccugcaggacgccuacuaccgcgcgcgggccggggaggccgccaacuucugcgcccugauccucgcguacugcaacaagacggugggcgagcugggcgacguccgcgagaccauguccuaccuguuccagcacgccaaccucgacagcugcaagcgggugcugaacgucgugugcaagaccugcgggcagcagcagaccacccugaagggcguggaggccgucauguacauggggacgcucuccuacgagcaguucaagaagggcgugcagauccccugcacgugcgggaagcaggccaccaaguaccuggugcagcaggagagccccuucgucaugauguccgcgcccccggcccaguacgagcugaagcacggcaccuucacgugcgccagcgaguacaccggcaacuaccagugcgggcacuacaagcacaucaccuccaaggagacccucuacugcaucgacggcgcccugcugaccaagagcagcgaguacaaggggcccaucaccgacguguucuacaaggagaacuccuacaccaccacgaucaagcccgugaccuacaagcucgacggcgucgugugcaccgagaucgaccccaagcuggacaacuacuacaagaaggacaacagcuacuucaccgagcagccgaucgaccuggugcccaaccagcccuaccccaacgccuccuucgacaacuucaaguucgucugcgacaacaucaaguucgccgacgaccucaaccagcugacgggguacaagaagccggcgagccgcgagcugaaggugaccuucuuccccgaccucaacggcgacguggucgccaucgacuacaagcacuacacccccuccuucaagaagggcgccaagcugcugcacaagcccaucguguggcacgugaacaacgccaccaacaaggcgacguacaagccgaacaccuggugcauccggugccucuggagcaccaagcccgucgagaccuccaacagcuucgacgugcugaaguccgaggacgcccaggggauggacaaccuggccugcgaggaccucaagcuggugagcgaggaggucguggagaaccccacgauccagaaggacgugcuggagugcaacgucaagaccaccgagguggugggcgacaucauccugaagccggccaacaacucccucaagaucaccgaggaggucgggcacacggaccugauggccgcguacguggacaacagcucccugaccaucaagaagcccaacgagcucagccgcgugcugggccugaagacccucgccacccacgggcuggccgccgucaacuccgugcccugggacacgaucgccaacuacgcgaagccguuccugaacaagguggucagcaccaccaccaacaucgugacgcgcugccucaaccgggugugcaccaacuacaugcccuacuucuucacccugcugcuccagcugugcaccuucacgcgcuccaccaacagccggaucaaggccuccaugcccaccaccaucgccaagaacaccgucaagagcgugggcaaguucugccuggaggccagcuucaacuaccucaagucccccaacuucagcaagcugaucaacaucaucaucugguuccugcuccuguccgugugccugggcagccucaucuacuccacggccgcgcuggggguccugaugagcaaccucggcaugccguccuacugcaccggguaccgcgagggcuaccugaacagcaccaacgugaccaucgccacguacugcaccggcuccaucagcugcagcgugugccuguccgggcucgacagccuggacaccuaccccucccuggagaccauccagaucacgaucagcuccuucaagugggaccucaccgccuucggccuggucgccgagugguuccuggccuacauccucuucacccgguucuucuacgugcuggggcuggcggccaucaugcagcuguucuucagcuacuucgccgugcacuucaucuccaacagcuggcucauguggcugaucaucaaccugguccagauggcccccaucuccgcgauggugcgcauguacaucuucuucgccagcuucuacuacguguggaaguccuacguccacgugguggacggcugcaacagcagcacgugcaugaugugcuacaagcggaaccgcgccacgcgggucgagugcaccaccaucgugaacgggguccgccgguccuucuacguguacgccaacggcggcaagggguucugcaagcuccacaacuggaacugcgugaacugcgacaccuucugcgccggcagcacguucaucuccgacgaggucgcgcgcgaccugagccugcaguucaagcggccgaucaaccccaccgaccaguccagcuacaucguggacuccgugaccgucaagaacgggagcauccaccucuacuucgacaaggccggccagaagaccuacgagcgccacucccugagccacuucgugaaccuggacaaccuccgggugaacaacacgaaggggucccugcccaucaacgugaucgucuucgacggcaagagcaagugcgaggaguccagcgccaaguccgccagcguguacuacucccagcugaugugccagcccauccuccugcuggaccaggcgcucgugagcgacgucggcgacagcgccgagguggccgugaagauguucgacgccuacgucaacaccuucuccagcaccuucaacgugccgauggagaagcugaagacccugguggccacggcggaggccgagcucgccaagaacgucucccuggacaacgugcugagcaccuucaucuccgccgcgcgccagggguucguggacagcgacgucgagaccaaggacgugguggagugccucaagcugucccaccagagcgacaucgaggucaccggcgacuccugcaacaacuacaugcugacguacaacaagguggagaacaugacgccccgggaccucggggccugcaucgacugcagcgcccgccacaucaacgcccagguggccaagucccacaacaucgcgcugaucuggaacgucaaggacuucaugagccuguccgagcagcuccggaagcagauccgcagcgccgccaagaagaacaaccugcccuucaagcugaccugcgccaccacccgccagguggugaacgucgugaccaccaagaucgcccucaagggcgggugaggacuagucccuguucccagagcccacuuuuuuuucuuuuuuugaaauaaaauagccugucuuucagaucuaaaaaaaaaaaaaaaaaaaaaaaaaaaaaaaaaaaaaaaaaaaaaaaaaaaaaaaaaaaaaaaaaaaaaaaaaaaaaaaaaaaaaaaaaaaaaaaaaaaa

SEQ ID NO: 28328 - RNA, 6089 nt, Artificial Sequence
  SARS-CoV-2/Wuhan-Hu-1__NC_045512.2/MN908947.2__non-structural protein 3 (NSP3) mRNA gc (1-1946)(S795L_K838N)
aggagagucccgcagucggcguccagcggcucugcuuguucgugugugugucguugcaggccuuauucaagcuuaccauggcccccaccaaggugaccuucggcgacgacaccgucaucgaggugcagggguacaagagcgugaacaucaccuucgagcuggacgagcgcaucgacaagguccucaacgagaagugcuccgccuacaccguggagcugggcaccgaggugaacgaguucgcgugcgucguggccgacgccgugaucaagacgcugcagccggucagcgagcuccugacgccccuggggaucgaccucgacgagugguccauggccaccuacuaccuguucgacgagagcggcgaguucaagcuggccucccacauguacugcagcuucuacccgcccgacgaggacgaggaggagggggacugcgaggaggaggaguucgagcccuccacccaguacgaguacggcacggaggacgacuaccagggcaagccccucgaguucggggcgaccagcgccgcccugcagcccgaggaggagcaggaggaggacuggcuggacgacgacucccagcagaccgugggccagcaggacgggagcgaggacaaccagaccacgaccauccagaccaucguggagguccagccccagcucgagauggagcugaccccgguggugcagacgaucgaggucaacuccuucagcggcuaccugaagcucaccgacaacguguacaucaagaacgccgacaucguggaggaggcgaagaaggucaagcccaccgugguggucaacgccgccaacguguaccugaagcacgggggcggcguggccggggcccugaacaaggcgaccaacaacgccaugcaggucgaguccgacgacuacaucgccacgaacggcccccucaaggucgggggcagcugcgugcuguccggccacaaccuggccaagcacugccuccacgugguggggcccaacgucaacaagggcgaggacauccagcugcucaagagcgccuacgagaacuucaaccagcacgaggugcugcuggcgccgcugcucuccgccgggaucuucggcgccgaccccauccacagccugcgggugugcgucgacaccgugcgcaccaacguguaccuggccgucuucgacaagaaccucuacgacaagcugguguccagcuuccuggagaugaaguccgagaagcaggucgagcagaagaucgccgagauccccaaggaggaggugaagcccuucaucaccgagagcaagccgagcguggagcagcggaagcaggacgacaagaagaucaaggcgugcguggaggaggucacgaccacccucgaggagaccaaguuccugacggagaaccugcuccuguacaucgacaucaacgggaaccugcaccccgacuccgccacccucgugagcgacaucgacaucaccuuccugaagaaggacgcccccuacaucgugggcgacgucgugcaggagggcgugcugaccgccgucgugauccccacgaagaaggccgggggcaccaccgagaugcucgcgaaggcccugcgcaaggugccgaccgacaacuacaucacgaccuaccccgggcagggccugaacggguacaccgucgaggaggccaagaccgugcucaagaagugcaaguccgccuucuacauccugcccagcaucaucuccaacgagaagcaggagauccugggcaccgugagcuggaaccugcgggagaugcucgcgcacgccgaggagacgcgcaagcugaugcccgucugcguggagaccaaggccaucguguccaccauccagcggaaguacaagggcaucaagauccaggagggggucguggacuacggcgcccgcuucuacuucuacaccagcaagacgaccguggccucccugaucaacacccucaacgaccugaacgagacccuggucacgaugccgcucggguacgugacccacggccugaaccuggaggaggcggcccgguacaugcgcagccucaaggugcccgccaccgucuccgugagcucccccgacgccgugaccgccuacaacggguaccugacgagcuccagcaagacccccgaggagcacuucaucgagaccaucucccuggcgggcagcuacaaggacuggagcuacuccggccagagcacccagcucgggaucgaguuccugaagcggggcgacaaguccgucuacuacacgagcaacccgaccaccuuccaccuggacggggaggugaucaccuucgacaaccucaagacgcugcugucccuccgcgaggugcggaccaucaaggucuucaccaccguggacaacaucaaccugcacacccagguggucgacaugagcaugaccuacggccagcaguucggccccaccuaccuggacggggccgacgugaccaagaucaagccccacaaccugcacgagggcaagacguucuacgugcucccgaacgacgacacccugcgcgucgaggccuucgaguacuaccacaccaccgaccccagcuuccuggggcgguacauguccgcccucaaccacacgaagaacuggaaguacccccaggugaacggccugaccagcaucaagugggccgacaacaacugcuaccuggcgaccgcccuccugacccugcagcagaucgagcucaaguucaacccgcccgcccugcaggacgccuacuaccgcgcgcgggccggggaggccgccaacuucugcgcccugauccucgcguacugcaacaagacggugggcgagcugggcgacguccgcgagaccauguccuaccuguuccagcacgccaaccucgacagcugcaagcgggugcugaacgucgugugcaagaccugcgggcagcagcagaccacccugaagggcguggaggccgucauguacauggggacgcucuccuacgagcaguucaagaagggcgugcagauccccugcacgugcgggaagcaggccaccaaguaccuggugcagcaggagagccccuucgucaugauguccgcgcccccggcccaguacgagcugaagcacggcaccuucacgugcgccagcgaguacaccggcaacuaccagugcgggcacuacaagcacaucaccuccaaggagacccucuacugcaucgacggcgcccugcugaccaagagcagcgaguacaaggggcccaucaccgacguguucuacaaggagaacuccuacaccaccacgaucaagcccgugaccuacaagcucgacggcgucgugugcaccgagaucgaccccaagcuggacaacuacuacaagaaggacaacagcuacuucaccgagcagccgaucgaccuggugcccaaccagcccuaccccaacgccuccuucgacaacuucaaguucgucugcgacaacaucaaguucgccgacgaccucaaccagcugacgggguacaagaagccggcgagccgcgagcugaaggugaccuucuuccccgaccucaacggcgacguggucgccaucgacuacaagcacuacacccccuccuucaagaagggcgccaagcugcugcacaagcccaucguguggcacgugaacaacgccaccaacaaggcgacguacaagccgaacaccuggugcauccggugccucuggagcaccaagcccgucgagaccuccaacagcuucgacgugcugaaguccgaggacgcccaggggauggacaaccuggccugcgaggaccucaagcccgugagcgaggaggucguggagaaccccacgauccagaaggacgugcuggagugcaacgucaagaccaccgagguggugggcgacaucauccugaagccggccaacaacucccucaagaucaccgaggaggucgggcacacggaccugauggccgcguacguggacaacagcucccugaccaucaagaagcccaacgagcucagccgcgugcugggccugaagacccucgccacccacgggcuggccgccgucaacuccgugcccugggacacgaucgccaacuacgcgaagccguuccugaacaagguggucagcaccaccaccaacaucgugacgcgcugccucaaccgggugugcaccaacuacaugcccuacuucuucacccugcugcuccagcugugcaccuucacgcgcuccaccaacagccggaucaaggccuccaugcccaccaccaucgccaagaacaccgucaagagcgugggcaaguucugccuggaggccagcuucaacuaccucaagucccccaacuucagcaagcugaucaacaucaucaucugguuccugcuccuguccgugugccugggcagccucaucuacuccacggccgcgcuggggguccugaugagcaaccucggcaugccguccuacugcaccggguaccgcgagggcuaccugaacagcaccaacgugaccaucgccacguacugcaccggcuccauccccugcagcgugugccuguccgggcucgacagccuggacaccuaccccucccuggagaccauccagaucacgaucagcuccuucaagugggaccucaccgccuucggccuggucgccgagugguuccuggccuacauccucuucacccgguucuucuacgugcuggggcuggcggccaucaugcagcuguucuucagcuacuucgccgugcacuucaucuccaacagcuggcucauguggcugaucaucaaccugguccagauggcccccaucuccgcgauggugcgcauguacaucuucuucgccagcuucuacuacguguggaaguccuacguccacgugguggacggcugcaacagcagcacgugcaugaugugcuacaagcggaaccgcgccacgcgggucgagugcaccaccaucgugaacgggguccgccgguccuucuacguguacgccaacggcggcaagggguucugcaagcuccacaacuggaacugcgugaacugcgacaccuucugcgccggcagcacguucaucuccgacgaggucgcgcgcgaccugagccugcaguucaagcggccgaucaaccccaccgaccaguccagcuacaucguggacuccgugaccgucaagaacgggagcauccaccucuacuucgacaaggccggccagaagaccuacgagcgccacucccugagccacuucgugaaccuggacaaccuccgggccaacaacacgaaggggucccugcccaucaacgugaucgucuucgacggcaagagcaagugcgaggaguccagcgccaaguccgccagcguguacuacucccagcugaugugccagcccauccuccugcuggaccaggcgcucgugagcgacgucggcgacagcgccgagguggccgugaagauguucgacgccuacgucaacaccuucuccagcaccuucaacgugccgauggagaagcugaagacccugguggccacggcggaggccgagcucgccaagaacgucucccuggacaacgugcugagcaccuucaucuccgccgcgcgccagggguucguggacagcgacgucgagaccaaggacgugguggagugccucaagcugucccaccagagcgacaucgaggucaccggcgacuccugcaacaacuacaugcugacguacaacaagguggagaacaugacgccccgggaccucggggccugcaucgacugcagcgcccgccacaucaacgcccagguggccaagucccacaacaucgcgcugaucuggaacgucaaggacuucaugagccuguccgagcagcuccggaagcagauccgcagcgccgccaagaagaacaaccugcccuucaagcugaccugcgccaccacccgccagguggugaacgucgugaccaccaagaucgcccucaagggcgggugaggacuagucccuguucccagagcccacuuuuuuuucuuuuuuugaaauaaaauagccugucuuucagaucuaaaaaaaaaaaaaaaaaaaaaaaaaaaaaaaaaaaaaaaaaaaaaaaaaaaaaaaaaaaaaaaaaaaaaaaaaaaaaaaaaaaaaaaaaaaaaaaaaaaa

SEQ ID NO: 28329 - RNA, 6089 nt, Artificial Sequence
  SARS-CoV-2/Wuhan-Hu-1__NC_045512.2/MN908947.2__non-structural protein 3 (NSP3) mRNA gc (1-1946)(A42V_T429I_D822N_P1470S)
aggagagucccgcagucggcguccagcggcucugcuuguucgugugugugucguugcaggccuuauucaagcuuaccauggcccccaccaaggugaccuucggcgacgacaccgucaucgaggugcagggguacaagagcgugaacaucaccuucgagcuggacgagcgcaucgacaagguccucaacgagaagugcuccguguacaccguggagcugggcaccgaggugaacgaguucgcgugcgucguggccgacgccgugaucaagacgcugcagccggucagcgagcuccugacgccccuggggaucgaccucgacgagugguccauggccaccuacuaccuguucgacgagagcggcgaguucaagcuggccucccacauguacugcagcuucuacccgcccgacgaggacgaggaggagggggacugcgaggaggaggaguucgagcccuccacccaguacgaguacggcacggaggacgacuaccagggcaagccccucgaguucggggcgaccagcgccgcccugcagcccgaggaggagcaggaggaggacuggcuggacgacgacucccagcagaccgugggccagcaggacgggagcgaggacaaccagaccacgaccauccagaccaucguggagguccagccccagcucgagauggagcugaccccgguggugcagacgaucgaggucaacuccuucagcggcuaccugaagcucaccgacaacguguacaucaagaacgccgacaucguggaggaggcgaagaaggucaagcccaccgugguggucaacgccgccaacguguaccugaagcacgggggcggcguggccggggcccugaacaaggcgaccaacaacgccaugcaggucgaguccgacgacuacaucgccacgaacggcccccucaaggucgggggcagcugcgugcuguccggccacaaccuggccaagcacugccuccacgugguggggcccaacgucaacaagggcgaggacauccagcugcucaagagcgccuacgagaacuucaaccagcacgaggugcugcuggcgccgcugcucuccgccgggaucuucggcgccgaccccauccacagccugcgggugugcgucgacaccgugcgcaccaacguguaccuggccgucuucgacaagaaccucuacgacaagcugguguccagcuuccuggagaugaaguccgagaagcaggucgagcagaagaucgccgagauccccaaggaggaggugaagcccuucaucaccgagagcaagccgagcguggagcagcggaagcaggacgacaagaagaucaaggcgugcguggaggaggucacgaccacccucgaggagaucaaguuccugacggagaaccugcuccuguacaucgacaucaacgggaaccugcaccccgacuccgccacccucgugagcgacaucgacaucaccuuccugaagaaggacgcccccuacaucgugggcgacgucgugcaggagggcgugcugaccgccgucgugauccccacgaagaaggccgggggcaccaccgagaugcucgcgaaggcccugcgcaaggugccgaccgacaacuacaucacgaccuaccccgggcagggccugaacggguacaccgucgaggaggccaagaccgugcucaagaagugcaaguccgccuucuacauccugcccagcaucaucuccaacgagaagcaggagauccugggcaccgugagcuggaaccugcgggagaugcucgcgcacgccgaggagacgcgcaagcugaugcccgucugcguggagaccaaggccaucguguccaccauccagcggaaguacaagggcaucaagauccaggagggggucguggacuacggcgcccgcuucuacuucuacaccagcaagacgaccguggccucccugaucaacacccucaacgaccugaacgagacccuggucacgaugccgcucggguacgugacccacggccugaaccuggaggaggcggcccgguacaugcgcagccucaaggugcccgccaccgucuccgugagcucccccgacgccgugaccgccuacaacggguaccugacgagcuccagcaagacccccgaggagcacuucaucgagaccaucucccuggcgggcagcuacaaggacuggagcuacuccggccagagcacccagcucgggaucgaguuccugaagcggggcgacaaguccgucuacuacacgagcaacccgaccaccuuccaccuggacggggaggugaucaccuucgacaaccucaagacgcugcugucccuccgcgaggugcggaccaucaaggucuucaccaccguggacaacaucaaccugcacacccagguggucgacaugagcaugaccuacggccagcaguucggccccaccuaccuggacggggccgacgugaccaagaucaagccccacaacucccacgagggcaagacguucuacgugcucccgaacgacgacacccugcgcgucgaggccuucgaguacuaccacaccaccaaccccagcuuccuggggcgguacauguccgcccucaaccacacgaagaaguggaaguacccccaggugaacggccugaccagcaucaagugggccgacaacaacugcuaccuggcgaccgcccuccugacccugcagcagaucgagcucaaguucaacccgcccgcccugcaggacgccuacuaccgcgcgcgggccggggaggccgccaacuucugcgcccugauccucgcguacugcaacaagacggugggcgagcugggcgacguccgcgagaccauguccuaccuguuccagcacgccaaccucgacagcugcaagcgggugcugaacgucgugugcaagaccugcgggcagcagcagaccacccugaagggcguggaggccgucauguacauggggacgcucuccuacgagcaguucaagaagggcgugcagauccccugcacgugcgggaagcaggccaccaaguaccuggugcagcaggagagccccuucgucaugauguccgcgcccccggcccaguacgagcugaagcacggcaccuucacgugcgccagcgaguacaccggcaacuaccagugcgggcacuacaagcacaucaccuccaaggagacccucuacugcaucgacggcgcccugcugaccaagagcagcgaguacaaggggcccaucaccgacguguucuacaaggagaacuccuacaccaccacgaucaagcccgugaccuacaagcucgacggcgucgugugcaccgagaucgaccccaagcuggacaacuacuacaagaaggacaacagcuacuucaccgagcagccgaucgaccuggugcccaaccagcccuaccccaacgccuccuucgacaacuucaaguucgucugcgacaacaucaaguucgccgacgaccucaaccagcugacgggguacaagaagccggcgagccgcgagcugaaggugaccuucuuccccgaccucaacggcgacguggucgccaucgacuacaagcacuacacccccuccuucaagaagggcgccaagcugcugcacaagcccaucguguggcacgugaacaacgccaccaacaaggcgacguacaagccgaacaccuggugcauccggugccucuggagcaccaagcccgucgagaccuccaacagcuucgacgugcugaaguccgaggacgcccaggggauggacaaccuggccugcgaggaccucaagcccgugagcgaggaggucguggagaaccccacgauccagaaggacgugcuggagugcaacgucaagaccaccgagguggugggcgacaucauccugaagccggccaacaacucccucaagaucaccgaggaggucgggcacacggaccugauggccgcguacguggacaacagcucccugaccaucaagaagcccaacgagcucagccgcgugcugggccugaagacccucgccacccacgggcuggccgccgucaacuccgugcccugggacacgaucgccaacuacgcgaagccguuccugaacaagguggucagcaccaccaccaacaucgugacgcgcugccucaaccgggugugcaccaacuacaugcccuacuucuucacccugcugcuccagcugugcaccuucacgcgcuccaccaacagccggaucaaggccuccaugcccaccaccaucgccaagaacaccgucaagagcgugggcaaguucugccuggaggccagcuucaacuaccucaagucccccaacuucagcaagcugaucaacaucaucaucugguuccugcuccuguccgugugccugggcagccucaucuacuccacggccgcgcuggggguccugaugagcaaccucggcaugccguccuacugcaccggguaccgcgagggcuaccugaacagcaccaacgugaccaucgccacguacugcaccggcuccaucagcugcagcgugugccuguccgggcucgacagccuggacaccuaccccucccuggagaccauccagaucacgaucagcuccuucaagugggaccucaccgccuucggccuggucgccgagugguuccuggccuacauccucuucacccgguucuucuacgugcuggggcuggcggccaucaugcagcuguucuucagcuacuucgccgugcacuucaucuccaacagcuggcucauguggcugaucaucaaccugguccagauggcccccaucuccgcgauggugcgcauguacaucuucuucgccagcuucuacuacguguggaaguccuacguccacgugguggacggcugcaacagcagcacgugcaugaugugcuacaagcggaaccgcgccacgcgggucgagugcaccaccaucgugaacgggguccgccgguccuucuacguguacgccaacggcggcaagggguucugcaagcuccacaacuggaacugcgugaacugcgacaccuucugcgccggcagcacguucaucuccgacgaggucgcgcgcgaccugagccugcaguucaagcggccgaucaaccccaccgaccaguccagcuacaucguggacuccgugaccgucaagaacgggagcauccaccucuacuucgacaaggccggccagaagaccuacgagcgccacucccugagccacuucgugaaccuggacaaccuccgggccaacaacacgaaggggucccugcccaucaacgugaucgucuucgacggcaagagcaagugcgaggaguccagcgccaaguccgccagcguguacuacucccagcugaugugccagcccauccuccugcuggaccaggcgcucgugagcgacgucggcgacagcgccgagguggccgugaagauguucgacgccuacgucaacaccuucuccagcaccuucaacgugccgauggagaagcugaagacccugguggccacggcggaggccgagcucgccaagaacgucucccuggacaacgugcugagcaccuucaucuccgccgcgcgccagggguucguggacagcgacgucgagaccaaggacgugguggagugccucaagcugucccaccagagcgacaucgaggucaccggcgacuccugcaacaacuacaugcugacguacaacaagguggagaacaugacgccccgggaccucggggccugcaucgacugcagcgcccgccacaucaacgcccagguggccaagucccacaacaucgcgcugaucuggaacgucaaggacuucaugagccuguccgagcagcuccggaagcagauccgcagcgccgccaagaagaacaaccugcccuucaagcugaccugcgccaccacccgccagguggugaacgucgugaccaccaagaucgcccucaagggcgggugaggacuagucccuguucccagagcccacuuuuuuuucuuuuuuugaaauaaaauagccugucuuucagaucuaaaaaaaaaaaaaaaaaaaaaaaaaaaaaaaaaaaaaaaaaaaaaaaaaaaaaaaaaaaaaaaaaaaaaaaaaaaaaaaaaaaaaaaaaaaaaaaaaaaa

SEQ ID NO: 28330 - RNA, 6089 nt, Artificial Sequence
  SARS-CoV-2/Wuhan-Hu-1__NC_045512.2/MN908947.2__non-structural protein 3 (NSP3) mRNA gc (1-1946)(T238A_T721I_N1330D)
aggagagucccgcagucggcguccagcggcucugcuuguucgugugugugucguugcaggccuuauucaagcuuaccauggcccccaccaaggugaccuucggcgacgacaccgucaucgaggugcagggguacaagagcgugaacaucaccuucgagcuggacgagcgcaucgacaagguccucaacgagaagugcuccgccuacaccguggagcugggcaccgaggugaacgaguucgcgugcgucguggccgacgccgugaucaagacgcugcagccggucagcgagcuccugacgccccuggggaucgaccucgacgagugguccauggccaccuacuaccuguucgacgagagcggcgaguucaagcuggccucccacauguacugcagcuucuacccgcccgacgaggacgaggaggagggggacugcgaggaggaggaguucgagcccuccacccaguacgaguacggcacggaggacgacuaccagggcaagccccucgaguucggggcgaccagcgccgcccugcagcccgaggaggagcaggaggaggacuggcuggacgacgacucccagcagaccgugggccagcaggacgggagcgaggacaaccagaccacgaccauccagaccaucguggagguccagccccagcucgagauggagcugaccccgguggugcagacgaucgaggucaacuccuucagcggcuaccugaagcucaccgacaacguguacaucaagaacgccgacaucguggaggaggcgaagaaggucaagcccgccgugguggucaacgccgccaacguguaccugaagcacgggggcggcguggccggggcccugaacaaggcgaccaacaacgccaugcaggucgaguccgacgacuacaucgccacgaacggcccccucaaggucgggggcagcugcgugcuguccggccacaaccuggccaagcacugccuccacgugguggggcccaacgucaacaagggcgaggacauccagcugcucaagagcgccuacgagaacuucaaccagcacgaggugcugcuggcgccgcugcucuccgccgggaucuucggcgccgaccccauccacagccugcgggugugcgucgacaccgugcgcaccaacguguaccuggccgucuucgacaagaaccucuacgacaagcugguguccagcuuccuggagaugaaguccgagaagcaggucgagcagaagaucgccgagauccccaaggaggaggugaagcccuucaucaccgagagcaagccgagcguggagcagcggaagcaggacgacaagaagaucaaggcgugcguggaggaggucacgaccacccucgaggagaccaaguuccugacggagaaccugcuccuguacaucgacaucaacgggaaccugcaccccgacuccgccacccucgugagcgacaucgacaucaccuuccugaagaaggacgcccccuacaucgugggcgacgucgugcaggagggcgugcugaccgccgucgugauccccacgaagaaggccgggggcaccaccgagaugcucgcgaaggcccugcgcaaggugccgaccgacaacuacaucacgaccuaccccgggcagggccugaacggguacaccgucgaggaggccaagaccgugcucaagaagugcaaguccgccuucuacauccugcccagcaucaucuccaacgagaagcaggagauccugggcaccgugagcuggaaccugcgggagaugcucgcgcacgccgaggagacgcgcaagcugaugcccgucugcguggagaccaaggccaucguguccaccauccagcggaaguacaagggcaucaagauccaggagggggucguggacuacggcgcccgcuucuacuucuacaccagcaagacgaccguggccucccugaucaacacccucaacgaccugaacgagacccuggucacgaugccgcucggguacgugacccacggccugaaccuggaggaggcggcccgguacaugcgcagccucaaggugcccgccaccgucuccgugagcucccccgacgccgugaccgccuacaacggguaccugacgagcuccagcaagacccccgaggagcacuucaucgagaccaucucccuggcgggcagcuacaaggacuggagcuacuccggccagagcacccagcucgggaucgaguuccugaagcggggcgacaaguccgucuacuacaucagcaacccgaccaccuuccaccuggacggggaggugaucaccuucgacaaccucaagacgcugcugucccuccgcgaggugcggaccaucaaggucuucaccaccguggacaacaucaaccugcacacccagguggucgacaugagcaugaccuacggccagcaguucggccccaccuaccuggacggggccgacgugaccaagaucaagccccacaacucccacgagggcaagacguucuacgugcucccgaacgacgacacccugcgcgucgaggccuucgaguacuaccacaccaccgaccccagcuuccuggggcgguacauguccgcccucaaccacacgaagaaguggaaguacccccaggugaacggccugaccagcaucaagugggccgacaacaacugcuaccuggcgaccgcccuccugacccugcagcagaucgagcucaaguucaacccgcccgcccugcaggacgccuacuaccgcgcgcgggccggggaggccgccaacuucugcgcccugauccucgcguacugcaacaagacggugggcgagcugggcgacguccgcgagaccauguccuaccuguuccagcacgccaaccucgacagcugcaagcgggugcugaacgucgugugcaagaccugcgggcagcagcagaccacccugaagggcguggaggccgucauguacauggggacgcucuccuacgagcaguucaagaagggcgugcagauccccugcacgugcgggaagcaggccaccaaguaccuggugcagcaggagagccccuucgucaugauguccgcgcccccggcccaguacgagcugaagcacggcaccuucacgugcgccagcgaguacaccggcaacuaccagugcgggcacuacaagcacaucaccuccaaggagacccucuacugcaucgacggcgcccugcugaccaagagcagcgaguacaaggggcccaucaccgacguguucuacaaggagaacuccuacaccaccacgaucaagcccgugaccuacaagcucgacggcgucgugugcaccgagaucgaccccaagcuggacaacuacuacaagaaggacaacagcuacuucaccgagcagccgaucgaccuggugcccaaccagcccuaccccaacgccuccuucgacaacuucaaguucgucugcgacaacaucaaguucgccgacgaccucaaccagcugacgggguacaagaagccggcgagccgcgagcugaaggugaccuucuuccccgaccucaacggcgacguggucgccaucgacuacaagcacuacacccccuccuucaagaagggcgccaagcugcugcacaagcccaucguguggcacgugaacaacgccaccaacaaggcgacguacaagccgaacaccuggugcauccggugccucuggagcaccaagcccgucgagaccuccaacagcuucgacgugcugaaguccgaggacgcccaggggauggacaaccuggccugcgaggaccucaagcccgugagcgaggaggucguggagaaccccacgauccagaaggacgugcuggagugcaacgucaagaccaccgagguggugggcgacaucauccugaagccggccaacaacucccucaagaucaccgaggaggucgggcacacggaccugauggccgcguacguggacaacagcucccugaccaucaagaagcccaacgagcucagccgcgugcugggccugaagacccucgccacccacgggcuggccgccgucaacuccgugcccugggacacgaucgccaacuacgcgaagccguuccuggacaagguggucagcaccaccaccaacaucgugacgcgcugccucaaccgggugugcaccaacuacaugcccuacuucuucacccugcugcuccagcugugcaccuucacgcgcuccaccaacagccggaucaaggccuccaugcccaccaccaucgccaagaacaccgucaagagcgugggcaaguucugccuggaggccagcuucaacuaccucaagucccccaacuucagcaagcugaucaacaucaucaucugguuccugcuccuguccgugugccugggcagccucaucuacuccacggccgcgcuggggguccugaugagcaaccucggcaugccguccuacugcaccggguaccgcgagggcuaccugaacagcaccaacgugaccaucgccacguacugcaccggcuccauccccugcagcgugugccuguccgggcucgacagccuggacaccuaccccucccuggagaccauccagaucacgaucagcuccuucaagugggaccucaccgccuucggccuggucgccgagugguuccuggccuacauccucuucacccgguucuucuacgugcuggggcuggcggccaucaugcagcuguucuucagcuacuucgccgugcacuucaucuccaacagcuggcucauguggcugaucaucaaccugguccagauggcccccaucuccgcgauggugcgcauguacaucuucuucgccagcuucuacuacguguggaaguccuacguccacgugguggacggcugcaacagcagcacgugcaugaugugcuacaagcggaaccgcgccacgcgggucgagugcaccaccaucgugaacgggguccgccgguccuucuacguguacgccaacggcggcaagggguucugcaagcuccacaacuggaacugcgugaacugcgacaccuucugcgccggcagcacguucaucuccgacgaggucgcgcgcgaccugagccugcaguucaagcggccgaucaaccccaccgaccaguccagcuacaucguggacuccgugaccgucaagaacgggagcauccaccucuacuucgacaaggccggccagaagaccuacgagcgccacucccugagccacuucgugaaccuggacaaccuccgggccaacaacacgaaggggucccugcccaucaacgugaucgucuucgacggcaagagcaagugcgaggaguccagcgccaaguccgccagcguguacuacucccagcugaugugccagcccauccuccugcuggaccaggcgcucgugagcgacgucggcgacagcgccgagguggccgugaagauguucgacgccuacgucaacaccuucuccagcaccuucaacgugccgauggagaagcugaagacccugguggccacggcggaggccgagcucgccaagaacgucucccuggacaacgugcugagcaccuucaucuccgccgcgcgccagggguucguggacagcgacgucgagaccaaggacgugguggagugccucaagcugucccaccagagcgacaucgaggucaccggcgacuccugcaacaacuacaugcugacguacaacaagguggagaacaugacgccccgggaccucggggccugcaucgacugcagcgcccgccacaucaacgcccagguggccaagucccacaacaucgcgcugaucuggaacgucaaggacuucaugagccuguccgagcagcuccggaagcagauccgcagcgccgccaagaagaacaaccugcccuucaagcugaccugcgccaccacccgccagguggugaacgucgugaccaccaagaucgcccucaagggcgggugaggacuagucccuguucccagagcccacuuuuuuuucuuuuuuugaaauaaaauagccugucuuucagaucuaaaaaaaaaaaaaaaaaaaaaaaaaaaaaaaaaaaaaaaaaaaaaaaaaaaaaaaaaaaaaaaaaaaaaaaaaaaaaaaaaaaaaaaaaaaaaaaaaaaa

SEQ ID NO: 28331 - RNA, 6089 nt, Artificial Sequence
  SARS-CoV-2/Wuhan-Hu-1__NC_045512.2/MN908947.2__non-structural protein 3 (NSP3) mRNA gc (1-1946)(H343Y_P823L_K928I_N1588S)
aggagagucccgcagucggcguccagcggcucugcuuguucgugugugugucguugcaggccuuauucaagcuuaccauggcccccaccaaggugaccuucggcgacgacaccgucaucgaggugcagggguacaagagcgugaacaucaccuucgagcuggacgagcgcaucgacaagguccucaacgagaagugcuccgccuacaccguggagcugggcaccgaggugaacgaguucgcgugcgucguggccgacgccgugaucaagacgcugcagccggucagcgagcuccugacgccccuggggaucgaccucgacgagugguccauggccaccuacuaccuguucgacgagagcggcgaguucaagcuggccucccacauguacugcagcuucuacccgcccgacgaggacgaggaggagggggacugcgaggaggaggaguucgagcccuccacccaguacgaguacggcacggaggacgacuaccagggcaagccccucgaguucggggcgaccagcgccgcccugcagcccgaggaggagcaggaggaggacuggcuggacgacgacucccagcagaccgugggccagcaggacgggagcgaggacaaccagaccacgaccauccagaccaucguggagguccagccccagcucgagauggagcugaccccgguggugcagacgaucgaggucaacuccuucagcggcuaccugaagcucaccgacaacguguacaucaagaacgccgacaucguggaggaggcgaagaaggucaagcccaccgugguggucaacgccgccaacguguaccugaagcacgggggcggcguggccggggcccugaacaaggcgaccaacaacgccaugcaggucgaguccgacgacuacaucgccacgaacggcccccucaaggucgggggcagcugcgugcuguccggccacaaccuggccaagcacugccuccacgugguggggcccaacgucaacaagggcgaggacauccagcugcucaagagcgccuacgagaacuucaaccagcacgaggugcugcuggcgccgcugcucuccgccgggaucuucggcgccgaccccaucuacagccugcgggugugcgucgacaccgugcgcaccaacguguaccuggccgucuucgacaagaaccucuacgacaagcugguguccagcuuccuggagaugaaguccgagaagcaggucgagcagaagaucgccgagauccccaaggaggaggugaagcccuucaucaccgagagcaagccgagcguggagcagcggaagcaggacgacaagaagaucaaggcgugcguggaggaggucacgaccacccucgaggagaccaaguuccugacggagaaccugcuccuguacaucgacaucaacgggaaccugcaccccgacuccgccacccucgugagcgacaucgacaucaccuuccugaagaaggacgcccccuacaucgugggcgacgucgugcaggagggcgugcugaccgccgucgugauccccacgaagaaggccgggggcaccaccgagaugcucgcgaaggcccugcgcaaggugccgaccgacaacuacaucacgaccuaccccgggcagggccugaacggguacaccgucgaggaggccaagaccgugcucaagaagugcaaguccgccuucuacauccugcccagcaucaucuccaacgagaagcaggagauccugggcaccgugagcuggaaccugcgggagaugcucgcgcacgccgaggagacgcgcaagcugaugcccgucugcguggagaccaaggccaucguguccaccauccagcggaaguacaagggcaucaagauccaggagggggucguggacuacggcgcccgcuucuacuucuacaccagcaagacgaccguggccucccugaucaacacccucaacgaccugaacgagacccuggucacgaugccgcucggguacgugacccacggccugaaccuggaggaggcggcccgguacaugcgcagccucaaggugcccgccaccgucuccgugagcucccccgacgccgugaccgccuacaacggguaccugacgagcuccagcaagacccccgaggagcacuucaucgagaccaucucccuggcgggcagcuacaaggacuggagcuacuccggccagagcacccagcucgggaucgaguuccugaagcggggcgacaaguccgucuacuacacgagcaacccgaccaccuuccaccuggacggggaggugaucaccuucgacaaccucaagacgcugcugucccuccgcgaggugcggaccaucaaggucuucaccaccguggacaacaucaaccugcacacccagguggucgacaugagcaugaccuacggccagcaguucggccccaccuaccuggacggggccgacgugaccaagaucaagccccacaacucccacgagggcaagacguucuacgugcucccgaacgacgacacccugcgcgucgaggccuucgaguacuaccacaccaccgaccugagcuuccuggggcgguacauguccgcccucaaccacacgaagaaguggaaguacccccaggugaacggccugaccagcaucaagugggccgacaacaacugcuaccuggcgaccgcccuccugacccugcagcagaucgagcucaaguucaacccgcccgcccugcaggacgccuacuaccgcgcgcgggccggggaggccgccaacuucugcgcccugauccucgcguacugcaacaagacggugggcgagcugggcgacguccgcgagaccauguccuaccuguuccagcacgccaaccucgacagcugcauccgggugcugaacgucgugugcaagaccugcgggcagcagcagaccacccugaagggcguggaggccgucauguacauggggacgcucuccuacgagcaguucaagaagggcgugcagauccccugcacgugcgggaagcaggccaccaaguaccuggugcagcaggagagccccuucgucaugauguccgcgcccccggcccaguacgagcugaagcacggcaccuucacgugcgccagcgaguacaccggcaacuaccagugcgggcacuacaagcacaucaccuccaaggagacccucuacugcaucgacggcgcccugcugaccaagagcagcgaguacaaggggcccaucaccgacguguucuacaaggagaacuccuacaccaccacgaucaagcccgugaccuacaagcucgacggcgucgugugcaccgagaucgaccccaagcuggacaacuacuacaagaaggacaacagcuacuucaccgagcagccgaucgaccuggugcccaaccagcccuaccccaacgccuccuucgacaacuucaaguucgucugcgacaacaucaaguucgccgacgaccucaaccagcugacgggguacaagaagccggcgagccgcgagcugaaggugaccuucuuccccgaccucaacggcgacguggucgccaucgacuacaagcacuacacccccuccuucaagaagggcgccaagcugcugcacaagcccaucguguggcacgugaacaacgccaccaacaaggcgacguacaagccgaacaccuggugcauccggugccucuggagcaccaagcccgucgagaccuccaacagcuucgacgugcugaaguccgaggacgcccaggggauggacaaccuggccugcgaggaccucaagcccgugagcgaggaggucguggagaaccccacgauccagaaggacgugcuggagugcaacgucaagaccaccgagguggugggcgacaucauccugaagccggccaacaacucccucaagaucaccgaggaggucgggcacacggaccugauggccgcguacguggacaacagcucccugaccaucaagaagcccaacgagcucagccgcgugcugggccugaagacccucgccacccacgggcuggccgccgucaacuccgugcccugggacacgaucgccaacuacgcgaagccguuccugaacaagguggucagcaccaccaccaacaucgugacgcgcugccucaaccgggugugcaccaacuacaugcccuacuucuucacccugcugcuccagcugugcaccuucacgcgcuccaccaacagccggaucaaggccuccaugcccaccaccaucgccaagaacaccgucaagagcgugggcaaguucugccuggaggccagcuucaacuaccucaagucccccaacuucagcaagcugaucaacaucaucaucugguuccugcuccuguccgugugccugggcagccucaucuacuccacggccgcgcuggggguccugaugagcaaccucggcaugccguccuacugcaccggguaccgcgagggcuaccugaacagcaccaacgugaccaucgccacguacugcaccggcuccauccccugcagcgugugccuguccgggcucgacagccuggacaccuaccccucccuggagaccauccagaucacgaucagcuccuucaagugggaccucaccgccuucggccuggucgccgagugguuccuggccuacauccucuucacccgguucuucuacgugcuggggcuggcggccaucaugcagcuguucuucagcuacuucgccgugcacuucaucuccaacagcuggcucauguggcugaucaucaaccugguccagauggcccccaucuccgcgauggugcgcauguacaucuucuucgccagcuucuacuacguguggaaguccuacguccacgugguggacggcugcagcagcagcacgugcaugaugugcuacaagcggaaccgcgccacgcgggucgagugcaccaccaucgugaacgggguccgccgguccuucuacguguacgccaacggcggcaagggguucugcaagcuccacaacuggaacugcgugaacugcgacaccuucugcgccggcagcacguucaucuccgacgaggucgcgcgcgaccugagccugcaguucaagcggccgaucaaccccaccgaccaguccagcuacaucguggacuccgugaccgucaagaacgggagcauccaccucuacuucgacaaggccggccagaagaccuacgagcgccacucccugagccacuucgugaaccuggacaaccuccgggccaacaacacgaaggggucccugcccaucaacgugaucgucuucgacggcaagagcaagugcgaggaguccagcgccaaguccgccagcguguacuacucccagcugaugugccagcccauccuccugcuggaccaggcgcucgugagcgacgucggcgacagcgccgagguggccgugaagauguucgacgccuacgucaacaccuucuccagcaccuucaacgugccgauggagaagcugaagacccugguggccacggcggaggccgagcucgccaagaacgucucccuggacaacgugcugagcaccuucaucuccgccgcgcgccagggguucguggacagcgacgucgagaccaaggacgugguggagugccucaagcugucccaccagagcgacaucgaggucaccggcgacuccugcaacaacuacaugcugacguacaacaagguggagaacaugacgccccgggaccucggggccugcaucgacugcagcgcccgccacaucaacgcccagguggccaagucccacaacaucgcgcugaucuggaacgucaaggacuucaugagccuguccgagcagcuccggaagcagauccgcagcgccgccaagaagaacaaccugcccuucaagcugaccugcgccaccacccgccagguggugaacgucgugaccaccaagaucgcccucaagggcgggugaggacuagucccuguucccagagcccacuuuuuuuucuuuuuuugaaauaaaauagccugucuuucagaucuaaaaaaaaaaaaaaaaaaaaaaaaaaaaaaaaaaaaaaaaaaaaaaaaaaaaaaaaaaaaaaaaaaaaaaaaaaaaaaaaaaaaaaaaaaaaaaaaaaaa

SEQ ID NO: 28332 - RNA, 6089 nt, Artificial Sequence
  SARS-CoV-2/Wuhan-Hu-1__NC_045512.2/MN908947.2__non-structural protein 3 (NSP3) mRNA gc (1-1946)(E379V_K1694N)
aggagagucccgcagucggcguccagcggcucugcuuguucgugugugugucguugcaggccuuauucaagcuuaccauggcccccaccaaggugaccuucggcgacgacaccgucaucgaggugcagggguacaagagcgugaacaucaccuucgagcuggacgagcgcaucgacaagguccucaacgagaagugcuccgccuacaccguggagcugggcaccgaggugaacgaguucgcgugcgucguggccgacgccgugaucaagacgcugcagccggucagcgagcuccugacgccccuggggaucgaccucgacgagugguccauggccaccuacuaccuguucgacgagagcggcgaguucaagcuggccucccacauguacugcagcuucuacccgcccgacgaggacgaggaggagggggacugcgaggaggaggaguucgagcccuccacccaguacgaguacggcacggaggacgacuaccagggcaagccccucgaguucggggcgaccagcgccgcccugcagcccgaggaggagcaggaggaggacuggcuggacgacgacucccagcagaccgugggccagcaggacgggagcgaggacaaccagaccacgaccauccagaccaucguggagguccagccccagcucgagauggagcugaccccgguggugcagacgaucgaggucaacuccuucagcggcuaccugaagcucaccgacaacguguacaucaagaacgccgacaucguggaggaggcgaagaaggucaagcccaccgugguggucaacgccgccaacguguaccugaagcacgggggcggcguggccggggcccugaacaaggcgaccaacaacgccaugcaggucgaguccgacgacuacaucgccacgaacggcccccucaaggucgggggcagcugcgugcuguccggccacaaccuggccaagcacugccuccacgugguggggcccaacgucaacaagggcgaggacauccagcugcucaagagcgccuacgagaacuucaaccagcacgaggugcugcuggcgccgcugcucuccgccgggaucuucggcgccgaccccauccacagccugcgggugugcgucgacaccgugcgcaccaacguguaccuggccgucuucgacaagaaccucuacgacaagcugguguccagcuuccuggagaugaaguccgugaagcaggucgagcagaagaucgccgagauccccaaggaggaggugaagcccuucaucaccgagagcaagccgagcguggagcagcggaagcaggacgacaagaagaucaaggcgugcguggaggaggucacgaccacccucgaggagaccaaguuccugacggagaaccugcuccuguacaucgacaucaacgggaaccugcaccccgacuccgccacccucgugagcgacaucgacaucaccuuccugaagaaggacgcccccuacaucgugggcgacgucgugcaggagggcgugcugaccgccgucgugauccccacgaagaaggccgggggcaccaccgagaugcucgcgaaggcccugcgcaaggugccgaccgacaacuacaucacgaccuaccccgggcagggccugaacggguacaccgucgaggaggccaagaccgugcucaagaagugcaaguccgccuucuacauccugcccagcaucaucuccaacgagaagcaggagauccugggcaccgugagcuggaaccugcgggagaugcucgcgcacgccgaggagacgcgcaagcugaugcccgucugcguggagaccaaggccaucguguccaccauccagcggaaguacaagggcaucaagauccaggagggggucguggacuacggcgcccgcuucuacuucuacaccagcaagacgaccguggccucccugaucaacacccucaacgaccugaacgagacccuggucacgaugccgcucggguacgugacccacggccugaaccuggaggaggcggcccgguacaugcgcagccucaaggugcccgccaccgucuccgugagcucccccgacgccgugaccgccuacaacggguaccugacgagcuccagcaagacccccgaggagcacuucaucgagaccaucucccuggcgggcagcuacaaggacuggagcuacuccggccagagcacccagcucgggaucgaguuccugaagcggggcgacaaguccgucuacuacacgagcaacccgaccaccuuccaccuggacggggaggugaucaccuucgacaaccucaagacgcugcugucccuccgcgaggugcggaccaucaaggucuucaccaccguggacaacaucaaccugcacacccagguggucgacaugagcaugaccuacggccagcaguucggccccaccuaccuggacggggccgacgugaccaagaucaagccccacaacucccacgagggcaagacguucuacgugcucccgaacgacgacacccugcgcgucgaggccuucgaguacuaccacaccaccgaccccagcuuccuggggcgguacauguccgcccucaaccacacgaagaaguggaaguacccccaggugaacggccugaccagcaucaagugggccgacaacaacugcuaccuggcgaccgcccuccugacccugcagcagaucgagcucaaguucaacccgcccgcccugcaggacgccuacuaccgcgcgcgggccggggaggccgccaacuucugcgcccugauccucgcguacugcaacaagacggugggcgagcugggcgacguccgcgagaccauguccuaccuguuccagcacgccaaccucgacagcugcaagcgggugcugaacgucgugugcaagaccugcgggcagcagcagaccacccugaagggcguggaggccgucauguacauggggacgcucuccuacgagcaguucaagaagggcgugcagauccccugcacgugcgggaagcaggccaccaaguaccuggugcagcaggagagccccuucgucaugauguccgcgcccccggcccaguacgagcugaagcacggcaccuucacgugcgccagcgaguacaccggcaacuaccagugcgggcacuacaagcacaucaccuccaaggagacccucuacugcaucgacggcgcccugcugaccaagagcagcgaguacaaggggcccaucaccgacguguucuacaaggagaacuccuacaccaccacgaucaagcccgugaccuacaagcucgacggcgucgugugcaccgagaucgaccccaagcuggacaacuacuacaagaaggacaacagcuacuucaccgagcagccgaucgaccuggugcccaaccagcccuaccccaacgccuccuucgacaacuucaaguucgucugcgacaacaucaaguucgccgacgaccucaaccagcugacgggguacaagaagccggcgagccgcgagcugaaggugaccuucuuccccgaccucaacggcgacguggucgccaucgacuacaagcacuacacccccuccuucaagaagggcgccaagcugcugcacaagcccaucguguggcacgugaacaacgccaccaacaaggcgacguacaagccgaacaccuggugcauccggugccucuggagcaccaagcccgucgagaccuccaacagcuucgacgugcugaaguccgaggacgcccaggggauggacaaccuggccugcgaggaccucaagcccgugagcgaggaggucguggagaaccccacgauccagaaggacgugcuggagugcaacgucaagaccaccgagguggugggcgacaucauccugaagccggccaacaacucccucaagaucaccgaggaggucgggcacacggaccugauggccgcguacguggacaacagcucccugaccaucaagaagcccaacgagcucagccgcgugcugggccugaagacccucgccacccacgggcuggccgccgucaacuccgugcccugggacacgaucgccaacuacgcgaagccguuccugaacaagguggucagcaccaccaccaacaucgugacgcgcugccucaaccgggugugcaccaacuacaugcccuacuucuucacccugcugcuccagcugugcaccuucacgcgcuccaccaacagccggaucaaggccuccaugcccaccaccaucgccaagaacaccgucaagagcgugggcaaguucugccuggaggccagcuucaacuaccucaagucccccaacuucagcaagcugaucaacaucaucaucugguuccugcuccuguccgugugccugggcagccucaucuacuccacggccgcgcuggggguccugaugagcaaccucggcaugccguccuacugcaccggguaccgcgagggcuaccugaacagcaccaacgugaccaucgccacguacugcaccggcuccauccccugcagcgugugccuguccgggcucgacagccuggacaccuaccccucccuggagaccauccagaucacgaucagcuccuucaagugggaccucaccgccuucggccuggucgccgagugguuccuggccuacauccucuucacccgguucuucuacgugcuggggcuggcggccaucaugcagcuguucuucagcuacuucgccgugcacuucaucuccaacagcuggcucauguggcugaucaucaaccugguccagauggcccccaucuccgcgauggugcgcauguacaucuucuucgccagcuucuacuacguguggaaguccuacguccacgugguggacggcugcaacagcagcacgugcaugaugugcuacaagcggaaccgcgccacgcgggucgagugcaccaccaucgugaacgggguccgccgguccuucuacguguacgccaacggcggcaagggguucugcaagcuccacaacuggaacugcgugaacugcgacaccuucugcgccggcagcacguucaucuccgacgaggucgcgcgcgaccugagccugcaguucaagcggccgaucaaccccaccgaccaguccagcuacaucguggacuccgugaccgucaagaacgggagcauccaccucuacuucgacaaggccggccagaacaccuacgagcgccacucccugagccacuucgugaaccuggacaaccuccgggccaacaacacgaaggggucccugcccaucaacgugaucgucuucgacggcaagagcaagugcgaggaguccagcgccaaguccgccagcguguacuacucccagcugaugugccagcccauccuccugcuggaccaggcgcucgugagcgacgucggcgacagcgccgagguggccgugaagauguucgacgccuacgucaacaccuucuccagcaccuucaacgugccgauggagaagcugaagacccugguggccacggcggaggccgagcucgccaagaacgucucccuggacaacgugcugagcaccuucaucuccgccgcgcgccagggguucguggacagcgacgucgagaccaaggacgugguggagugccucaagcugucccaccagagcgacaucgaggucaccggcgacuccugcaacaacuacaugcugacguacaacaagguggagaacaugacgccccgggaccucggggccugcaucgacugcagcgcccgccacaucaacgcccagguggccaagucccacaacaucgcgcugaucuggaacgucaaggacuucaugagccuguccgagcagcuccggaagcagauccgcagcgccgccaagaagaacaaccugcccuucaagcugaccugcgccaccacccgccagguggugaacgucgugaccaccaagaucgcccucaagggcgggugaggacuagucccuguucccagagcccacuuuuuuuucuuuuuuugaaauaaaauagccugucuuucagaucuaaaaaaaaaaaaaaaaaaaaaaaaaaaaaaaaaaaaaaaaaaaaaaaaaaaaaaaaaaaaaaaaaaaaaaaaaaaaaaaaaaaaaaaaaaaaaaaaaaaa

SEQ ID NO: 28333 - RNA, 6089 nt, Artificial Sequence
  SARS-CoV-2/Wuhan-Hu-1__NC_045512.2/MN908947.2__non-structural protein 3 (NSP3) mRNA gc (1-1946)(T429I_P1470S_F1570V)
aggagagucccgcagucggcguccagcggcucugcuuguucgugugugugucguugcaggccuuauucaagcuuaccauggcccccaccaaggugaccuucggcgacgacaccgucaucgaggugcagggguacaagagcgugaacaucaccuucgagcuggacgagcgcaucgacaagguccucaacgagaagugcuccgccuacaccguggagcugggcaccgaggugaacgaguucgcgugcgucguggccgacgccgugaucaagacgcugcagccggucagcgagcuccugacgccccuggggaucgaccucgacgagugguccauggccaccuacuaccuguucgacgagagcggcgaguucaagcuggccucccacauguacugcagcuucuacccgcccgacgaggacgaggaggagggggacugcgaggaggaggaguucgagcccuccacccaguacgaguacggcacggaggacgacuaccagggcaagccccucgaguucggggcgaccagcgccgcccugcagcccgaggaggagcaggaggaggacuggcuggacgacgacucccagcagaccgugggccagcaggacgggagcgaggacaaccagaccacgaccauccagaccaucguggagguccagccccagcucgagauggagcugaccccgguggugcagacgaucgaggucaacuccuucagcggcuaccugaagcucaccgacaacguguacaucaagaacgccgacaucguggaggaggcgaagaaggucaagcccaccgugguggucaacgccgccaacguguaccugaagcacgggggcggcguggccggggcccugaacaaggcgaccaacaacgccaugcaggucgaguccgacgacuacaucgccacgaacggcccccucaaggucgggggcagcugcgugcuguccggccacaaccuggccaagcacugccuccacgugguggggcccaacgucaacaagggcgaggacauccagcugcucaagagcgccuacgagaacuucaaccagcacgaggugcugcuggcgccgcugcucuccgccgggaucuucggcgccgaccccauccacagccugcgggugugcgucgacaccgugcgcaccaacguguaccuggccgucuucgacaagaaccucuacgacaagcugguguccagcuuccuggagaugaaguccgagaagcaggucgagcagaagaucgccgagauccccaaggaggaggugaagcccuucaucaccgagagcaagccgagcguggagcagcggaagcaggacgacaagaagaucaaggcgugcguggaggaggucacgaccacccucgaggagaucaaguuccugacggagaaccugcuccuguacaucgacaucaacgggaaccugcaccccgacuccgccacccucgugagcgacaucgacaucaccuuccugaagaaggacgcccccuacaucgugggcgacgucgugcaggagggcgugcugaccgccgucgugauccccacgaagaaggccgggggcaccaccgagaugcucgcgaaggcccugcgcaaggugccgaccgacaacuacaucacgaccuaccccgggcagggccugaacggguacaccgucgaggaggccaagaccgugcucaagaagugcaaguccgccuucuacauccugcccagcaucaucuccaacgagaagcaggagauccugggcaccgugagcuggaaccugcgggagaugcucgcgcacgccgaggagacgcgcaagcugaugcccgucugcguggagaccaaggccaucguguccaccauccagcggaaguacaagggcaucaagauccaggagggggucguggacuacggcgcccgcuucuacuucuacaccagcaagacgaccguggccucccugaucaacacccucaacgaccugaacgagacccuggucacgaugccgcucggguacgugacccacggccugaaccuggaggaggcggcccgguacaugcgcagccucaaggugcccgccaccgucuccgugagcucccccgacgccgugaccgccuacaacggguaccugacgagcuccagcaagacccccgaggagcacuucaucgagaccaucucccuggcgggcagcuacaaggacuggagcuacuccggccagagcacccagcucgggaucgaguuccugaagcggggcgacaaguccgucuacuacacgagcaacccgaccaccuuccaccuggacggggaggugaucaccuucgacaaccucaagacgcugcugucccuccgcgaggugcggaccaucaaggucuucaccaccguggacaacaucaaccugcacacccagguggucgacaugagcaugaccuacggccagcaguucggccccaccuaccuggacggggccgacgugaccaagaucaagccccacaacucccacgagggcaagacguucuacgugcucccgaacgacgacacccugcgcgucgaggccuucgaguacuaccacaccaccgaccccagcuuccuggggcgguacauguccgcccucaaccacacgaagaaguggaaguacccccaggugaacggccugaccagcaucaagugggccgacaacaacugcuaccuggcgaccgcccuccugacccugcagcagaucgagcucaaguucaacccgcccgcccugcaggacgccuacuaccgcgcgcgggccggggaggccgccaacuucugcgcccugauccucgcguacugcaacaagacggugggcgagcugggcgacguccgcgagaccauguccuaccuguuccagcacgccaaccucgacagcugcaagcgggugcugaacgucgugugcaagaccugcgggcagcagcagaccacccugaagggcguggaggccgucauguacauggggacgcucuccuacgagcaguucaagaagggcgugcagauccccugcacgugcgggaagcaggccaccaaguaccuggugcagcaggagagccccuucgucaugauguccgcgcccccggcccaguacgagcugaagcacggcaccuucacgugcgccagcgaguacaccggcaacuaccagugcgggcacuacaagcacaucaccuccaaggagacccucuacugcaucgacggcgcccugcugaccaagagcagcgaguacaaggggcccaucaccgacguguucuacaaggagaacuccuacaccaccacgaucaagcccgugaccuacaagcucgacggcgucgugugcaccgagaucgaccccaagcuggacaacuacuacaagaaggacaacagcuacuucaccgagcagccgaucgaccuggugcccaaccagcccuaccccaacgccuccuucgacaacuucaaguucgucugcgacaacaucaaguucgccgacgaccucaaccagcugacgggguacaagaagccggcgagccgcgagcugaaggugaccuucuuccccgaccucaacggcgacguggucgccaucgacuacaagcacuacacccccuccuucaagaagggcgccaagcugcugcacaagcccaucguguggcacgugaacaacgccaccaacaaggcgacguacaagccgaacaccuggugcauccggugccucuggagcaccaagcccgucgagaccuccaacagcuucgacgugcugaaguccgaggacgcccaggggauggacaaccuggccugcgaggaccucaagcccgugagcgaggaggucguggagaaccccacgauccagaaggacgugcuggagugcaacgucaagaccaccgagguggugggcgacaucauccugaagccggccaacaacucccucaagaucaccgaggaggucgggcacacggaccugauggccgcguacguggacaacagcucccugaccaucaagaagcccaacgagcucagccgcgugcugggccugaagacccucgccacccacgggcuggccgccgucaacuccgugcccugggacacgaucgccaacuacgcgaagccguuccugaacaagguggucagcaccaccaccaacaucgugacgcgcugccucaaccgggugugcaccaacuacaugcccuacuucuucacccugcugcuccagcugugcaccuucacgcgcuccaccaacagccggaucaaggccuccaugcccaccaccaucgccaagaacaccgucaagagcgugggcaaguucugccuggaggccagcuucaacuaccucaagucccccaacuucagcaagcugaucaacaucaucaucugguuccugcuccuguccgugugccugggcagccucaucuacuccacggccgcgcuggggguccugaugagcaaccucggcaugccguccuacugcaccggguaccgcgagggcuaccugaacagcaccaacgugaccaucgccacguacugcaccggcuccaucagcugcagcgugugccuguccgggcucgacagccuggacaccuaccccucccuggagaccauccagaucacgaucagcuccuucaagugggaccucaccgccuucggccuggucgccgagugguuccuggccuacauccucuucacccgguucuucuacgugcuggggcuggcggccaucaugcagcuguucuucagcuacuucgccgugcacuucaucuccaacagcuggcucauguggcugaucaucaaccugguccagauggcccccaucuccgcgauggugcgcauguacaucuucguggccagcuucuacuacguguggaaguccuacguccacgugguggacggcugcaacagcagcacgugcaugaugugcuacaagcggaaccgcgccacgcgggucgagugcaccaccaucgugaacgggguccgccgguccuucuacguguacgccaacggcggcaagggguucugcaagcuccacaacuggaacugcgugaacugcgacaccuucugcgccggcagcacguucaucuccgacgaggucgcgcgcgaccugagccugcaguucaagcggccgaucaaccccaccgaccaguccagcuacaucguggacuccgugaccgucaagaacgggagcauccaccucuacuucgacaaggccggccagaagaccuacgagcgccacucccugagccacuucgugaaccuggacaaccuccgggccaacaacacgaaggggucccugcccaucaacgugaucgucuucgacggcaagagcaagugcgaggaguccagcgccaaguccgccagcguguacuacucccagcugaugugccagcccauccuccugcuggaccaggcgcucgugagcgacgucggcgacagcgccgagguggccgugaagauguucgacgccuacgucaacaccuucuccagcaccuucaacgugccgauggagaagcugaagacccugguggccacggcggaggccgagcucgccaagaacgucucccuggacaacgugcugagcaccuucaucuccgccgcgcgccagggguucguggacagcgacgucgagaccaaggacgugguggagugccucaagcugucccaccagagcgacaucgaggucaccggcgacuccugcaacaacuacaugcugacguacaacaagguggagaacaugacgccccgggaccucggggccugcaucgacugcagcgcccgccacaucaacgcccagguggccaagucccacaacaucgcgcugaucuggaacgucaaggacuucaugagccuguccgagcagcuccggaagcagauccgcagcgccgccaagaagaacaaccugcccuucaagcugaccugcgccaccacccgccagguggugaacgucgugaccaccaagaucgcccucaagggcgggugaggacuagucccuguucccagagcccacuuuuuuuucuuuuuuugaaauaaaauagccugucuuucagaucuaaaaaaaaaaaaaaaaaaaaaaaaaaaaaaaaaaaaaaaaaaaaaaaaaaaaaaaaaaaaaaaaaaaaaaaaaaaaaaaaaaaaaaaaaaaaaaaaaaaa

SEQ ID NO: 28334 - RNA, 6089 nt, Artificial Sequence
  SARS-CoV-2/Wuhan-Hu-1__NC_045512.2/MN908947.2__non-structural protein 3 (NSP3) mRNA gc (1-1946)(D737G_S1808F)
aggagagucccgcagucggcguccagcggcucugcuuguucgugugugugucguugcaggccuuauucaagcuuaccauggcccccaccaaggugaccuucggcgacgacaccgucaucgaggugcagggguacaagagcgugaacaucaccuucgagcuggacgagcgcaucgacaagguccucaacgagaagugcuccgccuacaccguggagcugggcaccgaggugaacgaguucgcgugcgucguggccgacgccgugaucaagacgcugcagccggucagcgagcuccugacgccccuggggaucgaccucgacgagugguccauggccaccuacuaccuguucgacgagagcggcgaguucaagcuggccucccacauguacugcagcuucuacccgcccgacgaggacgaggaggagggggacugcgaggaggaggaguucgagcccuccacccaguacgaguacggcacggaggacgacuaccagggcaagccccucgaguucggggcgaccagcgccgcccugcagcccgaggaggagcaggaggaggacuggcuggacgacgacucccagcagaccgugggccagcaggacgggagcgaggacaaccagaccacgaccauccagaccaucguggagguccagccccagcucgagauggagcugaccccgguggugcagacgaucgaggucaacuccuucagcggcuaccugaagcucaccgacaacguguacaucaagaacgccgacaucguggaggaggcgaagaaggucaagcccaccgugguggucaacgccgccaacguguaccugaagcacgggggcggcguggccggggcccugaacaaggcgaccaacaacgccaugcaggucgaguccgacgacuacaucgccacgaacggcccccucaaggucgggggcagcugcgugcuguccggccacaaccuggccaagcacugccuccacgugguggggcccaacgucaacaagggcgaggacauccagcugcucaagagcgccuacgagaacuucaaccagcacgaggugcugcuggcgccgcugcucuccgccgggaucuucggcgccgaccccauccacagccugcgggugugcgucgacaccgugcgcaccaacguguaccuggccgucuucgacaagaaccucuacgacaagcugguguccagcuuccuggagaugaaguccgagaagcaggucgagcagaagaucgccgagauccccaaggaggaggugaagcccuucaucaccgagagcaagccgagcguggagcagcggaagcaggacgacaagaagaucaaggcgugcguggaggaggucacgaccacccucgaggagaccaaguuccugacggagaaccugcuccuguacaucgacaucaacgggaaccugcaccccgacuccgccacccucgugagcgacaucgacaucaccuuccugaagaaggacgcccccuacaucgugggcgacgucgugcaggagggcgugcugaccgccgucgugauccccacgaagaaggccgggggcaccaccgagaugcucgcgaaggcccugcgcaaggugccgaccgacaacuacaucacgaccuaccccgggcagggccugaacggguacaccgucgaggaggccaagaccgugcucaagaagugcaaguccgccuucuacauccugcccagcaucaucuccaacgagaagcaggagauccugggcaccgugagcuggaaccugcgggagaugcucgcgcacgccgaggagacgcgcaagcugaugcccgucugcguggagaccaaggccaucguguccaccauccagcggaaguacaagggcaucaagauccaggagggggucguggacuacggcgcccgcuucuacuucuacaccagcaagacgaccguggccucccugaucaacacccucaacgaccugaacgagacccuggucacgaugccgcucggguacgugacccacggccugaaccuggaggaggcggcccgguacaugcgcagccucaaggugcccgccaccgucuccgugagcucccccgacgccgugaccgccuacaacggguaccugacgagcuccagcaagacccccgaggagcacuucaucgagaccaucucccuggcgggcagcuacaaggacuggagcuacuccggccagagcacccagcucgggaucgaguuccugaagcggggcgacaaguccgucuacuacacgagcaacccgaccaccuuccaccuggacggggaggugaucaccuucggcaaccucaagacgcugcugucccuccgcgaggugcggaccaucaaggucuucaccaccguggacaacaucaaccugcacacccagguggucgacaugagcaugaccuacggccagcaguucggccccaccuaccuggacggggccgacgugaccaagaucaagccccacaacucccacgagggcaagacguucuacgugcucccgaacgacgacacccugcgcgucgaggccuucgaguacuaccacaccaccgaccccagcuuccuggggcgguacauguccgcccucaaccacacgaagaaguggaaguacccccaggugaacggccugaccagcaucaagugggccgacaacaacugcuaccuggcgaccgcccuccugacccugcagcagaucgagcucaaguucaacccgcccgcccugcaggacgccuacuaccgcgcgcgggccggggaggccgccaacuucugcgcccugauccucgcguacugcaacaagacggugggcgagcugggcgacguccgcgagaccauguccuaccuguuccagcacgccaaccucgacagcugcaagcgggugcugaacgucgugugcaagaccugcgggcagcagcagaccacccugaagggcguggaggccgucauguacauggggacgcucuccuacgagcaguucaagaagggcgugcagauccccugcacgugcgggaagcaggccaccaaguaccuggugcagcaggagagccccuucgucaugauguccgcgcccccggcccaguacgagcugaagcacggcaccuucacgugcgccagcgaguacaccggcaacuaccagugcgggcacuacaagcacaucaccuccaaggagacccucuacugcaucgacggcgcccugcugaccaagagcagcgaguacaaggggcccaucaccgacguguucuacaaggagaacuccuacaccaccacgaucaagcccgugaccuacaagcucgacggcgucgugugcaccgagaucgaccccaagcuggacaacuacuacaagaaggacaacagcuacuucaccgagcagccgaucgaccuggugcccaaccagcccuaccccaacgccuccuucgacaacuucaaguucgucugcgacaacaucaaguucgccgacgaccucaaccagcugacgggguacaagaagccggcgagccgcgagcugaaggugaccuucuuccccgaccucaacggcgacguggucgccaucgacuacaagcacuacacccccuccuucaagaagggcgccaagcugcugcacaagcccaucguguggcacgugaacaacgccaccaacaaggcgacguacaagccgaacaccuggugcauccggugccucuggagcaccaagcccgucgagaccuccaacagcuucgacgugcugaaguccgaggacgcccaggggauggacaaccuggccugcgaggaccucaagcccgugagcgaggaggucguggagaaccccacgauccagaaggacgugcuggagugcaacgucaagaccaccgagguggugggcgacaucauccugaagccggccaacaacucccucaagaucaccgaggaggucgggcacacggaccugauggccgcguacguggacaacagcucccugaccaucaagaagcccaacgagcucagccgcgugcugggccugaagacccucgccacccacgggcuggccgccgucaacuccgugcccugggacacgaucgccaacuacgcgaagccguuccugaacaagguggucagcaccaccaccaacaucgugacgcgcugccucaaccgggugugcaccaacuacaugcccuacuucuucacccugcugcuccagcugugcaccuucacgcgcuccaccaacagccggaucaaggccuccaugcccaccaccaucgccaagaacaccgucaagagcgugggcaaguucugccuggaggccagcuucaacuaccucaagucccccaacuucagcaagcugaucaacaucaucaucugguuccugcuccuguccgugugccugggcagccucaucuacuccacggccgcgcuggggguccugaugagcaaccucggcaugccguccuacugcaccggguaccgcgagggcuaccugaacagcaccaacgugaccaucgccacguacugcaccggcuccauccccugcagcgugugccuguccgggcucgacagccuggacaccuaccccucccuggagaccauccagaucacgaucagcuccuucaagugggaccucaccgccuucggccuggucgccgagugguuccuggccuacauccucuucacccgguucuucuacgugcuggggcuggcggccaucaugcagcuguucuucagcuacuucgccgugcacuucaucuccaacagcuggcucauguggcugaucaucaaccugguccagauggcccccaucuccgcgauggugcgcauguacaucuucuucgccagcuucuacuacguguggaaguccuacguccacgugguggacggcugcaacagcagcacgugcaugaugugcuacaagcggaaccgcgccacgcgggucgagugcaccaccaucgugaacgggguccgccgguccuucuacguguacgccaacggcggcaagggguucugcaagcuccacaacuggaacugcgugaacugcgacaccuucugcgccggcagcacguucaucuccgacgaggucgcgcgcgaccugagccugcaguucaagcggccgaucaaccccaccgaccaguccagcuacaucguggacuccgugaccgucaagaacgggagcauccaccucuacuucgacaaggccggccagaagaccuacgagcgccacucccugagccacuucgugaaccuggacaaccuccgggccaacaacacgaaggggucccugcccaucaacgugaucgucuucgacggcaagagcaagugcgaggaguccagcgccaaguccgccagcguguacuacucccagcugaugugccagcccauccuccugcuggaccaggcgcucgugagcgacgucggcgacagcgccgagguggccgugaagauguucgacgccuacgucaacaccuucuccagcaccuucaacgugccgauggagaagcugaagacccugguggccacggcggaggccgagcucgccaagaacgucuuccuggacaacgugcugagcaccuucaucuccgccgcgcgccagggguucguggacagcgacgucgagaccaaggacgugguggagugccucaagcugucccaccagagcgacaucgaggucaccggcgacuccugcaacaacuacaugcugacguacaacaagguggagaacaugacgccccgggaccucggggccugcaucgacugcagcgcccgccacaucaacgcccagguggccaagucccacaacaucgcgcugaucuggaacgucaaggacuucaugagccuguccgagcagcuccggaagcagauccgcagcgccgccaagaagaacaaccugcccuucaagcugaccugcgccaccacccgccagguggugaacgucgugaccaccaagaucgcccucaagggcgggugaggacuagucccuguucccagagcccacuuuuuuuucuuuuuuugaaauaaaauagccugucuuucagaucuaaaaaaaaaaaaaaaaaaaaaaaaaaaaaaaaaaaaaaaaaaaaaaaaaaaaaaaaaaaaaaaaaaaaaaaaaaaaaaaaaaaaaaaaaaaaaaaaaaaa

SEQ ID NO: 28335 - RNA, 6089 nt, Artificial Sequence
  SARS-CoV-2/Wuhan-Hu-1__NC_045512.2/MN908947.2__non-structural protein 3 (NSP3) mRNA gc (1-1946)(T750I)
aggagagucccgcagucggcguccagcggcucugcuuguucgugugugugucguugcaggccuuauucaagcuuaccauggcccccaccaaggugaccuucggcgacgacaccgucaucgaggugcagggguacaagagcgugaacaucaccuucgagcuggacgagcgcaucgacaagguccucaacgagaagugcuccgccuacaccguggagcugggcaccgaggugaacgaguucgcgugcgucguggccgacgccgugaucaagacgcugcagccggucagcgagcuccugacgccccuggggaucgaccucgacgagugguccauggccaccuacuaccuguucgacgagagcggcgaguucaagcuggccucccacauguacugcagcuucuacccgcccgacgaggacgaggaggagggggacugcgaggaggaggaguucgagcccuccacccaguacgaguacggcacggaggacgacuaccagggcaagccccucgaguucggggcgaccagcgccgcccugcagcccgaggaggagcaggaggaggacuggcuggacgacgacucccagcagaccgugggccagcaggacgggagcgaggacaaccagaccacgaccauccagaccaucguggagguccagccccagcucgagauggagcugaccccgguggugcagacgaucgaggucaacuccuucagcggcuaccugaagcucaccgacaacguguacaucaagaacgccgacaucguggaggaggcgaagaaggucaagcccaccgugguggucaacgccgccaacguguaccugaagcacgggggcggcguggccggggcccugaacaaggcgaccaacaacgccaugcaggucgaguccgacgacuacaucgccacgaacggcccccucaaggucgggggcagcugcgugcuguccggccacaaccuggccaagcacugccuccacgugguggggcccaacgucaacaagggcgaggacauccagcugcucaagagcgccuacgagaacuucaaccagcacgaggugcugcuggcgccgcugcucuccgccgggaucuucggcgccgaccccauccacagccugcgggugugcgucgacaccgugcgcaccaacguguaccuggccgucuucgacaagaaccucuacgacaagcugguguccagcuuccuggagaugaaguccgagaagcaggucgagcagaagaucgccgagauccccaaggaggaggugaagcccuucaucaccgagagcaagccgagcguggagcagcggaagcaggacgacaagaagaucaaggcgugcguggaggaggucacgaccacccucgaggagaccaaguuccugacggagaaccugcuccuguacaucgacaucaacgggaaccugcaccccgacuccgccacccucgugagcgacaucgacaucaccuuccugaagaaggacgcccccuacaucgugggcgacgucgugcaggagggcgugcugaccgccgucgugauccccacgaagaaggccgggggcaccaccgagaugcucgcgaaggcccugcgcaaggugccgaccgacaacuacaucacgaccuaccccgggcagggccugaacggguacaccgucgaggaggccaagaccgugcucaagaagugcaaguccgccuucuacauccugcccagcaucaucuccaacgagaagcaggagauccugggcaccgugagcuggaaccugcgggagaugcucgcgcacgccgaggagacgcgcaagcugaugcccgucugcguggagaccaaggccaucguguccaccauccagcggaaguacaagggcaucaagauccaggagggggucguggacuacggcgcccgcuucuacuucuacaccagcaagacgaccguggccucccugaucaacacccucaacgaccugaacgagacccuggucacgaugccgcucggguacgugacccacggccugaaccuggaggaggcggcccgguacaugcgcagccucaaggugcccgccaccgucuccgugagcucccccgacgccgugaccgccuacaacggguaccugacgagcuccagcaagacccccgaggagcacuucaucgagaccaucucccuggcgggcagcuacaaggacuggagcuacuccggccagagcacccagcucgggaucgaguuccugaagcggggcgacaaguccgucuacuacacgagcaacccgaccaccuuccaccuggacggggaggugaucaccuucgacaaccucaagacgcugcugucccuccgcgaggugcggaucaucaaggucuucaccaccguggacaacaucaaccugcacacccagguggucgacaugagcaugaccuacggccagcaguucggccccaccuaccuggacggggccgacgugaccaagaucaagccccacaacucccacgagggcaagacguucuacgugcucccgaacgacgacacccugcgcgucgaggccuucgaguacuaccacaccaccgaccccagcuuccuggggcgguacauguccgcccucaaccacacgaagaaguggaaguacccccaggugaacggccugaccagcaucaagugggccgacaacaacugcuaccuggcgaccgcccuccugacccugcagcagaucgagcucaaguucaacccgcccgcccugcaggacgccuacuaccgcgcgcgggccggggaggccgccaacuucugcgcccugauccucgcguacugcaacaagacggugggcgagcugggcgacguccgcgagaccauguccuaccuguuccagcacgccaaccucgacagcugcaagcgggugcugaacgucgugugcaagaccugcgggcagcagcagaccacccugaagggcguggaggccgucauguacauggggacgcucuccuacgagcaguucaagaagggcgugcagauccccugcacgugcgggaagcaggccaccaaguaccuggugcagcaggagagccccuucgucaugauguccgcgcccccggcccaguacgagcugaagcacggcaccuucacgugcgccagcgaguacaccggcaacuaccagugcgggcacuacaagcacaucaccuccaaggagacccucuacugcaucgacggcgcccugcugaccaagagcagcgaguacaaggggcccaucaccgacguguucuacaaggagaacuccuacaccaccacgaucaagcccgugaccuacaagcucgacggcgucgugugcaccgagaucgaccccaagcuggacaacuacuacaagaaggacaacagcuacuucaccgagcagccgaucgaccuggugcccaaccagcccuaccccaacgccuccuucgacaacuucaaguucgucugcgacaacaucaaguucgccgacgaccucaaccagcugacgggguacaagaagccggcgagccgcgagcugaaggugaccuucuuccccgaccucaacggcgacguggucgccaucgacuacaagcacuacacccccuccuucaagaagggcgccaagcugcugcacaagcccaucguguggcacgugaacaacgccaccaacaaggcgacguacaagccgaacaccuggugcauccggugccucuggagcaccaagcccgucgagaccuccaacagcuucgacgugcugaaguccgaggacgcccaggggauggacaaccuggccugcgaggaccucaagcccgugagcgaggaggucguggagaaccccacgauccagaaggacgugcuggagugcaacgucaagaccaccgagguggugggcgacaucauccugaagccggccaacaacucccucaagaucaccgaggaggucgggcacacggaccugauggccgcguacguggacaacagcucccugaccaucaagaagcccaacgagcucagccgcgugcugggccugaagacccucgccacccacgggcuggccgccgucaacuccgugcccugggacacgaucgccaacuacgcgaagccguuccugaacaagguggucagcaccaccaccaacaucgugacgcgcugccucaaccgggugugcaccaacuacaugcccuacuucuucacccugcugcuccagcugugcaccuucacgcgcuccaccaacagccggaucaaggccuccaugcccaccaccaucgccaagaacaccgucaagagcgugggcaaguucugccuggaggccagcuucaacuaccucaagucccccaacuucagcaagcugaucaacaucaucaucugguuccugcuccuguccgugugccugggcagccucaucuacuccacggccgcgcuggggguccugaugagcaaccucggcaugccguccuacugcaccggguaccgcgagggcuaccugaacagcaccaacgugaccaucgccacguacugcaccggcuccauccccugcagcgugugccuguccgggcucgacagccuggacaccuaccccucccuggagaccauccagaucacgaucagcuccuucaagugggaccucaccgccuucggccuggucgccgagugguuccuggccuacauccucuucacccgguucuucuacgugcuggggcuggcggccaucaugcagcuguucuucagcuacuucgccgugcacuucaucuccaacagcuggcucauguggcugaucaucaaccugguccagauggcccccaucuccgcgauggugcgcauguacaucuucuucgccagcuucuacuacguguggaaguccuacguccacgugguggacggcugcaacagcagcacgugcaugaugugcuacaagcggaaccgcgccacgcgggucgagugcaccaccaucgugaacgggguccgccgguccuucuacguguacgccaacggcggcaagggguucugcaagcuccacaacuggaacugcgugaacugcgacaccuucugcgccggcagcacguucaucuccgacgaggucgcgcgcgaccugagccugcaguucaagcggccgaucaaccccaccgaccaguccagcuacaucguggacuccgugaccgucaagaacgggagcauccaccucuacuucgacaaggccggccagaagaccuacgagcgccacucccugagccacuucgugaaccuggacaaccuccgggccaacaacacgaaggggucccugcccaucaacgugaucgucuucgacggcaagagcaagugcgaggaguccagcgccaaguccgccagcguguacuacucccagcugaugugccagcccauccuccugcuggaccaggcgcucgugagcgacgucggcgacagcgccgagguggccgugaagauguucgacgccuacgucaacaccuucuccagcaccuucaacgugccgauggagaagcugaagacccugguggccacggcggaggccgagcucgccaagaacgucucccuggacaacgugcugagcaccuucaucuccgccgcgcgccagggguucguggacagcgacgucgagaccaaggacgugguggagugccucaagcugucccaccagagcgacaucgaggucaccggcgacuccugcaacaacuacaugcugacguacaacaagguggagaacaugacgccccgggaccucggggccugcaucgacugcagcgcccgccacaucaacgcccagguggccaagucccacaacaucgcgcugaucuggaacgucaaggacuucaugagccuguccgagcagcuccggaagcagauccgcagcgccgccaagaagaacaaccugcccuucaagcugaccugcgccaccacccgccagguggugaacgucgugaccaccaagaucgcccucaagggcgggugaggacuagucccuguucccagagcccacuuuuuuuucuuuuuuugaaauaaaauagccugucuuucagaucuaaaaaaaaaaaaaaaaaaaaaaaaaaaaaaaaaaaaaaaaaaaaaaaaaaaaaaaaaaaaaaaaaaaaaaaaaaaaaaaaaaaaaaaaaaaaaaaaaaaa

SEQ ID NO: 28336 - RNA, 6089 nt, Artificial Sequence
  SARS-CoV-2/Wuhan-Hu-1__NC_045512.2/MN908947.2__non-structural protein 3 (NSP3) mRNA gc (1-1946)(T1190I)
aggagagucccgcagucggcguccagcggcucugcuuguucgugugugugucguugcaggccuuauucaagcuuaccauggcccccaccaaggugaccuucggcgacgacaccgucaucgaggugcagggguacaagagcgugaacaucaccuucgagcuggacgagcgcaucgacaagguccucaacgagaagugcuccgccuacaccguggagcugggcaccgaggugaacgaguucgcgugcgucguggccgacgccgugaucaagacgcugcagccggucagcgagcuccugacgccccuggggaucgaccucgacgagugguccauggccaccuacuaccuguucgacgagagcggcgaguucaagcuggccucccacauguacugcagcuucuacccgcccgacgaggacgaggaggagggggacugcgaggaggaggaguucgagcccuccacccaguacgaguacggcacggaggacgacuaccagggcaagccccucgaguucggggcgaccagcgccgcccugcagcccgaggaggagcaggaggaggacuggcuggacgacgacucccagcagaccgugggccagcaggacgggagcgaggacaaccagaccacgaccauccagaccaucguggagguccagccccagcucgagauggagcugaccccgguggugcagacgaucgaggucaacuccuucagcggcuaccugaagcucaccgacaacguguacaucaagaacgccgacaucguggaggaggcgaagaaggucaagcccaccgugguggucaacgccgccaacguguaccugaagcacgggggcggcguggccggggcccugaacaaggcgaccaacaacgccaugcaggucgaguccgacgacuacaucgccacgaacggcccccucaaggucgggggcagcugcgugcuguccggccacaaccuggccaagcacugccuccacgugguggggcccaacgucaacaagggcgaggacauccagcugcucaagagcgccuacgagaacuucaaccagcacgaggugcugcuggcgccgcugcucuccgccgggaucuucggcgccgaccccauccacagccugcgggugugcgucgacaccgugcgcaccaacguguaccuggccgucuucgacaagaaccucuacgacaagcugguguccagcuuccuggagaugaaguccgagaagcaggucgagcagaagaucgccgagauccccaaggaggaggugaagcccuucaucaccgagagcaagccgagcguggagcagcggaagcaggacgacaagaagaucaaggcgugcguggaggaggucacgaccacccucgaggagaccaaguuccugacggagaaccugcuccuguacaucgacaucaacgggaaccugcaccccgacuccgccacccucgugagcgacaucgacaucaccuuccugaagaaggacgcccccuacaucgugggcgacgucgugcaggagggcgugcugaccgccgucgugauccccacgaagaaggccgggggcaccaccgagaugcucgcgaaggcccugcgcaaggugccgaccgacaacuacaucacgaccuaccccgggcagggccugaacggguacaccgucgaggaggccaagaccgugcucaagaagugcaaguccgccuucuacauccugcccagcaucaucuccaacgagaagcaggagauccugggcaccgugagcuggaaccugcgggagaugcucgcgcacgccgaggagacgcgcaagcugaugcccgucugcguggagaccaaggccaucguguccaccauccagcggaaguacaagggcaucaagauccaggagggggucguggacuacggcgcccgcuucuacuucuacaccagcaagacgaccguggccucccugaucaacacccucaacgaccugaacgagacccuggucacgaugccgcucggguacgugacccacggccugaaccuggaggaggcggcccgguacaugcgcagccucaaggugcccgccaccgucuccgugagcucccccgacgccgugaccgccuacaacggguaccugacgagcuccagcaagacccccgaggagcacuucaucgagaccaucucccuggcgggcagcuacaaggacuggagcuacuccggccagagcacccagcucgggaucgaguuccugaagcggggcgacaaguccgucuacuacacgagcaacccgaccaccuuccaccuggacggggaggugaucaccuucgacaaccucaagacgcugcugucccuccgcgaggugcggaccaucaaggucuucaccaccguggacaacaucaaccugcacacccagguggucgacaugagcaugaccuacggccagcaguucggccccaccuaccuggacggggccgacgugaccaagaucaagccccacaacucccacgagggcaagacguucuacgugcucccgaacgacgacacccugcgcgucgaggccuucgaguacuaccacaccaccgaccccagcuuccuggggcgguacauguccgcccucaaccacacgaagaaguggaaguacccccaggugaacggccugaccagcaucaagugggccgacaacaacugcuaccuggcgaccgcccuccugacccugcagcagaucgagcucaaguucaacccgcccgcccugcaggacgccuacuaccgcgcgcgggccggggaggccgccaacuucugcgcccugauccucgcguacugcaacaagacggugggcgagcugggcgacguccgcgagaccauguccuaccuguuccagcacgccaaccucgacagcugcaagcgggugcugaacgucgugugcaagaccugcgggcagcagcagaccacccugaagggcguggaggccgucauguacauggggacgcucuccuacgagcaguucaagaagggcgugcagauccccugcacgugcgggaagcaggccaccaaguaccuggugcagcaggagagccccuucgucaugauguccgcgcccccggcccaguacgagcugaagcacggcaccuucacgugcgccagcgaguacaccggcaacuaccagugcgggcacuacaagcacaucaccuccaaggagacccucuacugcaucgacggcgcccugcugaccaagagcagcgaguacaaggggcccaucaccgacguguucuacaaggagaacuccuacaccaccacgaucaagcccgugaccuacaagcucgacggcgucgugugcaccgagaucgaccccaagcuggacaacuacuacaagaaggacaacagcuacuucaccgagcagccgaucgaccuggugcccaaccagcccuaccccaacgccuccuucgacaacuucaaguucgucugcgacaacaucaaguucgccgacgaccucaaccagcugacgggguacaagaagccggcgagccgcgagcugaaggugaccuucuuccccgaccucaacggcgacguggucgccaucgacuacaagcacuacacccccuccuucaagaagggcgccaagcugcugcacaagcccaucguguggcacgugaacaacgccaccaacaaggcgacguacaagccgaacaucuggugcauccggugccucuggagcaccaagcccgucgagaccuccaacagcuucgacgugcugaaguccgaggacgcccaggggauggacaaccuggccugcgaggaccucaagcccgugagcgaggaggucguggagaaccccacgauccagaaggacgugcuggagugcaacgucaagaccaccgagguggugggcgacaucauccugaagccggccaacaacucccucaagaucaccgaggaggucgggcacacggaccugauggccgcguacguggacaacagcucccugaccaucaagaagcccaacgagcucagccgcgugcugggccugaagacccucgccacccacgggcuggccgccgucaacuccgugcccugggacacgaucgccaacuacgcgaagccguuccugaacaagguggucagcaccaccaccaacaucgugacgcgcugccucaaccgggugugcaccaacuacaugcccuacuucuucacccugcugcuccagcugugcaccuucacgcgcuccaccaacagccggaucaaggccuccaugcccaccaccaucgccaagaacaccgucaagagcgugggcaaguucugccuggaggccagcuucaacuaccucaagucccccaacuucagcaagcugaucaacaucaucaucugguuccugcuccuguccgugugccugggcagccucaucuacuccacggccgcgcuggggguccugaugagcaaccucggcaugccguccuacugcaccggguaccgcgagggcuaccugaacagcaccaacgugaccaucgccacguacugcaccggcuccauccccugcagcgugugccuguccgggcucgacagccuggacaccuaccccucccuggagaccauccagaucacgaucagcuccuucaagugggaccucaccgccuucggccuggucgccgagugguuccuggccuacauccucuucacccgguucuucuacgugcuggggcuggcggccaucaugcagcuguucuucagcuacuucgccgugcacuucaucuccaacagcuggcucauguggcugaucaucaaccugguccagauggcccccaucuccgcgauggugcgcauguacaucuucuucgccagcuucuacuacguguggaaguccuacguccacgugguggacggcugcaacagcagcacgugcaugaugugcuacaagcggaaccgcgccacgcgggucgagugcaccaccaucgugaacgggguccgccgguccuucuacguguacgccaacggcggcaagggguucugcaagcuccacaacuggaacugcgugaacugcgacaccuucugcgccggcagcacguucaucuccgacgaggucgcgcgcgaccugagccugcaguucaagcggccgaucaaccccaccgaccaguccagcuacaucguggacuccgugaccgucaagaacgggagcauccaccucuacuucgacaaggccggccagaagaccuacgagcgccacucccugagccacuucgugaaccuggacaaccuccgggccaacaacacgaaggggucccugcccaucaacgugaucgucuucgacggcaagagcaagugcgaggaguccagcgccaaguccgccagcguguacuacucccagcugaugugccagcccauccuccugcuggaccaggcgcucgugagcgacgucggcgacagcgccgagguggccgugaagauguucgacgccuacgucaacaccuucuccagcaccuucaacgugccgauggagaagcugaagacccugguggccacggcggaggccgagcucgccaagaacgucucccuggacaacgugcugagcaccuucaucuccgccgcgcgccagggguucguggacagcgacgucgagaccaaggacgugguggagugccucaagcugucccaccagagcgacaucgaggucaccggcgacuccugcaacaacuacaugcugacguacaacaagguggagaacaugacgccccgggaccucggggccugcaucgacugcagcgcccgccacaucaacgcccagguggccaagucccacaacaucgcgcugaucuggaacgucaaggacuucaugagccuguccgagcagcuccggaagcagauccgcagcgccgccaagaagaacaaccugcccuucaagcugaccugcgccaccacccgccagguggugaacgucgugaccaccaagaucgcccucaagggcgggugaggacuagucccuguucccagagcccacuuuuuuuucuuuuuuugaaauaaaauagccugucuuucagaucuaaaaaaaaaaaaaaaaaaaaaaaaaaaaaaaaaaaaaaaaaaaaaaaaaaaaaaaaaaaaaaaaaaaaaaaaaaaaaaaaaaaaaaaaaaaaaaaaaaaa

SEQ ID NO: 28337 - RNA, 6089 nt, Artificial Sequence
  SARS-CoV-2/Wuhan-Hu-1__NC_045512.2/MN908947.2__non-structural protein 3 (NSP3) mRNA gc (1-1946)(A1527V_T1831I)
aggagagucccgcagucggcguccagcggcucugcuuguucgugugugugucguugcaggccuuauucaagcuuaccauggcccccaccaaggugaccuucggcgacgacaccgucaucgaggugcagggguacaagagcgugaacaucaccuucgagcuggacgagcgcaucgacaagguccucaacgagaagugcuccgccuacaccguggagcugggcaccgaggugaacgaguucgcgugcgucguggccgacgccgugaucaagacgcugcagccggucagcgagcuccugacgccccuggggaucgaccucgacgagugguccauggccaccuacuaccuguucgacgagagcggcgaguucaagcuggccucccacauguacugcagcuucuacccgcccgacgaggacgaggaggagggggacugcgaggaggaggaguucgagcccuccacccaguacgaguacggcacggaggacgacuaccagggcaagccccucgaguucggggcgaccagcgccgcccugcagcccgaggaggagcaggaggaggacuggcuggacgacgacucccagcagaccgugggccagcaggacgggagcgaggacaaccagaccacgaccauccagaccaucguggagguccagccccagcucgagauggagcugaccccgguggugcagacgaucgaggucaacuccuucagcggcuaccugaagcucaccgacaacguguacaucaagaacgccgacaucguggaggaggcgaagaaggucaagcccaccgugguggucaacgccgccaacguguaccugaagcacgggggcggcguggccggggcccugaacaaggcgaccaacaacgccaugcaggucgaguccgacgacuacaucgccacgaacggcccccucaaggucgggggcagcugcgugcuguccggccacaaccuggccaagcacugccuccacgugguggggcccaacgucaacaagggcgaggacauccagcugcucaagagcgccuacgagaacuucaaccagcacgaggugcugcuggcgccgcugcucuccgccgggaucuucggcgccgaccccauccacagccugcgggugugcgucgacaccgugcgcaccaacguguaccuggccgucuucgacaagaaccucuacgacaagcugguguccagcuuccuggagaugaaguccgagaagcaggucgagcagaagaucgccgagauccccaaggaggaggugaagcccuucaucaccgagagcaagccgagcguggagcagcggaagcaggacgacaagaagaucaaggcgugcguggaggaggucacgaccacccucgaggagaccaaguuccugacggagaaccugcuccuguacaucgacaucaacgggaaccugcaccccgacuccgccacccucgugagcgacaucgacaucaccuuccugaagaaggacgcccccuacaucgugggcgacgucgugcaggagggcgugcugaccgccgucgugauccccacgaagaaggccgggggcaccaccgagaugcucgcgaaggcccugcgcaaggugccgaccgacaacuacaucacgaccuaccccgggcagggccugaacggguacaccgucgaggaggccaagaccgugcucaagaagugcaaguccgccuucuacauccugcccagcaucaucuccaacgagaagcaggagauccugggcaccgugagcuggaaccugcgggagaugcucgcgcacgccgaggagacgcgcaagcugaugcccgucugcguggagaccaaggccaucguguccaccauccagcggaaguacaagggcaucaagauccaggagggggucguggacuacggcgcccgcuucuacuucuacaccagcaagacgaccguggccucccugaucaacacccucaacgaccugaacgagacccuggucacgaugccgcucggguacgugacccacggccugaaccuggaggaggcggcccgguacaugcgcagccucaaggugcccgccaccgucuccgugagcucccccgacgccgugaccgccuacaacggguaccugacgagcuccagcaagacccccgaggagcacuucaucgagaccaucucccuggcgggcagcuacaaggacuggagcuacuccggccagagcacccagcucgggaucgaguuccugaagcggggcgacaaguccgucuacuacacgagcaacccgaccaccuuccaccuggacggggaggugaucaccuucgacaaccucaagacgcugcugucccuccgcgaggugcggaccaucaaggucuucaccaccguggacaacaucaaccugcacacccagguggucgacaugagcaugaccuacggccagcaguucggccccaccuaccuggacggggccgacgugaccaagaucaagccccacaacucccacgagggcaagacguucuacgugcucccgaacgacgacacccugcgcgucgaggccuucgaguacuaccacaccaccgaccccagcuuccuggggcgguacauguccgcccucaaccacacgaagaaguggaaguacccccaggugaacggccugaccagcaucaagugggccgacaacaacugcuaccuggcgaccgcccuccugacccugcagcagaucgagcucaaguucaacccgcccgcccugcaggacgccuacuaccgcgcgcgggccggggaggccgccaacuucugcgcccugauccucgcguacugcaacaagacggugggcgagcugggcgacguccgcgagaccauguccuaccuguuccagcacgccaaccucgacagcugcaagcgggugcugaacgucgugugcaagaccugcgggcagcagcagaccacccugaagggcguggaggccgucauguacauggggacgcucuccuacgagcaguucaagaagggcgugcagauccccugcacgugcgggaagcaggccaccaaguaccuggugcagcaggagagccccuucgucaugauguccgcgcccccggcccaguacgagcugaagcacggcaccuucacgugcgccagcgaguacaccggcaacuaccagugcgggcacuacaagcacaucaccuccaaggagacccucuacugcaucgacggcgcccugcugaccaagagcagcgaguacaaggggcccaucaccgacguguucuacaaggagaacuccuacaccaccacgaucaagcccgugaccuacaagcucgacggcgucgugugcaccgagaucgaccccaagcuggacaacuacuacaagaaggacaacagcuacuucaccgagcagccgaucgaccuggugcccaaccagcccuaccccaacgccuccuucgacaacuucaaguucgucugcgacaacaucaaguucgccgacgaccucaaccagcugacgggguacaagaagccggcgagccgcgagcugaaggugaccuucuuccccgaccucaacggcgacguggucgccaucgacuacaagcacuacacccccuccuucaagaagggcgccaagcugcugcacaagcccaucguguggcacgugaacaacgccaccaacaaggcgacguacaagccgaacaccuggugcauccggugccucuggagcaccaagcccgucgagaccuccaacagcuucgacgugcugaaguccgaggacgcccaggggauggacaaccuggccugcgaggaccucaagcccgugagcgaggaggucguggagaaccccacgauccagaaggacgugcuggagugcaacgucaagaccaccgagguggugggcgacaucauccugaagccggccaacaacucccucaagaucaccgaggaggucgggcacacggaccugauggccgcguacguggacaacagcucccugaccaucaagaagcccaacgagcucagccgcgugcugggccugaagacccucgccacccacgggcuggccgccgucaacuccgugcccugggacacgaucgccaacuacgcgaagccguuccugaacaagguggucagcaccaccaccaacaucgugacgcgcugccucaaccgggugugcaccaacuacaugcccuacuucuucacccugcugcuccagcugugcaccuucacgcgcuccaccaacagccggaucaaggccuccaugcccaccaccaucgccaagaacaccgucaagagcgugggcaaguucugccuggaggccagcuucaacuaccucaagucccccaacuucagcaagcugaucaacaucaucaucugguuccugcuccuguccgugugccugggcagccucaucuacuccacggccgcgcuggggguccugaugagcaaccucggcaugccguccuacugcaccggguaccgcgagggcuaccugaacagcaccaacgugaccaucgccacguacugcaccggcuccauccccugcagcgugugccuguccgggcucgacagccuggacaccuaccccucccuggagaccauccagaucacgaucagcuccuucaagugggaccucaccgccuucggccuggucgccgagugguuccuggccuacauccucuucacccgguucuucuacgugcuggggcugguggccaucaugcagcuguucuucagcuacuucgccgugcacuucaucuccaacagcuggcucauguggcugaucaucaaccugguccagauggcccccaucuccgcgauggugcgcauguacaucuucuucgccagcuucuacuacguguggaaguccuacguccacgugguggacggcugcaacagcagcacgugcaugaugugcuacaagcggaaccgcgccacgcgggucgagugcaccaccaucgugaacgggguccgccgguccuucuacguguacgccaacggcggcaagggguucugcaagcuccacaacuggaacugcgugaacugcgacaccuucugcgccggcagcacguucaucuccgacgaggucgcgcgcgaccugagccugcaguucaagcggccgaucaaccccaccgaccaguccagcuacaucguggacuccgugaccgucaagaacgggagcauccaccucuacuucgacaaggccggccagaagaccuacgagcgccacucccugagccacuucgugaaccuggacaaccuccgggccaacaacacgaaggggucccugcccaucaacgugaucgucuucgacggcaagagcaagugcgaggaguccagcgccaaguccgccagcguguacuacucccagcugaugugccagcccauccuccugcuggaccaggcgcucgugagcgacgucggcgacagcgccgagguggccgugaagauguucgacgccuacgucaacaccuucuccagcaccuucaacgugccgauggagaagcugaagacccugguggccacggcggaggccgagcucgccaagaacgucucccuggacaacgugcugagcaccuucaucuccgccgcgcgccagggguucguggacagcgacgucgagaucaaggacgugguggagugccucaagcugucccaccagagcgacaucgaggucaccggcgacuccugcaacaacuacaugcugacguacaacaagguggagaacaugacgccccgggaccucggggccugcaucgacugcagcgcccgccacaucaacgcccagguggccaagucccacaacaucgcgcugaucuggaacgucaaggacuucaugagccuguccgagcagcuccggaagcagauccgcagcgccgccaagaagaacaaccugcccuucaagcugaccugcgccaccacccgccagguggugaacgucgugaccaccaagaucgcccucaagggcgggugaggacuagucccuguucccagagcccacuuuuuuuucuuuuuuugaaauaaaauagccugucuuucagaucuaaaaaaaaaaaaaaaaaaaaaaaaaaaaaaaaaaaaaaaaaaaaaaaaaaaaaaaaaaaaaaaaaaaaaaaaaaaaaaaaaaaaaaaaaaaaaaaaaaaa

SEQ ID NO: 28338 - RNA, 6089 nt, Artificial Sequence
  SARS-CoV-2/Wuhan-Hu-1__NC_045512.2/MN908947.2__non-structural protein 3 (NSP3) mRNA gc (1-1946)(A86V_A656V_I1022V_E1847D)
aggagagucccgcagucggcguccagcggcucugcuuguucgugugugugucguugcaggccuuauucaagcuuaccauggcccccaccaaggugaccuucggcgacgacaccgucaucgaggugcagggguacaagagcgugaacaucaccuucgagcuggacgagcgcaucgacaagguccucaacgagaagugcuccgccuacaccguggagcugggcaccgaggugaacgaguucgcgugcgucguggccgacgccgugaucaagacgcugcagccggucagcgagcuccugacgccccuggggaucgaccucgacgagugguccauggugaccuacuaccuguucgacgagagcggcgaguucaagcuggccucccacauguacugcagcuucuacccgcccgacgaggacgaggaggagggggacugcgaggaggaggaguucgagcccuccacccaguacgaguacggcacggaggacgacuaccagggcaagccccucgaguucggggcgaccagcgccgcccugcagcccgaggaggagcaggaggaggacuggcuggacgacgacucccagcagaccgugggccagcaggacgggagcgaggacaaccagaccacgaccauccagaccaucguggagguccagccccagcucgagauggagcugaccccgguggugcagacgaucgaggucaacuccuucagcggcuaccugaagcucaccgacaacguguacaucaagaacgccgacaucguggaggaggcgaagaaggucaagcccaccgugguggucaacgccgccaacguguaccugaagcacgggggcggcguggccggggcccugaacaaggcgaccaacaacgccaugcaggucgaguccgacgacuacaucgccacgaacggcccccucaaggucgggggcagcugcgugcuguccggccacaaccuggccaagcacugccuccacgugguggggcccaacgucaacaagggcgaggacauccagcugcucaagagcgccuacgagaacuucaaccagcacgaggugcugcuggcgccgcugcucuccgccgggaucuucggcgccgaccccauccacagccugcgggugugcgucgacaccgugcgcaccaacguguaccuggccgucuucgacaagaaccucuacgacaagcugguguccagcuuccuggagaugaaguccgagaagcaggucgagcagaagaucgccgagauccccaaggaggaggugaagcccuucaucaccgagagcaagccgagcguggagcagcggaagcaggacgacaagaagaucaaggcgugcguggaggaggucacgaccacccucgaggagaccaaguuccugacggagaaccugcuccuguacaucgacaucaacgggaaccugcaccccgacuccgccacccucgugagcgacaucgacaucaccuuccugaagaaggacgcccccuacaucgugggcgacgucgugcaggagggcgugcugaccgccgucgugauccccacgaagaaggccgggggcaccaccgagaugcucgcgaaggcccugcgcaaggugccgaccgacaacuacaucacgaccuaccccgggcagggccugaacggguacaccgucgaggaggccaagaccgugcucaagaagugcaaguccgccuucuacauccugcccagcaucaucuccaacgagaagcaggagauccugggcaccgugagcuggaaccugcgggagaugcucgcgcacgccgaggagacgcgcaagcugaugcccgucugcguggagaccaaggccaucguguccaccauccagcggaaguacaagggcaucaagauccaggagggggucguggacuacggcgcccgcuucuacuucuacaccagcaagacgaccguggccucccugaucaacacccucaacgaccugaacgagacccuggucacgaugccgcucggguacgugacccacggccugaaccuggaggaggcggcccgguacaugcgcagccucaaggugcccgugaccgucuccgugagcucccccgacgccgugaccgccuacaacggguaccugacgagcuccagcaagacccccgaggagcacuucaucgagaccaucucccuggcgggcagcuacaaggacuggagcuacuccggccagagcacccagcucgggaucgaguuccugaagcggggcgacaaguccgucuacuacacgagcaacccgaccaccuuccaccuggacggggaggugaucaccuucgacaaccucaagacgcugcugucccuccgcgaggugcggaccaucaaggucuucaccaccguggacaacaucaaccugcacacccagguggucgacaugagcaugaccuacggccagcaguucggccccaccuaccuggacggggccgacgugaccaagaucaagccccacaacucccacgagggcaagacguucuacgugcucccgaacgacgacacccugcgcgucgaggccuucgaguacuaccacaccaccgaccccagcuuccuggggcgguacauguccgcccucaaccacacgaagaaguggaaguacccccaggugaacggccugaccagcaucaagugggccgacaacaacugcuaccuggcgaccgcccuccugacccugcagcagaucgagcucaaguucaacccgcccgcccugcaggacgccuacuaccgcgcgcgggccggggaggccgccaacuucugcgcccugauccucgcguacugcaacaagacggugggcgagcugggcgacguccgcgagaccauguccuaccuguuccagcacgccaaccucgacagcugcaagcgggugcugaacgucgugugcaagaccugcgggcagcagcagaccacccugaagggcguggaggccgucauguacauggggacgcucuccuacgagcaguucaagaagggcgugcagauccccugcacgugcgggaagcaggccaccaaguaccuggugcagcaggagagccccuucgucaugauguccgcgcccccggcccaguacgagcugaagcacggcaccuucacgugcgccagcgaguacaccggcaacuaccagugcgggcacuacaagcacgugaccuccaaggagacccucuacugcaucgacggcgcccugcugaccaagagcagcgaguacaaggggcccaucaccgacguguucuacaaggagaacuccuacaccaccacgaucaagcccgugaccuacaagcucgacggcgucgugugcaccgagaucgaccccaagcuggacaacuacuacaagaaggacaacagcuacuucaccgagcagccgaucgaccuggugcccaaccagcccuaccccaacgccuccuucgacaacuucaaguucgucugcgacaacaucaaguucgccgacgaccucaaccagcugacgggguacaagaagccggcgagccgcgagcugaaggugaccuucuuccccgaccucaacggcgacguggucgccaucgacuacaagcacuacacccccuccuucaagaagggcgccaagcugcugcacaagcccaucguguggcacgugaacaacgccaccaacaaggcgacguacaagccgaacaccuggugcauccggugccucuggagcaccaagcccgucgagaccuccaacagcuucgacgugcugaaguccgaggacgcccaggggauggacaaccuggccugcgaggaccucaagcccgugagcgaggaggucguggagaaccccacgauccagaaggacgugcuggagugcaacgucaagaccaccgagguggugggcgacaucauccugaagccggccaacaacucccucaagaucaccgaggaggucgggcacacggaccugauggccgcguacguggacaacagcucccugaccaucaagaagcccaacgagcucagccgcgugcugggccugaagacccucgccacccacgggcuggccgccgucaacuccgugcccugggacacgaucgccaacuacgcgaagccguuccugaacaagguggucagcaccaccaccaacaucgugacgcgcugccucaaccgggugugcaccaacuacaugcccuacuucuucacccugcugcuccagcugugcaccuucacgcgcuccaccaacagccggaucaaggccuccaugcccaccaccaucgccaagaacaccgucaagagcgugggcaaguucugccuggaggccagcuucaacuaccucaagucccccaacuucagcaagcugaucaacaucaucaucugguuccugcuccuguccgugugccugggcagccucaucuacuccacggccgcgcuggggguccugaugagcaaccucggcaugccguccuacugcaccggguaccgcgagggcuaccugaacagcaccaacgugaccaucgccacguacugcaccggcuccauccccugcagcgugugccuguccgggcucgacagccuggacaccuaccccucccuggagaccauccagaucacgaucagcuccuucaagugggaccucaccgccuucggccuggucgccgagugguuccuggccuacauccucuucacccgguucuucuacgugcuggggcuggcggccaucaugcagcuguucuucagcuacuucgccgugcacuucaucuccaacagcuggcucauguggcugaucaucaaccugguccagauggcccccaucuccgcgauggugcgcauguacaucuucuucgccagcuucuacuacguguggaaguccuacguccacgugguggacggcugcaacagcagcacgugcaugaugugcuacaagcggaaccgcgccacgcgggucgagugcaccaccaucgugaacgggguccgccgguccuucuacguguacgccaacggcggcaagggguucugcaagcuccacaacuggaacugcgugaacugcgacaccuucugcgccggcagcacguucaucuccgacgaggucgcgcgcgaccugagccugcaguucaagcggccgaucaaccccaccgaccaguccagcuacaucguggacuccgugaccgucaagaacgggagcauccaccucuacuucgacaaggccggccagaagaccuacgagcgccacucccugagccacuucgugaaccuggacaaccuccgggccaacaacacgaaggggucccugcccaucaacgugaucgucuucgacggcaagagcaagugcgaggaguccagcgccaaguccgccagcguguacuacucccagcugaugugccagcccauccuccugcuggaccaggcgcucgugagcgacgucggcgacagcgccgagguggccgugaagauguucgacgccuacgucaacaccuucuccagcaccuucaacgugccgauggagaagcugaagacccugguggccacggcggaggccgagcucgccaagaacgucucccuggacaacgugcugagcaccuucaucuccgccgcgcgccagggguucguggacagcgacgucgagaccaaggacgugguggagugccucaagcugucccaccagagcgacaucgacgucaccggcgacuccugcaacaacuacaugcugacguacaacaagguggagaacaugacgccccgggaccucggggccugcaucgacugcagcgcccgccacaucaacgcccagguggccaagucccacaacaucgcgcugaucuggaacgucaaggacuucaugagccuguccgagcagcuccggaagcagauccgcagcgccgccaagaagaacaaccugcccuucaagcugaccugcgccaccacccgccagguggugaacgucgugaccaccaagaucgcccucaagggcgggugaggacuagucccuguucccagagcccacuuuuuuuucuuuuuuugaaauaaaauagccugucuuucagaucuaaaaaaaaaaaaaaaaaaaaaaaaaaaaaaaaaaaaaaaaaaaaaaaaaaaaaaaaaaaaaaaaaaaaaaaaaaaaaaaaaaaaaaaaaaaaaaaaaaaa

SEQ ID NO: 28339 - RNA, 6089 nt, Artificial Sequence
  SARS-CoV-2/Wuhan-Hu-1__NC_045512.2/MN908947.2__non-structural protein 3 (NSP3) mRNA gc (1-1946)(D136N_E379V_K1694N)
aggagagucccgcagucggcguccagcggcucugcuuguucgugugugugucguugcaggccuuauucaagcuuaccauggcccccaccaaggugaccuucggcgacgacaccgucaucgaggugcagggguacaagagcgugaacaucaccuucgagcuggacgagcgcaucgacaagguccucaacgagaagugcuccgccuacaccguggagcugggcaccgaggugaacgaguucgcgugcgucguggccgacgccgugaucaagacgcugcagccggucagcgagcuccugacgccccuggggaucgaccucgacgagugguccauggccaccuacuaccuguucgacgagagcggcgaguucaagcuggccucccacauguacugcagcuucuacccgcccgacgaggacgaggaggagggggacugcgaggaggaggaguucgagcccuccacccaguacgaguacggcacggagaacgacuaccagggcaagccccucgaguucggggcgaccagcgccgcccugcagcccgaggaggagcaggaggaggacuggcuggacgacgacucccagcagaccgugggccagcaggacgggagcgaggacaaccagaccacgaccauccagaccaucguggagguccagccccagcucgagauggagcugaccccgguggugcagacgaucgaggucaacuccuucagcggcuaccugaagcucaccgacaacguguacaucaagaacgccgacaucguggaggaggcgaagaaggucaagcccaccgugguggucaacgccgccaacguguaccugaagcacgggggcggcguggccggggcccugaacaaggcgaccaacaacgccaugcaggucgaguccgacgacuacaucgccacgaacggcccccucaaggucgggggcagcugcgugcuguccggccacaaccuggccaagcacugccuccacgugguggggcccaacgucaacaagggcgaggacauccagcugcucaagagcgccuacgagaacuucaaccagcacgaggugcugcuggcgccgcugcucuccgccgggaucuucggcgccgaccccauccacagccugcgggugugcgucgacaccgugcgcaccaacguguaccuggccgucuucgacaagaaccucuacgacaagcugguguccagcuuccuggagaugaaguccgugaagcaggucgagcagaagaucgccgagauccccaaggaggaggugaagcccuucaucaccgagagcaagccgagcguggagcagcggaagcaggacgacaagaagaucaaggcgugcguggaggaggucacgaccacccucgaggagaccaaguuccugacggagaaccugcuccuguacaucgacaucaacgggaaccugcaccccgacuccgccacccucgugagcgacaucgacaucaccuuccugaagaaggacgcccccuacaucgugggcgacgucgugcaggagggcgugcugaccgccgucgugauccccacgaagaaggccgggggcaccaccgagaugcucgcgaaggcccugcgcaaggugccgaccgacaacuacaucacgaccuaccccgggcagggccugaacggguacaccgucgaggaggccaagaccgugcucaagaagugcaaguccgccuucuacauccugcccagcaucaucuccaacgagaagcaggagauccugggcaccgugagcuggaaccugcgggagaugcucgcgcacgccgaggagacgcgcaagcugaugcccgucugcguggagaccaaggccaucguguccaccauccagcggaaguacaagggcaucaagauccaggagggggucguggacuacggcgcccgcuucuacuucuacaccagcaagacgaccguggccucccugaucaacacccucaacgaccugaacgagacccuggucacgaugccgcucggguacgugacccacggccugaaccuggaggaggcggcccgguacaugcgcagccucaaggugcccgccaccgucuccgugagcucccccgacgccgugaccgccuacaacggguaccugacgagcuccagcaagacccccgaggagcacuucaucgagaccaucucccuggcgggcagcuacaaggacuggagcuacuccggccagagcacccagcucgggaucgaguuccugaagcggggcgacaaguccgucuacuacacgagcaacccgaccaccuuccaccuggacggggaggugaucaccuucgacaaccucaagacgcugcugucccuccgcgaggugcggaccaucaaggucuucaccaccguggacaacaucaaccugcacacccagguggucgacaugagcaugaccuacggccagcaguucggccccaccuaccuggacggggccgacgugaccaagaucaagccccacaacucccacgagggcaagacguucuacgugcucccgaacgacgacacccugcgcgucgaggccuucgaguacuaccacaccaccgaccccagcuuccuggggcgguacauguccgcccucaaccacacgaagaaguggaaguacccccaggugaacggccugaccagcaucaagugggccgacaacaacugcuaccuggcgaccgcccuccugacccugcagcagaucgagcucaaguucaacccgcccgcccugcaggacgccuacuaccgcgcgcgggccggggaggccgccaacuucugcgcccugauccucgcguacugcaacaagacggugggcgagcugggcgacguccgcgagaccauguccuaccuguuccagcacgccaaccucgacagcugcaagcgggugcugaacgucgugugcaagaccugcgggcagcagcagaccacccugaagggcguggaggccgucauguacauggggacgcucuccuacgagcaguucaagaagggcgugcagauccccugcacgugcgggaagcaggccaccaaguaccuggugcagcaggagagccccuucgucaugauguccgcgcccccggcccaguacgagcugaagcacggcaccuucacgugcgccagcgaguacaccggcaacuaccagugcgggcacuacaagcacaucaccuccaaggagacccucuacugcaucgacggcgcccugcugaccaagagcagcgaguacaaggggcccaucaccgacguguucuacaaggagaacuccuacaccaccacgaucaagcccgugaccuacaagcucgacggcgucgugugcaccgagaucgaccccaagcuggacaacuacuacaagaaggacaacagcuacuucaccgagcagccgaucgaccuggugcccaaccagcccuaccccaacgccuccuucgacaacuucaaguucgucugcgacaacaucaaguucgccgacgaccucaaccagcugacgggguacaagaagccggcgagccgcgagcugaaggugaccuucuuccccgaccucaacggcgacguggucgccaucgacuacaagcacuacacccccuccuucaagaagggcgccaagcugcugcacaagcccaucguguggcacgugaacaacgccaccaacaaggcgacguacaagccgaacaccuggugcauccggugccucuggagcaccaagcccgucgagaccuccaacagcuucgacgugcugaaguccgaggacgcccaggggauggacaaccuggccugcgaggaccucaagcccgugagcgaggaggucguggagaaccccacgauccagaaggacgugcuggagugcaacgucaagaccaccgagguggugggcgacaucauccugaagccggccaacaacucccucaagaucaccgaggaggucgggcacacggaccugauggccgcguacguggacaacagcucccugaccaucaagaagcccaacgagcucagccgcgugcugggccugaagacccucgccacccacgggcuggccgccgucaacuccgugcccugggacacgaucgccaacuacgcgaagccguuccugaacaagguggucagcaccaccaccaacaucgugacgcgcugccucaaccgggugugcaccaacuacaugcccuacuucuucacccugcugcuccagcugugcaccuucacgcgcuccaccaacagccggaucaaggccuccaugcccaccaccaucgccaagaacaccgucaagagcgugggcaaguucugccuggaggccagcuucaacuaccucaagucccccaacuucagcaagcugaucaacaucaucaucugguuccugcuccuguccgugugccugggcagccucaucuacuccacggccgcgcuggggguccugaugagcaaccucggcaugccguccuacugcaccggguaccgcgagggcuaccugaacagcaccaacgugaccaucgccacguacugcaccggcuccauccccugcagcgugugccuguccgggcucgacagccuggacaccuaccccucccuggagaccauccagaucacgaucagcuccuucaagugggaccucaccgccuucggccuggucgccgagugguuccuggccuacauccucuucacccgguucuucuacgugcuggggcuggcggccaucaugcagcuguucuucagcuacuucgccgugcacuucaucuccaacagcuggcucauguggcugaucaucaaccugguccagauggcccccaucuccgcgauggugcgcauguacaucuucuucgccagcuucuacuacguguggaaguccuacguccacgugguggacggcugcaacagcagcacgugcaugaugugcuacaagcggaaccgcgccacgcgggucgagugcaccaccaucgugaacgggguccgccgguccuucuacguguacgccaacggcggcaagggguucugcaagcuccacaacuggaacugcgugaacugcgacaccuucugcgccggcagcacguucaucuccgacgaggucgcgcgcgaccugagccugcaguucaagcggccgaucaaccccaccgaccaguccagcuacaucguggacuccgugaccgucaagaacgggagcauccaccucuacuucgacaaggccggccagaacaccuacgagcgccacucccugagccacuucgugaaccuggacaaccuccgggccaacaacacgaaggggucccugcccaucaacgugaucgucuucgacggcaagagcaagugcgaggaguccagcgccaaguccgccagcguguacuacucccagcugaugugccagcccauccuccugcuggaccaggcgcucgugagcgacgucggcgacagcgccgagguggccgugaagauguucgacgccuacgucaacaccuucuccagcaccuucaacgugccgauggagaagcugaagacccugguggccacggcggaggccgagcucgccaagaacgucucccuggacaacgugcugagcaccuucaucuccgccgcgcgccagggguucguggacagcgacgucgagaccaaggacgugguggagugccucaagcugucccaccagagcgacaucgaggucaccggcgacuccugcaacaacuacaugcugacguacaacaagguggagaacaugacgccccgggaccucggggccugcaucgacugcagcgcccgccacaucaacgcccagguggccaagucccacaacaucgcgcugaucuggaacgucaaggacuucaugagccuguccgagcagcuccggaagcagauccgcagcgccgccaagaagaacaaccugcccuucaagcugaccugcgccaccacccgccagguggugaacgucgugaccaccaagaucgcccucaagggcgggugaggacuagucccuguucccagagcccacuuuuuuuucuuuuuuugaaauaaaauagccugucuuucagaucuaaaaaaaaaaaaaaaaaaaaaaaaaaaaaaaaaaaaaaaaaaaaaaaaaaaaaaaaaaaaaaaaaaaaaaaaaaaaaaaaaaaaaaaaaaaaaaaaaaaa

SEQ ID NO: 28340 - RNA, 6089 nt, Artificial Sequence
  SARS-CoV-2/Wuhan-Hu-1__NC_045512.2/MN908947.2__non-structural protein 3 (NSP3) mRNA gc (1-1946)(A862S_G1129S)
aggagagucccgcagucggcguccagcggcucugcuuguucgugugugugucguugcaggccuuauucaagcuuaccauggcccccaccaaggugaccuucggcgacgacaccgucaucgaggugcagggguacaagagcgugaacaucaccuucgagcuggacgagcgcaucgacaagguccucaacgagaagugcuccgccuacaccguggagcugggcaccgaggugaacgaguucgcgugcgucguggccgacgccgugaucaagacgcugcagccggucagcgagcuccugacgccccuggggaucgaccucgacgagugguccauggccaccuacuaccuguucgacgagagcggcgaguucaagcuggccucccacauguacugcagcuucuacccgcccgacgaggacgaggaggagggggacugcgaggaggaggaguucgagcccuccacccaguacgaguacggcacggaggacgacuaccagggcaagccccucgaguucggggcgaccagcgccgcccugcagcccgaggaggagcaggaggaggacuggcuggacgacgacucccagcagaccgugggccagcaggacgggagcgaggacaaccagaccacgaccauccagaccaucguggagguccagccccagcucgagauggagcugaccccgguggugcagacgaucgaggucaacuccuucagcggcuaccugaagcucaccgacaacguguacaucaagaacgccgacaucguggaggaggcgaagaaggucaagcccaccgugguggucaacgccgccaacguguaccugaagcacgggggcggcguggccggggcccugaacaaggcgaccaacaacgccaugcaggucgaguccgacgacuacaucgccacgaacggcccccucaaggucgggggcagcugcgugcuguccggccacaaccuggccaagcacugccuccacgugguggggcccaacgucaacaagggcgaggacauccagcugcucaagagcgccuacgagaacuucaaccagcacgaggugcugcuggcgccgcugcucuccgccgggaucuucggcgccgaccccauccacagccugcgggugugcgucgacaccgugcgcaccaacguguaccuggccgucuucgacaagaaccucuacgacaagcugguguccagcuuccuggagaugaaguccgagaagcaggucgagcagaagaucgccgagauccccaaggaggaggugaagcccuucaucaccgagagcaagccgagcguggagcagcggaagcaggacgacaagaagaucaaggcgugcguggaggaggucacgaccacccucgaggagaccaaguuccugacggagaaccugcuccuguacaucgacaucaacgggaaccugcaccccgacuccgccacccucgugagcgacaucgacaucaccuuccugaagaaggacgcccccuacaucgugggcgacgucgugcaggagggcgugcugaccgccgucgugauccccacgaagaaggccgggggcaccaccgagaugcucgcgaaggcccugcgcaaggugccgaccgacaacuacaucacgaccuaccccgggcagggccugaacggguacaccgucgaggaggccaagaccgugcucaagaagugcaaguccgccuucuacauccugcccagcaucaucuccaacgagaagcaggagauccugggcaccgugagcuggaaccugcgggagaugcucgcgcacgccgaggagacgcgcaagcugaugcccgucugcguggagaccaaggccaucguguccaccauccagcggaaguacaagggcaucaagauccaggagggggucguggacuacggcgcccgcuucuacuucuacaccagcaagacgaccguggccucccugaucaacacccucaacgaccugaacgagacccuggucacgaugccgcucggguacgugacccacggccugaaccuggaggaggcggcccgguacaugcgcagccucaaggugcccgccaccgucuccgugagcucccccgacgccgugaccgccuacaacggguaccugacgagcuccagcaagacccccgaggagcacuucaucgagaccaucucccuggcgggcagcuacaaggacuggagcuacuccggccagagcacccagcucgggaucgaguuccugaagcggggcgacaaguccgucuacuacacgagcaacccgaccaccuuccaccuggacggggaggugaucaccuucgacaaccucaagacgcugcugucccuccgcgaggugcggaccaucaaggucuucaccaccguggacaacaucaaccugcacacccagguggucgacaugagcaugaccuacggccagcaguucggccccaccuaccuggacggggccgacgugaccaagaucaagccccacaacucccacgagggcaagacguucuacgugcucccgaacgacgacacccugcgcgucgaggccuucgaguacuaccacaccaccgaccccagcuuccuggggcgguacauguccgcccucaaccacacgaagaaguggaaguacccccaggugaacggccugaccagcaucaagugggccgacaacaacugcuaccuggcgaccagccuccugacccugcagcagaucgagcucaaguucaacccgcccgcccugcaggacgccuacuaccgcgcgcgggccggggaggccgccaacuucugcgcccugauccucgcguacugcaacaagacggugggcgagcugggcgacguccgcgagaccauguccuaccuguuccagcacgccaaccucgacagcugcaagcgggugcugaacgucgugugcaagaccugcgggcagcagcagaccacccugaagggcguggaggccgucauguacauggggacgcucuccuacgagcaguucaagaagggcgugcagauccccugcacgugcgggaagcaggccaccaaguaccuggugcagcaggagagccccuucgucaugauguccgcgcccccggcccaguacgagcugaagcacggcaccuucacgugcgccagcgaguacaccggcaacuaccagugcgggcacuacaagcacaucaccuccaaggagacccucuacugcaucgacggcgcccugcugaccaagagcagcgaguacaaggggcccaucaccgacguguucuacaaggagaacuccuacaccaccacgaucaagcccgugaccuacaagcucgacggcgucgugugcaccgagaucgaccccaagcuggacaacuacuacaagaaggacaacagcuacuucaccgagcagccgaucgaccuggugcccaaccagcccuaccccaacgccuccuucgacaacuucaaguucgucugcgacaacaucaaguucgccgacgaccucaaccagcugacgagcuacaagaagccggcgagccgcgagcugaaggugaccuucuuccccgaccucaacggcgacguggucgccaucgacuacaagcacuacacccccuccuucaagaagggcgccaagcugcugcacaagcccaucguguggcacgugaacaacgccaccaacaaggcgacguacaagccgaacaccuggugcauccggugccucuggagcaccaagcccgucgagaccuccaacagcuucgacgugcugaaguccgaggacgcccaggggauggacaaccuggccugcgaggaccucaagcccgugagcgaggaggucguggagaaccccacgauccagaaggacgugcuggagugcaacgucaagaccaccgagguggugggcgacaucauccugaagccggccaacaacucccucaagaucaccgaggaggucgggcacacggaccugauggccgcguacguggacaacagcucccugaccaucaagaagcccaacgagcucagccgcgugcugggccugaagacccucgccacccacgggcuggccgccgucaacuccgugcccugggacacgaucgccaacuacgcgaagccguuccugaacaagguggucagcaccaccaccaacaucgugacgcgcugccucaaccgggugugcaccaacuacaugcccuacuucuucacccugcugcuccagcugugcaccuucacgcgcuccaccaacagccggaucaaggccuccaugcccaccaccaucgccaagaacaccgucaagagcgugggcaaguucugccuggaggccagcuucaacuaccucaagucccccaacuucagcaagcugaucaacaucaucaucugguuccugcuccuguccgugugccugggcagccucaucuacuccacggccgcgcuggggguccugaugagcaaccucggcaugccguccuacugcaccggguaccgcgagggcuaccugaacagcaccaacgugaccaucgccacguacugcaccggcuccauccccugcagcgugugccuguccgggcucgacagccuggacaccuaccccucccuggagaccauccagaucacgaucagcuccuucaagugggaccucaccgccuucggccuggucgccgagugguuccuggccuacauccucuucacccgguucuucuacgugcuggggcuggcggccaucaugcagcuguucuucagcuacuucgccgugcacuucaucuccaacagcuggcucauguggcugaucaucaaccugguccagauggcccccaucuccgcgauggugcgcauguacaucuucuucgccagcuucuacuacguguggaaguccuacguccacgugguggacggcugcaacagcagcacgugcaugaugugcuacaagcggaaccgcgccacgcgggucgagugcaccaccaucgugaacgggguccgccgguccuucuacguguacgccaacggcggcaagggguucugcaagcuccacaacuggaacugcgugaacugcgacaccuucugcgccggcagcacguucaucuccgacgaggucgcgcgcgaccugagccugcaguucaagcggccgaucaaccccaccgaccaguccagcuacaucguggacuccgugaccgucaagaacgggagcauccaccucuacuucgacaaggccggccagaagaccuacgagcgccacucccugagccacuucgugaaccuggacaaccuccgggccaacaacacgaaggggucccugcccaucaacgugaucgucuucgacggcaagagcaagugcgaggaguccagcgccaaguccgccagcguguacuacucccagcugaugugccagcccauccuccugcuggaccaggcgcucgugagcgacgucggcgacagcgccgagguggccgugaagauguucgacgccuacgucaacaccuucuccagcaccuucaacgugccgauggagaagcugaagacccugguggccacggcggaggccgagcucgccaagaacgucucccuggacaacgugcugagcaccuucaucuccgccgcgcgccagggguucguggacagcgacgucgagaccaaggacgugguggagugccucaagcugucccaccagagcgacaucgaggucaccggcgacuccugcaacaacuacaugcugacguacaacaagguggagaacaugacgccccgggaccucggggccugcaucgacugcagcgcccgccacaucaacgcccagguggccaagucccacaacaucgcgcugaucuggaacgucaaggacuucaugagccuguccgagcagcuccggaagcagauccgcagcgccgccaagaagaacaaccugcccuucaagcugaccugcgccaccacccgccagguggugaacgucgugaccaccaagaucgcccucaagggcgggugaggacuagucccuguucccagagcccacuuuuuuuucuuuuuuugaaauaaaauagccugucuuucagaucuaaaaaaaaaaaaaaaaaaaaaaaaaaaaaaaaaaaaaaaaaaaaaaaaaaaaaaaaaaaaaaaaaaaaaaaaaaaaaaaaaaaaaaaaaaaaaaaaaaaa

SEQ ID NO: 28341 - RNA, 6089 nt, Artificial Sequence
  SARS-CoV-2/Wuhan-Hu-1__NC_045512.2/MN908947.2__non-structural protein 3 (NSP3) mRNA gc (1-1946)(T1190I_K1772R)
aggagagucccgcagucggcguccagcggcucugcuuguucgugugugugucguugcaggccuuauucaagcuuaccauggcccccaccaaggugaccuucggcgacgacaccgucaucgaggugcagggguacaagagcgugaacaucaccuucgagcuggacgagcgcaucgacaagguccucaacgagaagugcuccgccuacaccguggagcugggcaccgaggugaacgaguucgcgugcgucguggccgacgccgugaucaagacgcugcagccggucagcgagcuccugacgccccuggggaucgaccucgacgagugguccauggccaccuacuaccuguucgacgagagcggcgaguucaagcuggccucccacauguacugcagcuucuacccgcccgacgaggacgaggaggagggggacugcgaggaggaggaguucgagcccuccacccaguacgaguacggcacggaggacgacuaccagggcaagccccucgaguucggggcgaccagcgccgcccugcagcccgaggaggagcaggaggaggacuggcuggacgacgacucccagcagaccgugggccagcaggacgggagcgaggacaaccagaccacgaccauccagaccaucguggagguccagccccagcucgagauggagcugaccccgguggugcagacgaucgaggucaacuccuucagcggcuaccugaagcucaccgacaacguguacaucaagaacgccgacaucguggaggaggcgaagaaggucaagcccaccgugguggucaacgccgccaacguguaccugaagcacgggggcggcguggccggggcccugaacaaggcgaccaacaacgccaugcaggucgaguccgacgacuacaucgccacgaacggcccccucaaggucgggggcagcugcgugcuguccggccacaaccuggccaagcacugccuccacgugguggggcccaacgucaacaagggcgaggacauccagcugcucaagagcgccuacgagaacuucaaccagcacgaggugcugcuggcgccgcugcucuccgccgggaucuucggcgccgaccccauccacagccugcgggugugcgucgacaccgugcgcaccaacguguaccuggccgucuucgacaagaaccucuacgacaagcugguguccagcuuccuggagaugaaguccgagaagcaggucgagcagaagaucgccgagauccccaaggaggaggugaagcccuucaucaccgagagcaagccgagcguggagcagcggaagcaggacgacaagaagaucaaggcgugcguggaggaggucacgaccacccucgaggagaccaaguuccugacggagaaccugcuccuguacaucgacaucaacgggaaccugcaccccgacuccgccacccucgugagcgacaucgacaucaccuuccugaagaaggacgcccccuacaucgugggcgacgucgugcaggagggcgugcugaccgccgucgugauccccacgaagaaggccgggggcaccaccgagaugcucgcgaaggcccugcgcaaggugccgaccgacaacuacaucacgaccuaccccgggcagggccugaacggguacaccgucgaggaggccaagaccgugcucaagaagugcaaguccgccuucuacauccugcccagcaucaucuccaacgagaagcaggagauccugggcaccgugagcuggaaccugcgggagaugcucgcgcacgccgaggagacgcgcaagcugaugcccgucugcguggagaccaaggccaucguguccaccauccagcggaaguacaagggcaucaagauccaggagggggucguggacuacggcgcccgcuucuacuucuacaccagcaagacgaccguggccucccugaucaacacccucaacgaccugaacgagacccuggucacgaugccgcucggguacgugacccacggccugaaccuggaggaggcggcccgguacaugcgcagccucaaggugcccgccaccgucuccgugagcucccccgacgccgugaccgccuacaacggguaccugacgagcuccagcaagacccccgaggagcacuucaucgagaccaucucccuggcgggcagcuacaaggacuggagcuacuccggccagagcacccagcucgggaucgaguuccugaagcggggcgacaaguccgucuacuacacgagcaacccgaccaccuuccaccuggacggggaggugaucaccuucgacaaccucaagacgcugcugucccuccgcgaggugcggaccaucaaggucuucaccaccguggacaacaucaaccugcacacccagguggucgacaugagcaugaccuacggccagcaguucggccccaccuaccuggacggggccgacgugaccaagaucaagccccacaacucccacgagggcaagacguucuacgugcucccgaacgacgacacccugcgcgucgaggccuucgaguacuaccacaccaccgaccccagcuuccuggggcgguacauguccgcccucaaccacacgaagaaguggaaguacccccaggugaacggccugaccagcaucaagugggccgacaacaacugcuaccuggcgaccgcccuccugacccugcagcagaucgagcucaaguucaacccgcccgcccugcaggacgccuacuaccgcgcgcgggccggggaggccgccaacuucugcgcccugauccucgcguacugcaacaagacggugggcgagcugggcgacguccgcgagaccauguccuaccuguuccagcacgccaaccucgacagcugcaagcgggugcugaacgucgugugcaagaccugcgggcagcagcagaccacccugaagggcguggaggccgucauguacauggggacgcucuccuacgagcaguucaagaagggcgugcagauccccugcacgugcgggaagcaggccaccaaguaccuggugcagcaggagagccccuucgucaugauguccgcgcccccggcccaguacgagcugaagcacggcaccuucacgugcgccagcgaguacaccggcaacuaccagugcgggcacuacaagcacaucaccuccaaggagacccucuacugcaucgacggcgcccugcugaccaagagcagcgaguacaaggggcccaucaccgacguguucuacaaggagaacuccuacaccaccacgaucaagcccgugaccuacaagcucgacggcgucgugugcaccgagaucgaccccaagcuggacaacuacuacaagaaggacaacagcuacuucaccgagcagccgaucgaccuggugcccaaccagcccuaccccaacgccuccuucgacaacuucaaguucgucugcgacaacaucaaguucgccgacgaccucaaccagcugacgggguacaagaagccggcgagccgcgagcugaaggugaccuucuuccccgaccucaacggcgacguggucgccaucgacuacaagcacuacacccccuccuucaagaagggcgccaagcugcugcacaagcccaucguguggcacgugaacaacgccaccaacaaggcgacguacaagccgaacaucuggugcauccggugccucuggagcaccaagcccgucgagaccuccaacagcuucgacgugcugaaguccgaggacgcccaggggauggacaaccuggccugcgaggaccucaagcccgugagcgaggaggucguggagaaccccacgauccagaaggacgugcuggagugcaacgucaagaccaccgagguggugggcgacaucauccugaagccggccaacaacucccucaagaucaccgaggaggucgggcacacggaccugauggccgcguacguggacaacagcucccugaccaucaagaagcccaacgagcucagccgcgugcugggccugaagacccucgccacccacgggcuggccgccgucaacuccgugcccugggacacgaucgccaacuacgcgaagccguuccugaacaagguggucagcaccaccaccaacaucgugacgcgcugccucaaccgggugugcaccaacuacaugcccuacuucuucacccugcugcuccagcugugcaccuucacgcgcuccaccaacagccggaucaaggccuccaugcccaccaccaucgccaagaacaccgucaagagcgugggcaaguucugccuggaggccagcuucaacuaccucaagucccccaacuucagcaagcugaucaacaucaucaucugguuccugcuccuguccgugugccugggcagccucaucuacuccacggccgcgcuggggguccugaugagcaaccucggcaugccguccuacugcaccggguaccgcgagggcuaccugaacagcaccaacgugaccaucgccacguacugcaccggcuccauccccugcagcgugugccuguccgggcucgacagccuggacaccuaccccucccuggagaccauccagaucacgaucagcuccuucaagugggaccucaccgccuucggccuggucgccgagugguuccuggccuacauccucuucacccgguucuucuacgugcuggggcuggcggccaucaugcagcuguucuucagcuacuucgccgugcacuucaucuccaacagcuggcucauguggcugaucaucaaccugguccagauggcccccaucuccgcgauggugcgcauguacaucuucuucgccagcuucuacuacguguggaaguccuacguccacgugguggacggcugcaacagcagcacgugcaugaugugcuacaagcggaaccgcgccacgcgggucgagugcaccaccaucgugaacgggguccgccgguccuucuacguguacgccaacggcggcaagggguucugcaagcuccacaacuggaacugcgugaacugcgacaccuucugcgccggcagcacguucaucuccgacgaggucgcgcgcgaccugagccugcaguucaagcggccgaucaaccccaccgaccaguccagcuacaucguggacuccgugaccgucaagaacgggagcauccaccucuacuucgacaaggccggccagaagaccuacgagcgccacucccugagccacuucgugaaccuggacaaccuccgggccaacaacacgaaggggucccugcccaucaacgugaucgucuucgacggcaagagcaagugcgaggaguccagcgccaaguccgccagcguguacuacucccagcugaugugccagcccauccuccugcuggaccaggcgcucgugagcgacgucggcgacagcgccgagguggccgugcgcauguucgacgccuacgucaacaccuucuccagcaccuucaacgugccgauggagaagcugaagacccugguggccacggcggaggccgagcucgccaagaacgucucccuggacaacgugcugagcaccuucaucuccgccgcgcgccagggguucguggacagcgacgucgagaccaaggacgugguggagugccucaagcugucccaccagagcgacaucgaggucaccggcgacuccugcaacaacuacaugcugacguacaacaagguggagaacaugacgccccgggaccucggggccugcaucgacugcagcgcccgccacaucaacgcccagguggccaagucccacaacaucgcgcugaucuggaacgucaaggacuucaugagccuguccgagcagcuccggaagcagauccgcagcgccgccaagaagaacaaccugcccuucaagcugaccugcgccaccacccgccagguggugaacgucgugaccaccaagaucgcccucaagggcgggugaggacuagucccuguucccagagcccacuuuuuuuucuuuuuuugaaauaaaauagccugucuuucagaucuaaaaaaaaaaaaaaaaaaaaaaaaaaaaaaaaaaaaaaaaaaaaaaaaaaaaaaaaaaaaaaaaaaaaaaaaaaaaaaaaaaaaaaaaaaaaaaaaaaaa

SEQ ID NO: 28342 - RNA, 1754 nt, Artificial Sequence
  SARS-CoV-2/Wuhan-Hu-1__NC_045512.2/MN908947.2/EPI_ISL_402128__non -structural protein 4 (NSP4) mRNA gc (1-501)(V168L_T493I)
aggagagucccgcagucggcguccagcggcucugcuuguucgugugugugucguugcaggccuuauucaagcuuaccaugaagaucgugaacaacuggcugaagcagcucaucaaggucacccugguguuccuguucguggccgccaucuucuaccucaucacccccguccacgugaugagcaagcacacggacuucuccagcgagaucaucggcuacaaggcgaucgacgggggcgugacccgcgacaucgccuccaccgacacgugcuucgccaacaagcacgccgacuucgacaccugguucagccagcggggcggcuccuacaccaacgacaaggccugcccccugaucgcggccgucaucacccgcgaggugggguucgugguccccggccugcccggcaccauccuccggacgaccaacggggacuuccugcacuuccugccccgcguguucagcgccgugggcaacaucugcuacaccccguccaagcucaucgaguacaccgacuucgccacgagcgcgugcguccuggccgccgagugcaccaucuucaaggacgccuccgggaagccccugcccuacugcuacgacaccaacgugcuggagggcagcgucgccuacgagucccuccggcccgacacccgcuacgugcugauggacgggagcaucauccaguucccgaacacguaccuggagggcuccgugcgggucgugaccaccuucgacagcgaguacugccgccacgggaccugcgagcgguccgaggcgggggugugcgucagcacguccggccgcugggugcucaacaacgacuacuaccggagccugcccgggguguucugcggcgucgacgccgugaaccugcucaccaacauguucacgccccugauccagcccaucggcgcccuggacaucuccgccagcaucgucgccgggggcaucguggcgaucguggugaccugccucgccuacuacuucaugcgcuuccggcgcgccuucggggaguacagccacgucguggccuucaacacccugcuguuccucauguccuucaccguccugugccugaccccgguguacagcuuccuccccggcguguacuccgucaucuaccuguaccugaccuucuaccucacgaacgacgugagcuuccuggcccacauccaguggauggugauguucacgccccugguccccuucuggaucaccaucgcguacaucaucugcaucuccaccaagcacuucuacugguucuucagcaacuaccucaagcggcgcgugguguucaacggggucuccuucagcaccuucgaggaggccgcccugugcaccuuccugcucaacaaggagauguaccugaagcugcgguccgacgugcuccugccgcugacccaguacaaccgcuaccucgcccuguacaacaaguacaaguacuucagcggcgccauggacaccacguccuaccgggaggcggccugcugccaccuggccaaggcccucaacgacuucagcaacuccggcagcgacgugcuguaccagccgccccagaucuccaucaccagcgcgguccugcagugaggacuagucccuguucccagagcccacuuuuuuuucuuuuuuugaaauaaaauagccugucuuucagaucuaaaaaaaaaaaaaaaaaaaaaaaaaaaaaaaaaaaaaaaaaaaaaaaaaaaaaaaaaaaaaaaaaaaaaaaaaaaaaaaaaaaaaaaaaaaaaaaaaaaa

SEQ ID NO: 28343 - RNA, 1754 nt, Artificial Sequence
  SARS-CoV-2/Wuhan-Hu-1__NC_045512.2/MN908947.2/EPI_ISL_402128__non -structural protein 4 (NSP4) mRNA gc (1-501)(F18L)
aggagagucccgcagucggcguccagcggcucugcuuguucgugugugugucguugcaggccuuauucaagcuuaccaugaagaucgugaacaacuggcugaagcagcucaucaaggucacccuggugcugcuguucguggccgccaucuucuaccucaucacccccguccacgugaugagcaagcacacggacuucuccagcgagaucaucggcuacaaggcgaucgacgggggcgugacccgcgacaucgccuccaccgacacgugcuucgccaacaagcacgccgacuucgacaccugguucagccagcggggcggcuccuacaccaacgacaaggccugcccccugaucgcggccgucaucacccgcgaggugggguucgugguccccggccugcccggcaccauccuccggacgaccaacggggacuuccugcacuuccugccccgcguguucagcgccgugggcaacaucugcuacaccccguccaagcucaucgaguacaccgacuucgccacgagcgcgugcguccuggccgccgagugcaccaucuucaaggacgccuccgggaagcccgugcccuacugcuacgacaccaacgugcuggagggcagcgucgccuacgagucccuccggcccgacacccgcuacgugcugauggacgggagcaucauccaguucccgaacacguaccuggagggcuccgugcgggucgugaccaccuucgacagcgaguacugccgccacgggaccugcgagcgguccgaggcgggggugugcgucagcacguccggccgcugggugcucaacaacgacuacuaccggagccugcccgggguguucugcggcgucgacgccgugaaccugcucaccaacauguucacgccccugauccagcccaucggcgcccuggacaucuccgccagcaucgucgccgggggcaucguggcgaucguggugaccugccucgccuacuacuucaugcgcuuccggcgcgccuucggggaguacagccacgucguggccuucaacacccugcuguuccucauguccuucaccguccugugccugaccccgguguacagcuuccuccccggcguguacuccgucaucuaccuguaccugaccuucuaccucacgaacgacgugagcuuccuggcccacauccaguggauggugauguucacgccccugguccccuucuggaucaccaucgcguacaucaucugcaucuccaccaagcacuucuacugguucuucagcaacuaccucaagcggcgcgugguguucaacggggucuccuucagcaccuucgaggaggccgcccugugcaccuuccugcucaacaaggagauguaccugaagcugcgguccgacgugcuccugccgcugacccaguacaaccgcuaccucgcccuguacaacaaguacaaguacuucagcggcgccauggacaccacguccuaccgggaggcggccugcugccaccuggccaaggcccucaacgacuucagcaacuccggcagcgacgugcuguaccagccgccccagaccuccaucaccagcgcgguccugcagugaggacuagucccuguucccagagcccacuuuuuuuucuuuuuuugaaauaaaauagccugucuuucagaucuaaaaaaaaaaaaaaaaaaaaaaaaaaaaaaaaaaaaaaaaaaaaaaaaaaaaaaaaaaaaaaaaaaaaaaaaaaaaaaaaaaaaaaaaaaaaaaaaaaaa

SEQ ID NO: 28344 - RNA, 1754 nt, Artificial Sequence
  SARS-CoV-2/Wuhan-Hu-1__NC_045512.2/MN908947.2/EPI_ISL_402128__non -structural protein 4 (NSP4) mRNA gc (1-501)(I24T_G179S_S185N_A447V)
aggagagucccgcagucggcguccagcggcucugcuuguucgugugugugucguugcaggccuuauucaagcuuaccaugaagaucgugaacaacuggcugaagcagcucaucaaggucacccugguguuccuguucguggccgccaccuucuaccucaucacccccguccacgugaugagcaagcacacggacuucuccagcgagaucaucggcuacaaggcgaucgacgggggcgugacccgcgacaucgccuccaccgacacgugcuucgccaacaagcacgccgacuucgacaccugguucagccagcggggcggcuccuacaccaacgacaaggccugcccccugaucgcggccgucaucacccgcgaggugggguucgugguccccggccugcccggcaccauccuccggacgaccaacggggacuuccugcacuuccugccccgcguguucagcgccgugggcaacaucugcuacaccccguccaagcucaucgaguacaccgacuucgccacgagcgcgugcguccuggccgccgagugcaccaucuucaaggacgccuccgggaagcccgugcccuacugcuacgacaccaacgugcuggagagcagcgucgccuacgagaaccuccggcccgacacccgcuacgugcugauggacgggagcaucauccaguucccgaacacguaccuggagggcuccgugcgggucgugaccaccuucgacagcgaguacugccgccacgggaccugcgagcgguccgaggcgggggugugcgucagcacguccggccgcugggugcucaacaacgacuacuaccggagccugcccgggguguucugcggcgucgacgccgugaaccugcucaccaacauguucacgccccugauccagcccaucggcgcccuggacaucuccgccagcaucgucgccgggggcaucguggcgaucguggugaccugccucgccuacuacuucaugcgcuuccggcgcgccuucggggaguacagccacgucguggccuucaacacccugcuguuccucauguccuucaccguccugugccugaccccgguguacagcuuccuccccggcguguacuccgucaucuaccuguaccugaccuucuaccucacgaacgacgugagcuuccuggcccacauccaguggauggugauguucacgccccugguccccuucuggaucaccaucgcguacaucaucugcaucuccaccaagcacuucuacugguucuucagcaacuaccucaagcggcgcgugguguucaacggggucuccuucagcaccuucgaggaggccgcccugugcaccuuccugcucaacaaggagauguaccugaagcugcgguccgacgugcuccugccgcugacccaguacaaccgcuaccucgugcuguacaacaaguacaaguacuucagcggcgccauggacaccacguccuaccgggaggcggccugcugccaccuggccaaggcccucaacgacuucagcaacuccggcagcgacgugcuguaccagccgccccagaccuccaucaccagcgcgguccugcagugaggacuagucccuguucccagagcccacuuuuuuuucuuuuuuugaaauaaaauagccugucuuucagaucuaaaaaaaaaaaaaaaaaaaaaaaaaaaaaaaaaaaaaaaaaaaaaaaaaaaaaaaaaaaaaaaaaaaaaaaaaaaaaaaaaaaaaaaaaaaaaaaaaaaa

SEQ ID NO: 28345 - RNA, 1754 nt, Artificial Sequence
  SARS-CoV-2/Wuhan-Hu-1__NC_045512.2/MN908947.2/EPI_ISL_402128__non -structural protein 4 (NSP4) mRNA gc (1-501)(V168L_A447V_T493I)
aggagagucccgcagucggcguccagcggcucugcuuguucgugugugugucguugcaggccuuauucaagcuuaccaugaagaucgugaacaacuggcugaagcagcucaucaaggucacccugguguuccuguucguggccgccaucuucuaccucaucacccccguccacgugaugagcaagcacacggacuucuccagcgagaucaucggcuacaaggcgaucgacgggggcgugacccgcgacaucgccuccaccgacacgugcuucgccaacaagcacgccgacuucgacaccugguucagccagcggggcggcuccuacaccaacgacaaggccugcccccugaucgcggccgucaucacccgcgaggugggguucgugguccccggccugcccggcaccauccuccggacgaccaacggggacuuccugcacuuccugccccgcguguucagcgccgugggcaacaucugcuacaccccguccaagcucaucgaguacaccgacuucgccacgagcgcgugcguccuggccgccgagugcaccaucuucaaggacgccuccgggaagccccugcccuacugcuacgacaccaacgugcuggagggcagcgucgccuacgagucccuccggcccgacacccgcuacgugcugauggacgggagcaucauccaguucccgaacacguaccuggagggcuccgugcgggucgugaccaccuucgacagcgaguacugccgccacgggaccugcgagcgguccgaggcgggggugugcgucagcacguccggccgcugggugcucaacaacgacuacuaccggagccugcccgggguguucugcggcgucgacgccgugaaccugcucaccaacauguucacgccccugauccagcccaucggcgcccuggacaucuccgccagcaucgucgccgggggcaucguggcgaucguggugaccugccucgccuacuacuucaugcgcuuccggcgcgccuucggggaguacagccacgucguggccuucaacacccugcuguuccucauguccuucaccguccugugccugaccccgguguacagcuuccuccccggcguguacuccgucaucuaccuguaccugaccuucuaccucacgaacgacgugagcuuccuggcccacauccaguggauggugauguucacgccccugguccccuucuggaucaccaucgcguacaucaucugcaucuccaccaagcacuucuacugguucuucagcaacuaccucaagcggcgcgugguguucaacggggucuccuucagcaccuucgaggaggccgcccugugcaccuuccugcucaacaaggagauguaccugaagcugcgguccgacgugcuccugccgcugacccaguacaaccgcuaccucgugcuguacaacaaguacaaguacuucagcggcgccauggacaccacguccuaccgggaggcggccugcugccaccuggccaaggcccucaacgacuucagcaacuccggcagcgacgugcuguaccagccgccccagaucuccaucaccagcgcgguccugcagugaggacuagucccuguucccagagcccacuuuuuuuucuuuuuuugaaauaaaauagccugucuuucagaucuaaaaaaaaaaaaaaaaaaaaaaaaaaaaaaaaaaaaaaaaaaaaaaaaaaaaaaaaaaaaaaaaaaaaaaaaaaaaaaaaaaaaaaaaaaaaaaaaaaaa

SEQ ID NO: 28346 - RNA, 1754 nt, Artificial Sequence
  SARS-CoV-2/Wuhan-Hu-1__NC_045512.2/MN908947.2/EPI_ISL_402128__non -structural protein 4 (NSP4) mRNA gc (1-501)(Y206H_L265F_T296I_A473S)
aggagagucccgcagucggcguccagcggcucugcuuguucgugugugugucguugcaggccuuauucaagcuuaccaugaagaucgugaacaacuggcugaagcagcucaucaaggucacccugguguuccuguucguggccgccaucuucuaccucaucacccccguccacgugaugagcaagcacacggacuucuccagcgagaucaucggcuacaaggcgaucgacgggggcgugacccgcgacaucgccuccaccgacacgugcuucgccaacaagcacgccgacuucgacaccugguucagccagcggggcggcuccuacaccaacgacaaggccugcccccugaucgcggccgucaucacccgcgaggugggguucgugguccccggccugcccggcaccauccuccggacgaccaacggggacuuccugcacuuccugccccgcguguucagcgccgugggcaacaucugcuacaccccguccaagcucaucgaguacaccgacuucgccacgagcgcgugcguccuggccgccgagugcaccaucuucaaggacgccuccgggaagcccgugcccuacugcuacgacaccaacgugcuggagggcagcgucgccuacgagucccuccggcccgacacccgcuacgugcugauggacgggagcaucauccaguucccgaacacgcaccuggagggcuccgugcgggucgugaccaccuucgacagcgaguacugccgccacgggaccugcgagcgguccgaggcgggggugugcgucagcacguccggccgcugggugcucaacaacgacuacuaccggagccugcccgggguguucugcggcgucgacgccgugaaccuguucaccaacauguucacgccccugauccagcccaucggcgcccuggacaucuccgccagcaucgucgccgggggcaucguggcgaucguggugaucugccucgccuacuacuucaugcgcuuccggcgcgccuucggggaguacagccacgucguggccuucaacacccugcuguuccucauguccuucaccguccugugccugaccccgguguacagcuuccuccccggcguguacuccgucaucuaccuguaccugaccuucuaccucacgaacgacgugagcuuccuggcccacauccaguggauggugauguucacgccccugguccccuucuggaucaccaucgcguacaucaucugcaucuccaccaagcacuucuacugguucuucagcaacuaccucaagcggcgcgugguguucaacggggucuccuucagcaccuucgaggaggccgcccugugcaccuuccugcucaacaaggagauguaccugaagcugcgguccgacgugcuccugccgcugacccaguacaaccgcuaccucgcccuguacaacaaguacaaguacuucagcggcgccauggacaccacguccuaccgggaggcggccugcugccaccugagcaaggcccucaacgacuucagcaacuccggcagcgacgugcuguaccagccgccccagaccuccaucaccagcgcgguccugcagugaggacuagucccuguucccagagcccacuuuuuuuucuuuuuuugaaauaaaauagccugucuuucagaucuaaaaaaaaaaaaaaaaaaaaaaaaaaaaaaaaaaaaaaaaaaaaaaaaaaaaaaaaaaaaaaaaaaaaaaaaaaaaaaaaaaaaaaaaaaaaaaaaaaaa

SEQ ID NO: 28347 - RNA, 1754 nt, Artificial Sequence
  SARS-CoV-2/Wuhan-Hu-1__NC_045512.2/MN908947.2/EPI_ISL_402128__non -structural protein 4 (NSP4) mRNA gc (1-501)(T174I_A447V)
aggagagucccgcagucggcguccagcggcucugcuuguucgugugugugucguugcaggccuuauucaagcuuaccaugaagaucgugaacaacuggcugaagcagcucaucaaggucacccugguguuccuguucguggccgccaucuucuaccucaucacccccguccacgugaugagcaagcacacggacuucuccagcgagaucaucggcuacaaggcgaucgacgggggcgugacccgcgacaucgccuccaccgacacgugcuucgccaacaagcacgccgacuucgacaccugguucagccagcggggcggcuccuacaccaacgacaaggccugcccccugaucgcggccgucaucacccgcgaggugggguucgugguccccggccugcccggcaccauccuccggacgaccaacggggacuuccugcacuuccugccccgcguguucagcgccgugggcaacaucugcuacaccccguccaagcucaucgaguacaccgacuucgccacgagcgcgugcguccuggccgccgagugcaccaucuucaaggacgccuccgggaagcccgugcccuacugcuacgacaucaacgugcuggagggcagcgucgccuacgagucccuccggcccgacacccgcuacgugcugauggacgggagcaucauccaguucccgaacacguaccuggagggcuccgugcgggucgugaccaccuucgacagcgaguacugccgccacgggaccugcgagcgguccgaggcgggggugugcgucagcacguccggccgcugggugcucaacaacgacuacuaccggagccugcccgggguguucugcggcgucgacgccgugaaccugcucaccaacauguucacgccccugauccagcccaucggcgcccuggacaucuccgccagcaucgucgccgggggcaucguggcgaucguggugaccugccucgccuacuacuucaugcgcuuccggcgcgccuucggggaguacagccacgucguggccuucaacacccugcuguuccucauguccuucaccguccugugccugaccccgguguacagcuuccuccccggcguguacuccgucaucuaccuguaccugaccuucuaccucacgaacgacgugagcuuccuggcccacauccaguggauggugauguucacgccccugguccccuucuggaucaccaucgcguacaucaucugcaucuccaccaagcacuucuacugguucuucagcaacuaccucaagcggcgcgugguguucaacggggucuccuucagcaccuucgaggaggccgcccugugcaccuuccugcucaacaaggagauguaccugaagcugcgguccgacgugcuccugccgcugacccaguacaaccgcuaccucgugcuguacaacaaguacaaguacuucagcggcgccauggacaccacguccuaccgggaggcggccugcugccaccuggccaaggcccucaacgacuucagcaacuccggcagcgacgugcuguaccagccgccccagaccuccaucaccagcgcgguccugcagugaggacuagucccuguucccagagcccacuuuuuuuucuuuuuuugaaauaaaauagccugucuuucagaucuaaaaaaaaaaaaaaaaaaaaaaaaaaaaaaaaaaaaaaaaaaaaaaaaaaaaaaaaaaaaaaaaaaaaaaaaaaaaaaaaaaaaaaaaaaaaaaaaaaaa

SEQ ID NO: 28348 - RNA, 1754 nt, Artificial Sequence
  SARS-CoV-2/Wuhan-Hu-1__NC_045512.2/MN908947.2/EPI_ISL_402128__non -structural protein 4 (NSP4) mRNA gc (1-501)(T190I_T493I)
aggagagucccgcagucggcguccagcggcucugcuuguucgugugugugucguugcaggccuuauucaagcuuaccaugaagaucgugaacaacuggcugaagcagcucaucaaggucacccugguguuccuguucguggccgccaucuucuaccucaucacccccguccacgugaugagcaagcacacggacuucuccagcgagaucaucggcuacaaggcgaucgacgggggcgugacccgcgacaucgccuccaccgacacgugcuucgccaacaagcacgccgacuucgacaccugguucagccagcggggcggcuccuacaccaacgacaaggccugcccccugaucgcggccgucaucacccgcgaggugggguucgugguccccggccugcccggcaccauccuccggacgaccaacggggacuuccugcacuuccugccccgcguguucagcgccgugggcaacaucugcuacaccccguccaagcucaucgaguacaccgacuucgccacgagcgcgugcguccuggccgccgagugcaccaucuucaaggacgccuccgggaagcccgugcccuacugcuacgacaccaacgugcuggagggcagcgucgccuacgagucccuccggcccgacauccgcuacgugcugauggacgggagcaucauccaguucccgaacacguaccuggagggcuccgugcgggucgugaccaccuucgacagcgaguacugccgccacgggaccugcgagcgguccgaggcgggggugugcgucagcacguccggccgcugggugcucaacaacgacuacuaccggagccugcccgggguguucugcggcgucgacgccgugaaccugcucaccaacauguucacgccccugauccagcccaucggcgcccuggacaucuccgccagcaucgucgccgggggcaucguggcgaucguggugaccugccucgccuacuacuucaugcgcuuccggcgcgccuucggggaguacagccacgucguggccuucaacacccugcuguuccucauguccuucaccguccugugccugaccccgguguacagcuuccuccccggcguguacuccgucaucuaccuguaccugaccuucuaccucacgaacgacgugagcuuccuggcccacauccaguggauggugauguucacgccccugguccccuucuggaucaccaucgcguacaucaucugcaucuccaccaagcacuucuacugguucuucagcaacuaccucaagcggcgcgugguguucaacggggucuccuucagcaccuucgaggaggccgcccugugcaccuuccugcucaacaaggagauguaccugaagcugcgguccgacgugcuccugccgcugacccaguacaaccgcuaccucgcccuguacaacaaguacaaguacuucagcggcgccauggacaccacguccuaccgggaggcggccugcugccaccuggccaaggcccucaacgacuucagcaacuccggcagcgacgugcuguaccagccgccccagaucuccaucaccagcgcgguccugcagugaggacuagucccuguucccagagcccacuuuuuuuucuuuuuuugaaauaaaauagccugucuuucagaucuaaaaaaaaaaaaaaaaaaaaaaaaaaaaaaaaaaaaaaaaaaaaaaaaaaaaaaaaaaaaaaaaaaaaaaaaaaaaaaaaaaaaaaaaaaaaaaaaaaaa

SEQ ID NO: 28349 - RNA, 1754 nt, Artificial Sequence
  SARS-CoV-2/Wuhan-Hu-1__NC_045512.2/MN908947.2/EPI_ISL_402128__non -structural protein 4 (NSP4) mRNA gc (1-501)(D218N_L439P)
aggagagucccgcagucggcguccagcggcucugcuuguucgugugugugucguugcaggccuuauucaagcuuaccaugaagaucgugaacaacuggcugaagcagcucaucaaggucacccugguguuccuguucguggccgccaucuucuaccucaucacccccguccacgugaugagcaagcacacggacuucuccagcgagaucaucggcuacaaggcgaucgacgggggcgugacccgcgacaucgccuccaccgacacgugcuucgccaacaagcacgccgacuucgacaccugguucagccagcggggcggcuccuacaccaacgacaaggccugcccccugaucgcggccgucaucacccgcgaggugggguucgugguccccggccugcccggcaccauccuccggacgaccaacggggacuuccugcacuuccugccccgcguguucagcgccgugggcaacaucugcuacaccccguccaagcucaucgaguacaccgacuucgccacgagcgcgugcguccuggccgccgagugcaccaucuucaaggacgccuccgggaagcccgugcccuacugcuacgacaccaacgugcuggagggcagcgucgccuacgagucccuccggcccgacacccgcuacgugcugauggacgggagcaucauccaguucccgaacacguaccuggagggcuccgugcgggucgugaccaccuucaacagcgaguacugccgccacgggaccugcgagcgguccgaggcgggggugugcgucagcacguccggccgcugggugcucaacaacgacuacuaccggagccugcccgggguguucugcggcgucgacgccgugaaccugcucaccaacauguucacgccccugauccagcccaucggcgcccuggacaucuccgccagcaucgucgccgggggcaucguggcgaucguggugaccugccucgccuacuacuucaugcgcuuccggcgcgccuucggggaguacagccacgucguggccuucaacacccugcuguuccucauguccuucaccguccugugccugaccccgguguacagcuuccuccccggcguguacuccgucaucuaccuguaccugaccuucuaccucacgaacgacgugagcuuccuggcccacauccaguggauggugauguucacgccccugguccccuucuggaucaccaucgcguacaucaucugcaucuccaccaagcacuucuacugguucuucagcaacuaccucaagcggcgcgugguguucaacggggucuccuucagcaccuucgaggaggccgcccugugcaccuuccugcucaacaaggagauguaccugaagcugcgguccgacgugcuccugccgcccacccaguacaaccgcuaccucgcccuguacaacaaguacaaguacuucagcggcgccauggacaccacguccuaccgggaggcggccugcugccaccuggccaaggcccucaacgacuucagcaacuccggcagcgacgugcuguaccagccgccccagaccuccaucaccagcgcgguccugcagugaggacuagucccuguucccagagcccacuuuuuuuucuuuuuuugaaauaaaauagccugucuuucagaucuaaaaaaaaaaaaaaaaaaaaaaaaaaaaaaaaaaaaaaaaaaaaaaaaaaaaaaaaaaaaaaaaaaaaaaaaaaaaaaaaaaaaaaaaaaaaaaaaaaaa

SEQ ID NO: 28350 - RNA, 1754 nt, Artificial Sequence
  SARS-CoV-2/Wuhan-Hu-1__NC_045512.2/MN908947.2/EPI_ISL_402128__non -structural protein 4 (NSP4) mRNA gc (1-501)(D218N_D460N)
aggagagucccgcagucggcguccagcggcucugcuuguucgugugugugucguugcaggccuuauucaagcuuaccaugaagaucgugaacaacuggcugaagcagcucaucaaggucacccugguguuccuguucguggccgccaucuucuaccucaucacccccguccacgugaugagcaagcacacggacuucuccagcgagaucaucggcuacaaggcgaucgacgggggcgugacccgcgacaucgccuccaccgacacgugcuucgccaacaagcacgccgacuucgacaccugguucagccagcggggcggcuccuacaccaacgacaaggccugcccccugaucgcggccgucaucacccgcgaggugggguucgugguccccggccugcccggcaccauccuccggacgaccaacggggacuuccugcacuuccugccccgcguguucagcgccgugggcaacaucugcuacaccccguccaagcucaucgaguacaccgacuucgccacgagcgcgugcguccuggccgccgagugcaccaucuucaaggacgccuccgggaagcccgugcccuacugcuacgacaccaacgugcuggagggcagcgucgccuacgagucccuccggcccgacacccgcuacgugcugauggacgggagcaucauccaguucccgaacacguaccuggagggcuccgugcgggucgugaccaccuucaacagcgaguacugccgccacgggaccugcgagcgguccgaggcgggggugugcgucagcacguccggccgcugggugcucaacaacgacuacuaccggagccugcccgggguguucugcggcgucgacgccgugaaccugcucaccaacauguucacgccccugauccagcccaucggcgcccuggacaucuccgccagcaucgucgccgggggcaucguggcgaucguggugaccugccucgccuacuacuucaugcgcuuccggcgcgccuucggggaguacagccacgucguggccuucaacacccugcuguuccucauguccuucaccguccugugccugaccccgguguacagcuuccuccccggcguguacuccgucaucuaccuguaccugaccuucuaccucacgaacgacgugagcuuccuggcccacauccaguggauggugauguucacgccccugguccccuucuggaucaccaucgcguacaucaucugcaucuccaccaagcacuucuacugguucuucagcaacuaccucaagcggcgcgugguguucaacggggucuccuucagcaccuucgaggaggccgcccugugcaccuuccugcucaacaaggagauguaccugaagcugcgguccgacgugcuccugccgcugacccaguacaaccgcuaccucgcccuguacaacaaguacaaguacuucagcggcgccaugaacaccacguccuaccgggaggcggccugcugccaccuggccaaggcccucaacgacuucagcaacuccggcagcgacgugcuguaccagccgccccagaccuccaucaccagcgcgguccugcagugaggacuagucccuguucccagagcccacuuuuuuuucuuuuuuugaaauaaaauagccugucuuucagaucuaaaaaaaaaaaaaaaaaaaaaaaaaaaaaaaaaaaaaaaaaaaaaaaaaaaaaaaaaaaaaaaaaaaaaaaaaaaaaaaaaaaaaaaaaaaaaaaaaaaa

SEQ ID NO: 28351 - RNA, 1754 nt, Artificial Sequence
  SARS-CoV-2/Wuhan-Hu-1__NC_045512.2/MN908947.2/EPI_ISL_402128__non -structural protein 4 (NSP4) mRNA gc (1-501)(S396T)
aggagagucccgcagucggcguccagcggcucugcuuguucgugugugugucguugcaggccuuauucaagcuuaccaugaagaucgugaacaacuggcugaagcagcucaucaaggucacccugguguuccuguucguggccgccaucuucuaccucaucacccccguccacgugaugagcaagcacacggacuucuccagcgagaucaucggcuacaaggcgaucgacgggggcgugacccgcgacaucgccuccaccgacacgugcuucgccaacaagcacgccgacuucgacaccugguucagccagcggggcggcuccuacaccaacgacaaggccugcccccugaucgcggccgucaucacccgcgaggugggguucgugguccccggccugcccggcaccauccuccggacgaccaacggggacuuccugcacuuccugccccgcguguucagcgccgugggcaacaucugcuacaccccguccaagcucaucgaguacaccgacuucgccacgagcgcgugcguccuggccgccgagugcaccaucuucaaggacgccuccgggaagcccgugcccuacugcuacgacaccaacgugcuggagggcagcgucgccuacgagucccuccggcccgacacccgcuacgugcugauggacgggagcaucauccaguucccgaacacguaccuggagggcuccgugcgggucgugaccaccuucgacagcgaguacugccgccacgggaccugcgagcgguccgaggcgggggugugcgucagcacguccggccgcugggugcucaacaacgacuacuaccggagccugcccgggguguucugcggcgucgacgccgugaaccugcucaccaacauguucacgccccugauccagcccaucggcgcccuggacaucuccgccagcaucgucgccgggggcaucguggcgaucguggugaccugccucgccuacuacuucaugcgcuuccggcgcgccuucggggaguacagccacgucguggccuucaacacccugcuguuccucauguccuucaccguccugugccugaccccgguguacagcuuccuccccggcguguacuccgucaucuaccuguaccugaccuucuaccucacgaacgacgugagcuuccuggcccacauccaguggauggugauguucacgccccugguccccuucuggaucaccaucgcguacaucaucugcaucuccaccaagcacuucuacugguucuucaccaacuaccucaagcggcgcgugguguucaacggggucuccuucagcaccuucgaggaggccgcccugugcaccuuccugcucaacaaggagauguaccugaagcugcgguccgacgugcuccugccgcugacccaguacaaccgcuaccucgcccuguacaacaaguacaaguacuucagcggcgccauggacaccacguccuaccgggaggcggccugcugccaccuggccaaggcccucaacgacuucagcaacuccggcagcgacgugcuguaccagccgccccagaccuccaucaccagcgcgguccugcagugaggacuagucccuguucccagagcccacuuuuuuuucuuuuuuugaaauaaaauagccugucuuucagaucuaaaaaaaaaaaaaaaaaaaaaaaaaaaaaaaaaaaaaaaaaaaaaaaaaaaaaaaaaaaaaaaaaaaaaaaaaaaaaaaaaaaaaaaaaaaaaaaaaaaa

SEQ ID NO: 28352 - RNA, 1754 nt, Artificial Sequence
  SARS-CoV-2/Wuhan-Hu-1__NC_045512.2/MN908947.2/EPI_ISL_402128__non -structural protein 4 (NSP4) mRNA gc (1-501)(L439P)
aggagagucccgcagucggcguccagcggcucugcuuguucgugugugugucguugcaggccuuauucaagcuuaccaugaagaucgugaacaacuggcugaagcagcucaucaaggucacccugguguuccuguucguggccgccaucuucuaccucaucacccccguccacgugaugagcaagcacacggacuucuccagcgagaucaucggcuacaaggcgaucgacgggggcgugacccgcgacaucgccuccaccgacacgugcuucgccaacaagcacgccgacuucgacaccugguucagccagcggggcggcuccuacaccaacgacaaggccugcccccugaucgcggccgucaucacccgcgaggugggguucgugguccccggccugcccggcaccauccuccggacgaccaacggggacuuccugcacuuccugccccgcguguucagcgccgugggcaacaucugcuacaccccguccaagcucaucgaguacaccgacuucgccacgagcgcgugcguccuggccgccgagugcaccaucuucaaggacgccuccgggaagcccgugcccuacugcuacgacaccaacgugcuggagggcagcgucgccuacgagucccuccggcccgacacccgcuacgugcugauggacgggagcaucauccaguucccgaacacguaccuggagggcuccgugcgggucgugaccaccuucgacagcgaguacugccgccacgggaccugcgagcgguccgaggcgggggugugcgucagcacguccggccgcugggugcucaacaacgacuacuaccggagccugcccgggguguucugcggcgucgacgccgugaaccugcucaccaacauguucacgccccugauccagcccaucggcgcccuggacaucuccgccagcaucgucgccgggggcaucguggcgaucguggugaccugccucgccuacuacuucaugcgcuuccggcgcgccuucggggaguacagccacgucguggccuucaacacccugcuguuccucauguccuucaccguccugugccugaccccgguguacagcuuccuccccggcguguacuccgucaucuaccuguaccugaccuucuaccucacgaacgacgugagcuuccuggcccacauccaguggauggugauguucacgccccugguccccuucuggaucaccaucgcguacaucaucugcaucuccaccaagcacuucuacugguucuucagcaacuaccucaagcggcgcgugguguucaacggggucuccuucagcaccuucgaggaggccgcccugugcaccuuccugcucaacaaggagauguaccugaagcugcgguccgacgugcuccugccgcccacccaguacaaccgcuaccucgcccuguacaacaaguacaaguacuucagcggcgccauggacaccacguccuaccgggaggcggccugcugccaccuggccaaggcccucaacgacuucagcaacuccggcagcgacgugcuguaccagccgccccagaccuccaucaccagcgcgguccugcagugaggacuagucccuguucccagagcccacuuuuuuuucuuuuuuugaaauaaaauagccugucuuucagaucuaaaaaaaaaaaaaaaaaaaaaaaaaaaaaaaaaaaaaaaaaaaaaaaaaaaaaaaaaaaaaaaaaaaaaaaaaaaaaaaaaaaaaaaaaaaaaaaaaaaa

SEQ ID NO: 28353 - RNA, 1754 nt, Artificial Sequence
  SARS-CoV-2/Wuhan-Hu-1__NC_045512.2/MN908947.2/EPI_ISL_402128__non -structural protein 4 (NSP4) mRNA gc (1-501)(A447V)
aggagagucccgcagucggcguccagcggcucugcuuguucgugugugugucguugcaggccuuauucaagcuuaccaugaagaucgugaacaacuggcugaagcagcucaucaaggucacccugguguuccuguucguggccgccaucuucuaccucaucacccccguccacgugaugagcaagcacacggacuucuccagcgagaucaucggcuacaaggcgaucgacgggggcgugacccgcgacaucgccuccaccgacacgugcuucgccaacaagcacgccgacuucgacaccugguucagccagcggggcggcuccuacaccaacgacaaggccugcccccugaucgcggccgucaucacccgcgaggugggguucgugguccccggccugcccggcaccauccuccggacgaccaacggggacuuccugcacuuccugccccgcguguucagcgccgugggcaacaucugcuacaccccguccaagcucaucgaguacaccgacuucgccacgagcgcgugcguccuggccgccgagugcaccaucuucaaggacgccuccgggaagcccgugcccuacugcuacgacaccaacgugcuggagggcagcgucgccuacgagucccuccggcccgacacccgcuacgugcugauggacgggagcaucauccaguucccgaacacguaccuggagggcuccgugcgggucgugaccaccuucgacagcgaguacugccgccacgggaccugcgagcgguccgaggcgggggugugcgucagcacguccggccgcugggugcucaacaacgacuacuaccggagccugcccgggguguucugcggcgucgacgccgugaaccugcucaccaacauguucacgccccugauccagcccaucggcgcccuggacaucuccgccagcaucgucgccgggggcaucguggcgaucguggugaccugccucgccuacuacuucaugcgcuuccggcgcgccuucggggaguacagccacgucguggccuucaacacccugcuguuccucauguccuucaccguccugugccugaccccgguguacagcuuccuccccggcguguacuccgucaucuaccuguaccugaccuucuaccucacgaacgacgugagcuuccuggcccacauccaguggauggugauguucacgccccugguccccuucuggaucaccaucgcguacaucaucugcaucuccaccaagcacuucuacugguucuucagcaacuaccucaagcggcgcgugguguucaacggggucuccuucagcaccuucgaggaggccgcccugugcaccuuccugcucaacaaggagauguaccugaagcugcgguccgacgugcuccugccgcugacccaguacaaccgcuaccucgugcuguacaacaaguacaaguacuucagcggcgccauggacaccacguccuaccgggaggcggccugcugccaccuggccaaggcccucaacgacuucagcaacuccggcagcgacgugcuguaccagccgccccagaccuccaucaccagcgcgguccugcagugaggacuagucccuguucccagagcccacuuuuuuuucuuuuuuugaaauaaaauagccugucuuucagaucuaaaaaaaaaaaaaaaaaaaaaaaaaaaaaaaaaaaaaaaaaaaaaaaaaaaaaaaaaaaaaaaaaaaaaaaaaaaaaaaaaaaaaaaaaaaaaaaaaaaa

SEQ ID NO: 28354 - RNA, 1754 nt, Artificial Sequence
  SARS-CoV-2/Wuhan-Hu-1__NC_045512.2/MN908947.2/EPI_ISL_402128__non -structural protein 4 (NSP4) mRNA gc (1-501)(L439P_T493I)
aggagagucccgcagucggcguccagcggcucugcuuguucgugugugugucguugcaggccuuauucaagcuuaccaugaagaucgugaacaacuggcugaagcagcucaucaaggucacccugguguuccuguucguggccgccaucuucuaccucaucacccccguccacgugaugagcaagcacacggacuucuccagcgagaucaucggcuacaaggcgaucgacgggggcgugacccgcgacaucgccuccaccgacacgugcuucgccaacaagcacgccgacuucgacaccugguucagccagcggggcggcuccuacaccaacgacaaggccugcccccugaucgcggccgucaucacccgcgaggugggguucgugguccccggccugcccggcaccauccuccggacgaccaacggggacuuccugcacuuccugccccgcguguucagcgccgugggcaacaucugcuacaccccguccaagcucaucgaguacaccgacuucgccacgagcgcgugcguccuggccgccgagugcaccaucuucaaggacgccuccgggaagcccgugcccuacugcuacgacaccaacgugcuggagggcagcgucgccuacgagucccuccggcccgacacccgcuacgugcugauggacgggagcaucauccaguucccgaacacguaccuggagggcuccgugcgggucgugaccaccuucgacagcgaguacugccgccacgggaccugcgagcgguccgaggcgggggugugcgucagcacguccggccgcugggugcucaacaacgacuacuaccggagccugcccgggguguucugcggcgucgacgccgugaaccugcucaccaacauguucacgccccugauccagcccaucggcgcccuggacaucuccgccagcaucgucgccgggggcaucguggcgaucguggugaccugccucgccuacuacuucaugcgcuuccggcgcgccuucggggaguacagccacgucguggccuucaacacccugcuguuccucauguccuucaccguccugugccugaccccgguguacagcuuccuccccggcguguacuccgucaucuaccuguaccugaccuucuaccucacgaacgacgugagcuuccuggcccacauccaguggauggugauguucacgccccugguccccuucuggaucaccaucgcguacaucaucugcaucuccaccaagcacuucuacugguucuucagcaacuaccucaagcggcgcgugguguucaacggggucuccuucagcaccuucgaggaggccgcccugugcaccuuccugcucaacaaggagauguaccugaagcugcgguccgacgugcuccugccgcccacccaguacaaccgcuaccucgcccuguacaacaaguacaaguacuucagcggcgccauggacaccacguccuaccgggaggcggccugcugccaccuggccaaggcccucaacgacuucagcaacuccggcagcgacgugcuguaccagccgccccagaucuccaucaccagcgcgguccugcagugaggacuagucccuguucccagagcccacuuuuuuuucuuuuuuugaaauaaaauagccugucuuucagaucuaaaaaaaaaaaaaaaaaaaaaaaaaaaaaaaaaaaaaaaaaaaaaaaaaaaaaaaaaaaaaaaaaaaaaaaaaaaaaaaaaaaaaaaaaaaaaaaaaaaa

SEQ ID NO: 28355 - RNA, 1754 nt, Artificial Sequence
  SARS-CoV-2/Wuhan-Hu-1__NC_045512.2/MN908947.2/EPI_ISL_402128__non -structural protein 4 (NSP4) mRNA gc (1-501)(T115I_S396T)
aggagagucccgcagucggcguccagcggcucugcuuguucgugugugugucguugcaggccuuauucaagcuuaccaugaagaucgugaacaacuggcugaagcagcucaucaaggucacccugguguuccuguucguggccgccaucuucuaccucaucacccccguccacgugaugagcaagcacacggacuucuccagcgagaucaucggcuacaaggcgaucgacgggggcgugacccgcgacaucgccuccaccgacacgugcuucgccaacaagcacgccgacuucgacaccugguucagccagcggggcggcuccuacaccaacgacaaggccugcccccugaucgcggccgucaucacccgcgaggugggguucgugguccccggccugcccggcaccauccuccggacgaucaacggggacuuccugcacuuccugccccgcguguucagcgccgugggcaacaucugcuacaccccguccaagcucaucgaguacaccgacuucgccacgagcgcgugcguccuggccgccgagugcaccaucuucaaggacgccuccgggaagcccgugcccuacugcuacgacaccaacgugcuggagggcagcgucgccuacgagucccuccggcccgacacccgcuacgugcugauggacgggagcaucauccaguucccgaacacguaccuggagggcuccgugcgggucgugaccaccuucgacagcgaguacugccgccacgggaccugcgagcgguccgaggcgggggugugcgucagcacguccggccgcugggugcucaacaacgacuacuaccggagccugcccgggguguucugcggcgucgacgccgugaaccugcucaccaacauguucacgccccugauccagcccaucggcgcccuggacaucuccgccagcaucgucgccgggggcaucguggcgaucguggugaccugccucgccuacuacuucaugcgcuuccggcgcgccuucggggaguacagccacgucguggccuucaacacccugcuguuccucauguccuucaccguccugugccugaccccgguguacagcuuccuccccggcguguacuccgucaucuaccuguaccugaccuucuaccucacgaacgacgugagcuuccuggcccacauccaguggauggugauguucacgccccugguccccuucuggaucaccaucgcguacaucaucugcaucuccaccaagcacuucuacugguucuucaccaacuaccucaagcggcgcgugguguucaacggggucuccuucagcaccuucgaggaggccgcccugugcaccuuccugcucaacaaggagauguaccugaagcugcgguccgacgugcuccugccgcugacccaguacaaccgcuaccucgcccuguacaacaaguacaaguacuucagcggcgccauggacaccacguccuaccgggaggcggccugcugccaccuggccaaggcccucaacgacuucagcaacuccggcagcgacgugcuguaccagccgccccagaccuccaucaccagcgcgguccugcagugaggacuagucccuguucccagagcccacuuuuuuuucuuuuuuugaaauaaaauagccugucuuucagaucuaaaaaaaaaaaaaaaaaaaaaaaaaaaaaaaaaaaaaaaaaaaaaaaaaaaaaaaaaaaaaaaaaaaaaaaaaaaaaaaaaaaaaaaaaaaaaaaaaaaa

SEQ ID NO: 28356 - RNA, 1754 nt, Artificial Sequence
  SARS-CoV-2/Wuhan-Hu-1__NC_045512.2/MN908947.2/EPI_ISL_402128__non -structural protein 4 (NSP4) mRNA gc (1-501)(K400E_L439P_A447V)
aggagagucccgcagucggcguccagcggcucugcuuguucgugugugugucguugcaggccuuauucaagcuuaccaugaagaucgugaacaacuggcugaagcagcucaucaaggucacccugguguuccuguucguggccgccaucuucuaccucaucacccccguccacgugaugagcaagcacacggacuucuccagcgagaucaucggcuacaaggcgaucgacgggggcgugacccgcgacaucgccuccaccgacacgugcuucgccaacaagcacgccgacuucgacaccugguucagccagcggggcggcuccuacaccaacgacaaggccugcccccugaucgcggccgucaucacccgcgaggugggguucgugguccccggccugcccggcaccauccuccggacgaccaacggggacuuccugcacuuccugccccgcguguucagcgccgugggcaacaucugcuacaccccguccaagcucaucgaguacaccgacuucgccacgagcgcgugcguccuggccgccgagugcaccaucuucaaggacgccuccgggaagcccgugcccuacugcuacgacaccaacgugcuggagggcagcgucgccuacgagucccuccggcccgacacccgcuacgugcugauggacgggagcaucauccaguucccgaacacguaccuggagggcuccgugcgggucgugaccaccuucgacagcgaguacugccgccacgggaccugcgagcgguccgaggcgggggugugcgucagcacguccggccgcugggugcucaacaacgacuacuaccggagccugcccgggguguucugcggcgucgacgccgugaaccugcucaccaacauguucacgccccugauccagcccaucggcgcccuggacaucuccgccagcaucgucgccgggggcaucguggcgaucguggugaccugccucgccuacuacuucaugcgcuuccggcgcgccuucggggaguacagccacgucguggccuucaacacccugcuguuccucauguccuucaccguccugugccugaccccgguguacagcuuccuccccggcguguacuccgucaucuaccuguaccugaccuucuaccucacgaacgacgugagcuuccuggcccacauccaguggauggugauguucacgccccugguccccuucuggaucaccaucgcguacaucaucugcaucuccaccaagcacuucuacugguucuucagcaacuaccucgagcggcgcgugguguucaacggggucuccuucagcaccuucgaggaggccgcccugugcaccuuccugcucaacaaggagauguaccugaagcugcgguccgacgugcuccugccgcccacccaguacaaccgcuaccucgugcuguacaacaaguacaaguacuucagcggcgccauggacaccacguccuaccgggaggcggccugcugccaccuggccaaggcccucaacgacuucagcaacuccggcagcgacgugcuguaccagccgccccagaccuccaucaccagcgcgguccugcagugaggacuagucccuguucccagagcccacuuuuuuuucuuuuuuugaaauaaaauagccugucuuucagaucuaaaaaaaaaaaaaaaaaaaaaaaaaaaaaaaaaaaaaaaaaaaaaaaaaaaaaaaaaaaaaaaaaaaaaaaaaaaaaaaaaaaaaaaaaaaaaaaaaaaa

SEQ ID NO: 28357 - RNA, 1754 nt, Artificial Sequence
  SARS-CoV-2/Wuhan-Hu-1__NC_045512.2/MN908947.2/EPI_ISL_402128__non -structural protein 4 (NSP4) mRNA gc (1-501)(L448F)
aggagagucccgcagucggcguccagcggcucugcuuguucgugugugugucguugcaggccuuauucaagcuuaccaugaagaucgugaacaacuggcugaagcagcucaucaaggucacccugguguuccuguucguggccgccaucuucuaccucaucacccccguccacgugaugagcaagcacacggacuucuccagcgagaucaucggcuacaaggcgaucgacgggggcgugacccgcgacaucgccuccaccgacacgugcuucgccaacaagcacgccgacuucgacaccugguucagccagcggggcggcuccuacaccaacgacaaggccugcccccugaucgcggccgucaucacccgcgaggugggguucgugguccccggccugcccggcaccauccuccggacgaccaacggggacuuccugcacuuccugccccgcguguucagcgccgugggcaacaucugcuacaccccguccaagcucaucgaguacaccgacuucgccacgagcgcgugcguccuggccgccgagugcaccaucuucaaggacgccuccgggaagcccgugcccuacugcuacgacaccaacgugcuggagggcagcgucgccuacgagucccuccggcccgacacccgcuacgugcugauggacgggagcaucauccaguucccgaacacguaccuggagggcuccgugcgggucgugaccaccuucgacagcgaguacugccgccacgggaccugcgagcgguccgaggcgggggugugcgucagcacguccggccgcugggugcucaacaacgacuacuaccggagccugcccgggguguucugcggcgucgacgccgugaaccugcucaccaacauguucacgccccugauccagcccaucggcgcccuggacaucuccgccagcaucgucgccgggggcaucguggcgaucguggugaccugccucgccuacuacuucaugcgcuuccggcgcgccuucggggaguacagccacgucguggccuucaacacccugcuguuccucauguccuucaccguccugugccugaccccgguguacagcuuccuccccggcguguacuccgucaucuaccuguaccugaccuucuaccucacgaacgacgugagcuuccuggcccacauccaguggauggugauguucacgccccugguccccuucuggaucaccaucgcguacaucaucugcaucuccaccaagcacuucuacugguucuucagcaacuaccucaagcggcgcgugguguucaacggggucuccuucagcaccuucgaggaggccgcccugugcaccuuccugcucaacaaggagauguaccugaagcugcgguccgacgugcuccugccgcugacccaguacaaccgcuaccucgccuucuacaacaaguacaaguacuucagcggcgccauggacaccacguccuaccgggaggcggccugcugccaccuggccaaggcccucaacgacuucagcaacuccggcagcgacgugcuguaccagccgccccagaccuccaucaccagcgcgguccugcagugaggacuagucccuguucccagagcccacuuuuuuuucuuuuuuugaaauaaaauagccugucuuucagaucuaaaaaaaaaaaaaaaaaaaaaaaaaaaaaaaaaaaaaaaaaaaaaaaaaaaaaaaaaaaaaaaaaaaaaaaaaaaaaaaaaaaaaaaaaaaaaaaaaaaa

SEQ ID NO: 28358 - RNA, 1124 nt, Artificial Sequence
  SARS-CoV-2/Wuhan-Hu-1__NC_045512.2/MN908947.2/EPI_ISL_402128__non -structural protein 6 (NSP6) mRNA gc (1-291)(T78A_V150A_I163V_T182I)
aggagagucccgcagucggcguccagcggcucugcuuguucgugugugugucguugcaggccuuauucaagcuuaccaugagcgccgugaagcgcaccaucaagggcacccaccacuggcugcuccugacgauccugaccucccuccugguccuggugcagagcacccaguggucccucuucuucuuccuguacgagaacgccuuccugcccuucgcgauggggaucaucgccaugagcgccuucgccaugauguucgugaagcacaagcacgccuuccucugccuguuccugcucccgucccuggcggccgucgccuacuucaacaugguguacaugcccgccagcugggugaugcggaucaugacguggcuggacauggucgacaccucccucagcggcuucaagcugaaggacugcgugauguacgccuccgcggugguccugcucauccugaugaccgcccgcaccguguacgacgacggggcccggcgcguguggacgcugaugaacguccucacccuggccuacaagguguacuacggcaacgcccuggaccaggccgugagcaugugggcgcucaucaucuccgucaccagcaacuacuccgggguggugaccaucgucauguuccuggcccggggcaucguguucaugugcguggaguacugccccaucuucuucaucaccggcaacacccugcagugcaucaugcucgucuacugcuuccugggguacuucugcacgugcuacuucggccuguucugccuccugaaccgcuacuuccggcugacccucgggguguacgacuaccuggugagcacccaggaguuccgcuacaugaacucccagggccugcugcccccgaagaacagcaucgacgccuucaagcucaacaucaagcugcucggggucggcggcaagcccugcaucaagguggccaccguccagugaggacuagucccuguucccagagcccacuuuuuuuucuuuuuuugaaauaaaauagccugucuuucagaucuaaaaaaaaaaaaaaaaaaaaaaaaaaaaaaaaaaaaaaaaaaaaaaaaaaaaaaaaaaaaaaaaaaaaaaaaaaaaaaaaaaaaaaaaaaaaaaaaaaaa

SEQ ID NO: 28359 - RNA, 1115 nt, Artificial Sequence
  SARS-CoV-2/Wuhan-Hu-1__NC_045512.2/MN908947.2/EPI_ISL_402128__non -structural protein 6 (NSP6) mRNA gc (1-291)(S107del_G108del_F109del)
aggagagucccgcagucggcguccagcggcucugcuuguucgugugugugucguugcaggccuuauucaagcuuaccaugagcgccgugaagcgcaccaucaagggcacccaccacuggcugcuccugacgauccugaccucccuccugguccuggugcagagcacccaguggucccucuucuucuuccuguacgagaacgccuuccugcccuucgcgauggggaucaucgccaugagcgccuucgccaugauguucgugaagcacaagcacgccuuccucugccuguuccugcucccgucccuggcgaccgucgccuacuucaacaugguguacaugcccgccagcugggugaugcggaucaugacguggcuggacauggucgacaccucccucaagcugaaggacugcgugauguacgccuccgcggugguccugcucauccugaugaccgcccgcaccguguacgacgacggggcccggcgcguguggacgcugaugaacguccucacccugguguacaagguguacuacggcaacgcccuggaccaggccaucagcaugugggcgcucaucaucuccgucaccagcaacuacuccgggguggugaccacggucauguuccuggcccggggcaucguguucaugugcguggaguacugccccaucuucuucaucaccggcaacacccugcagugcaucaugcucgucuacugcuuccugggguacuucugcacgugcuacuucggccuguucugccuccugaaccgcuacuuccggcugacccucgggguguacgacuaccuggugagcacccaggaguuccgcuacaugaacucccagggccugcugcccccgaagaacagcaucgacgccuucaagcucaacaucaagcugcucggggucggcggcaagcccugcaucaagguggccaccguccagugaggacuagucccuguucccagagcccacuuuuuuuucuuuuuuugaaauaaaauagccugucuuucagaucuaaaaaaaaaaaaaaaaaaaaaaaaaaaaaaaaaaaaaaaaaaaaaaaaaaaaaaaaaaaaaaaaaaaaaaaaaaaaaaaaaaaaaaaaaaaaaaaaaaaa

SEQ ID NO: 28360 - RNA, 1115 nt, Artificial Sequence
  SARS-CoV-2/Wuhan-Hu-1__NC_045512.2/MN908947.2/EPI_ISL_402128__non -structural protein 6 (NSP6) mRNA gc (1-291)(S107del_G108del_F109del_M165T)
aggagagucccgcagucggcguccagcggcucugcuuguucgugugugugucguugcaggccuuauucaagcuuaccaugagcgccgugaagcgcaccaucaagggcacccaccacuggcugcuccugacgauccugaccucccuccugguccuggugcagagcacccaguggucccucuucuucuuccuguacgagaacgccuuccugcccuucgcgauggggaucaucgccaugagcgccuucgccaugauguucgugaagcacaagcacgccuuccucugccuguuccugcucccgucccuggcgaccgucgccuacuucaacaugguguacaugcccgccagcugggugaugcggaucaugacguggcuggacauggucgacaccucccucaagcugaaggacugcgugauguacgccuccgcggugguccugcucauccugaugaccgcccgcaccguguacgacgacggggcccggcgcguguggacgcugaugaacguccucacccugguguacaagguguacuacggcaacgcccuggaccaggccaucagcaccugggcgcucaucaucuccgucaccagcaacuacuccgggguggugaccacggucauguuccuggcccggggcaucguguucaugugcguggaguacugccccaucuucuucaucaccggcaacacccugcagugcaucaugcucgucuacugcuuccugggguacuucugcacgugcuacuucggccuguucugccuccugaaccgcuacuuccggcugacccucgggguguacgacuaccuggugagcacccaggaguuccgcuacaugaacucccagggccugcugcccccgaagaacagcaucgacgccuucaagcucaacaucaagcugcucggggucggcggcaagcccugcaucaagguggccaccguccagugaggacuagucccuguucccagagcccacuuuuuuuucuuuuuuugaaauaaaauagccugucuuucagaucuaaaaaaaaaaaaaaaaaaaaaaaaaaaaaaaaaaaaaaaaaaaaaaaaaaaaaaaaaaaaaaaaaaaaaaaaaaaaaaaaaaaaaaaaaaaaaaaaaaaa

SEQ ID NO: 28361 - RNA, 1124 nt, Artificial Sequence
  SARS-CoV-2/Wuhan-Hu-1__NC_045512.2/MN908947.2/EPI_ISL_402128__non -structural protein 6 (NSP6) mRNA gc (1-291)(V27G_L38F_F221L_C222F)
aggagagucccgcagucggcguccagcggcucugcuuguucgugugugugucguugcaggccuuauucaagcuuaccaugagcgccgugaagcgcaccaucaagggcacccaccacuggcugcuccugacgauccugaccucccuccugguccugggccagagcacccaguggucccucuucuucuucuucuacgagaacgccuuccugcccuucgcgauggggaucaucgccaugagcgccuucgccaugauguucgugaagcacaagcacgccuuccucugccuguuccugcucccgucccuggcgaccgucgccuacuucaacaugguguacaugcccgccagcugggugaugcggaucaugacguggcuggacauggucgacaccucccucagcggcuucaagcugaaggacugcgugauguacgccuccgcggugguccugcucauccugaugaccgcccgcaccguguacgacgacggggcccggcgcguguggacgcugaugaacguccucacccugguguacaagguguacuacggcaacgcccuggaccaggccaucagcaugugggcgcucaucaucuccgucaccagcaacuacuccgggguggugaccacggucauguuccuggcccggggcaucguguucaugugcguggaguacugccccaucuucuucaucaccggcaacacccugcagugcaucaugcucgucuacugcuuccugggguaccuguucacgugcuacuucggccuguucugccuccugaaccgcuacuuccggcugacccucgggguguacgacuaccuggugagcacccaggaguuccgcuacaugaacucccagggccugcugcccccgaagaacagcaucgacgccuucaagcucaacaucaagcugcucggggucggcggcaagcccugcaucaagguggccaccguccagugaggacuagucccuguucccagagcccacuuuuuuuucuuuuuuugaaauaaaauagccugucuuucagaucuaaaaaaaaaaaaaaaaaaaaaaaaaaaaaaaaaaaaaaaaaaaaaaaaaaaaaaaaaaaaaaaaaaaaaaaaaaaaaaaaaaaaaaaaaaaaaaaaaaaa

SEQ ID NO: 28362 - RNA, 1124 nt, Artificial Sequence
  SARS-CoV-2/Wuhan-Hu-1__NC_045512.2/MN908947.2/EPI_ISL_402128__non -structural protein 6 (NSP6) mRNA gc (1-291)(L38F_L126F)
aggagagucccgcagucggcguccagcggcucugcuuguucgugugugugucguugcaggccuuauucaagcuuaccaugagcgccgugaagcgcaccaucaagggcacccaccacuggcugcuccugacgauccugaccucccuccugguccuggugcagagcacccaguggucccucuucuucuucuucuacgagaacgccuuccugcccuucgcgauggggaucaucgccaugagcgccuucgccaugauguucgugaagcacaagcacgccuuccucugccuguuccugcucccgucccuggcgaccgucgccuacuucaacaugguguacaugcccgccagcugggugaugcggaucaugacguggcuggacauggucgacaccucccucagcggcuucaagcugaaggacugcgugauguacgccuccgcggugguccugcucaucuucaugaccgcccgcaccguguacgacgacggggcccggcgcguguggacgcugaugaacguccucacccugguguacaagguguacuacggcaacgcccuggaccaggccaucagcaugugggcgcucaucaucuccgucaccagcaacuacuccgggguggugaccacggucauguuccuggcccggggcaucguguucaugugcguggaguacugccccaucuucuucaucaccggcaacacccugcagugcaucaugcucgucuacugcuuccugggguacuucugcacgugcuacuucggccuguucugccuccugaaccgcuacuuccggcugacccucgggguguacgacuaccuggugagcacccaggaguuccgcuacaugaacucccagggccugcugcccccgaagaacagcaucgacgccuucaagcucaacaucaagcugcucggggucggcggcaagcccugcaucaagguggccaccguccagugaggacuagucccuguucccagagcccacuuuuuuuucuuuuuuugaaauaaaauagccugucuuucagaucuaaaaaaaaaaaaaaaaaaaaaaaaaaaaaaaaaaaaaaaaaaaaaaaaaaaaaaaaaaaaaaaaaaaaaaaaaaaaaaaaaaaaaaaaaaaaaaaaaaaa

SEQ ID NO: 28363 - RNA, 1115 nt, Artificial Sequence
  SARS-CoV-2/Wuhan-Hu-1__NC_045512.2/MN908947.2/EPI_ISL_402128__non -structural protein 6 (NSP6) mRNA gc (1-291)(S107del_G108del_F109del_L126F)
aggagagucccgcagucggcguccagcggcucugcuuguucgugugugugucguugcaggccuuauucaagcuuaccaugagcgccgugaagcgcaccaucaagggcacccaccacuggcugcuccugacgauccugaccucccuccugguccuggugcagagcacccaguggucccucuucuucuuccuguacgagaacgccuuccugcccuucgcgauggggaucaucgccaugagcgccuucgccaugauguucgugaagcacaagcacgccuuccucugccuguuccugcucccgucccuggcgaccgucgccuacuucaacaugguguacaugcccgccagcugggugaugcggaucaugacguggcuggacauggucgacaccucccucaagcugaaggacugcgugauguacgccuccgcggugguccugcucaucuucaugaccgcccgcaccguguacgacgacggggcccggcgcguguggacgcugaugaacguccucacccugguguacaagguguacuacggcaacgcccuggaccaggccaucagcaugugggcgcucaucaucuccgucaccagcaacuacuccgggguggugaccacggucauguuccuggcccggggcaucguguucaugugcguggaguacugccccaucuucuucaucaccggcaacacccugcagugcaucaugcucgucuacugcuuccugggguacuucugcacgugcuacuucggccuguucugccuccugaaccgcuacuuccggcugacccucgggguguacgacuaccuggugagcacccaggaguuccgcuacaugaacucccagggccugcugcccccgaagaacagcaucgacgccuucaagcucaacaucaagcugcucggggucggcggcaagcccugcaucaagguggccaccguccagugaggacuagucccuguucccagagcccacuuuuuuuucuuuuuuugaaauaaaauagccugucuuucagaucuaaaaaaaaaaaaaaaaaaaaaaaaaaaaaaaaaaaaaaaaaaaaaaaaaaaaaaaaaaaaaaaaaaaaaaaaaaaaaaaaaaaaaaaaaaaaaaaaaaaa

SEQ ID NO: 28364 - RNA, 1115 nt, Artificial Sequence
  SARS-CoV-2/Wuhan-Hu-1__NC_045512.2/MN908947.2/EPI_ISL_402128__non -structural protein 6 (NSP6) mRNA gc (1-291)(S107del_G108del_F109del_V279I)
aggagagucccgcagucggcguccagcggcucugcuuguucgugugugugucguugcaggccuuauucaagcuuaccaugagcgccgugaagcgcaccaucaagggcacccaccacuggcugcuccugacgauccugaccucccuccugguccuggugcagagcacccaguggucccucuucuucuuccuguacgagaacgccuuccugcccuucgcgauggggaucaucgccaugagcgccuucgccaugauguucgugaagcacaagcacgccuuccucugccuguuccugcucccgucccuggcgaccgucgccuacuucaacaugguguacaugcccgccagcugggugaugcggaucaugacguggcuggacauggucgacaccucccucaagcugaaggacugcgugauguacgccuccgcggugguccugcucauccugaugaccgcccgcaccguguacgacgacggggcccggcgcguguggacgcugaugaacguccucacccugguguacaagguguacuacggcaacgcccuggaccaggccaucagcaugugggcgcucaucaucuccgucaccagcaacuacuccgggguggugaccacggucauguuccuggcccggggcaucguguucaugugcguggaguacugccccaucuucuucaucaccggcaacacccugcagugcaucaugcucgucuacugcuuccugggguacuucugcacgugcuacuucggccuguucugccuccugaaccgcuacuuccggcugacccucgggguguacgacuaccuggugagcacccaggaguuccgcuacaugaacucccagggccugcugcccccgaagaacagcaucgacgccuucaagcucaacaucaagcugcucgggaucggcggcaagcccugcaucaagguggccaccguccagugaggacuagucccuguucccagagcccacuuuuuuuucuuuuuuugaaauaaaauagccugucuuucagaucuaaaaaaaaaaaaaaaaaaaaaaaaaaaaaaaaaaaaaaaaaaaaaaaaaaaaaaaaaaaaaaaaaaaaaaaaaaaaaaaaaaaaaaaaaaaaaaaaaaaa

SEQ ID NO: 28365 - RNA, 1076 nt, Artificial Sequence
  SARS-CoV-2/Wuhan-Hu-1__NC_045512.2/MN908947.2/EPI_ISL_402128__ORF 3a protein (ORF3a) mRNA gc (1-275)(Q57H_S171L)
aggagagucccgcagucggcguccagcggcucugcuuguucgugugugugucguugcaggccuuauucaagcuuaccauggaccuguucaugcgcaucuucaccaucggcaccgugacgcucaagcagggggagaucaaggacgccacccccagcgacuucguccgggccaccgcgaccaucccgauccaggccucccugcccuucggcuggcugaucguggggguggcccuccuggccgucuuccacagcgccuccaagaucaucacgcugaagaagcgcuggcagcucgcgcugagcaagggcgugcacuucgugugcaaccugcuccugcuguucgucaccguguacucccaccuccugcugguggccgccgggcucgaggcccccuuccuguaccuguacgcgcucgucuacuuccugcagagcaucaacuucgugcggaucaucaugcgccuguggcucugcuggaagugccgguccaagaacccccugcuguacgacgccaacuacuuccucugcuggcacaccaacugcuacgacuacugcaucccguacaacagcgugaccuccagcaucgucaucacgcugggcgacggcaccaccagccccaucuccgagcacgacuaccagaucgggggcuacaccgagaagugggagagcggggugaaggacugcgugguccugcacuccuacuucacgagcgacuacuaccagcuguacuccacccagcucagcaccgacaccggcguggagcacgugacguucuucaucuacaacaagaucgucgacgagcccgaggagcacgugcagauccacaccaucgacggguccagcggcguggucaaccccgugauggagccgaucuacgacgagcccaccaccacgaccagcgugccccugugaggacuagucccuguucccagagcccacuuuuuuuucuuuuuuugaaauaaaauagccugucuuucagaucuaaaaaaaaaaaaaaaaaaaaaaaaaaaaaaaaaaaaaaaaaaaaaaaaaaaaaaaaaaaaaaaaaaaaaaaaaaaaaaaaaaaaaaaaaaaaaaaaaaaa

SEQ ID NO: 28366 - RNA, 1076 nt, Artificial Sequence
  SARS-CoV-2/Wuhan-Hu-1__NC_045512.2/MN908947.2/EPI_ISL_402128__ORF 3a protein (ORF3a) mRNA gc (1-275)(D155Y_S253P)
aggagagucccgcagucggcguccagcggcucugcuuguucgugugugugucguugcaggccuuauucaagcuuaccauggaccuguucaugcgcaucuucaccaucggcaccgugacgcucaagcagggggagaucaaggacgccacccccagcgacuucguccgggccaccgcgaccaucccgauccaggccucccugcccuucggcuggcugaucguggggguggcccuccuggccgucuuccagagcgccuccaagaucaucacgcugaagaagcgcuggcagcucgcgcugagcaagggcgugcacuucgugugcaaccugcuccugcuguucgucaccguguacucccaccuccugcugguggccgccgggcucgaggcccccuuccuguaccuguacgcgcucgucuacuuccugcagagcaucaacuucgugcggaucaucaugcgccuguggcucugcuggaagugccgguccaagaacccccugcuguacgacgccaacuacuuccucugcuggcacaccaacugcuacuacuacugcaucccguacaacagcgugaccuccagcaucgucaucacguccggcgacggcaccaccagccccaucuccgagcacgacuaccagaucgggggcuacaccgagaagugggagagcggggugaaggacugcgugguccugcacuccuacuucacgagcgacuacuaccagcuguacuccacccagcucagcaccgacaccggcguggagcacgugacguucuucaucuacaacaagaucgucgacgagcccgaggagcacgugcagauccacaccaucgacgggucccccggcguggucaaccccgugauggagccgaucuacgacgagcccaccaccacgaccagcgugccccugugaggacuagucccuguucccagagcccacuuuuuuuucuuuuuuugaaauaaaauagccugucuuucagaucuaaaaaaaaaaaaaaaaaaaaaaaaaaaaaaaaaaaaaaaaaaaaaaaaaaaaaaaaaaaaaaaaaaaaaaaaaaaaaaaaaaaaaaaaaaaaaaaaaaaa

SEQ ID NO: 28367 - RNA, 1076 nt, Artificial Sequence
  SARS-CoV-2/Wuhan-Hu-1__NC_045512.2/MN908947.2/EPI_ISL_402128__ORF 3a protein (ORF3a) mRNA gc (1-275)(S253P)
aggagagucccgcagucggcguccagcggcucugcuuguucgugugugugucguugcaggccuuauucaagcuuaccauggaccuguucaugcgcaucuucaccaucggcaccgugacgcucaagcagggggagaucaaggacgccacccccagcgacuucguccgggccaccgcgaccaucccgauccaggccucccugcccuucggcuggcugaucguggggguggcccuccuggccgucuuccagagcgccuccaagaucaucacgcugaagaagcgcuggcagcucgcgcugagcaagggcgugcacuucgugugcaaccugcuccugcuguucgucaccguguacucccaccuccugcugguggccgccgggcucgaggcccccuuccuguaccuguacgcgcucgucuacuuccugcagagcaucaacuucgugcggaucaucaugcgccuguggcucugcuggaagugccgguccaagaacccccugcuguacgacgccaacuacuuccucugcuggcacaccaacugcuacgacuacugcaucccguacaacagcgugaccuccagcaucgucaucacguccggcgacggcaccaccagccccaucuccgagcacgacuaccagaucgggggcuacaccgagaagugggagagcggggugaaggacugcgugguccugcacuccuacuucacgagcgacuacuaccagcuguacuccacccagcucagcaccgacaccggcguggagcacgugacguucuucaucuacaacaagaucgucgacgagcccgaggagcacgugcagauccacaccaucgacgggucccccggcguggucaaccccgugauggagccgaucuacgacgagcccaccaccacgaccagcgugccccugugaggacuagucccuguucccagagcccacuuuuuuuucuuuuuuugaaauaaaauagccugucuuucagaucuaaaaaaaaaaaaaaaaaaaaaaaaaaaaaaaaaaaaaaaaaaaaaaaaaaaaaaaaaaaaaaaaaaaaaaaaaaaaaaaaaaaaaaaaaaaaaaaaaaaa

SEQ ID NO: 28368 - RNA, 1076 nt, Artificial Sequence
  SARS-CoV-2/Wuhan-Hu-1__NC_045512.2/MN908947.2/EPI_ISL_402128__ORF 3a protein (ORF3a) mRNA gc (1-275)(L15F_W131C_T151I)
aggagagucccgcagucggcguccagcggcucugcuuguucgugugugugucguugcaggccuuauucaagcuuaccauggaccuguucaugcgcaucuucaccaucggcaccgugacguucaagcagggggagaucaaggacgccacccccagcgacuucguccgggccaccgcgaccaucccgauccaggccucccugcccuucggcuggcugaucguggggguggcccuccuggccgucuuccagagcgccuccaagaucaucacgcugaagaagcgcuggcagcucgcgcugagcaagggcgugcacuucgugugcaaccugcuccugcuguucgucaccguguacucccaccuccugcugguggccgccgggcucgaggcccccuuccuguaccuguacgcgcucgucuacuuccugcagagcaucaacuucgugcggaucaucaugcgccuguggcucugcugcaagugccgguccaagaacccccugcuguacgacgccaacuacuuccucugcuggcacaucaacugcuacgacuacugcaucccguacaacagcgugaccuccagcaucgucaucacguccggcgacggcaccaccagccccaucuccgagcacgacuaccagaucgggggcuacaccgagaagugggagagcggggugaaggacugcgugguccugcacuccuacuucacgagcgacuacuaccagcuguacuccacccagcucagcaccgacaccggcguggagcacgugacguucuucaucuacaacaagaucgucgacgagcccgaggagcacgugcagauccacaccaucgacggguccagcggcguggucaaccccgugauggagccgaucuacgacgagcccaccaccacgaccagcgugccccugugaggacuagucccuguucccagagcccacuuuuuuuucuuuuuuugaaauaaaauagccugucuuucagaucuaaaaaaaaaaaaaaaaaaaaaaaaaaaaaaaaaaaaaaaaaaaaaaaaaaaaaaaaaaaaaaaaaaaaaaaaaaaaaaaaaaaaaaaaaaaaaaaaaaaa

SEQ ID NO: 28369 - RNA, 1076 nt, Artificial Sequence
  SARS-CoV-2/Wuhan-Hu-1__NC_045512.2/MN908947.2/EPI_ISL_402128__ORF 3a protein (ORF3a) mRNA gc (1-275)(P42L_Q57H)
aggagagucccgcagucggcguccagcggcucugcuuguucgugugugugucguugcaggccuuauucaagcuuaccauggaccuguucaugcgcaucuucaccaucggcaccgugacgcucaagcagggggagaucaaggacgccacccccagcgacuucguccgggccaccgcgaccaucccgauccaggccucccugcuguucggcuggcugaucguggggguggcccuccuggccgucuuccacagcgccuccaagaucaucacgcugaagaagcgcuggcagcucgcgcugagcaagggcgugcacuucgugugcaaccugcuccugcuguucgucaccguguacucccaccuccugcugguggccgccgggcucgaggcccccuuccuguaccuguacgcgcucgucuacuuccugcagagcaucaacuucgugcggaucaucaugcgccuguggcucugcuggaagugccgguccaagaacccccugcuguacgacgccaacuacuuccucugcuggcacaccaacugcuacgacuacugcaucccguacaacagcgugaccuccagcaucgucaucacguccggcgacggcaccaccagccccaucuccgagcacgacuaccagaucgggggcuacaccgagaagugggagagcggggugaaggacugcgugguccugcacuccuacuucacgagcgacuacuaccagcuguacuccacccagcucagcaccgacaccggcguggagcacgugacguucuucaucuacaacaagaucgucgacgagcccgaggagcacgugcagauccacaccaucgacggguccagcggcguggucaaccccgugauggagccgaucuacgacgagcccaccaccacgaccagcgugccccugugaggacuagucccuguucccagagcccacuuuuuuuucuuuuuuugaaauaaaauagccugucuuucagaucuaaaaaaaaaaaaaaaaaaaaaaaaaaaaaaaaaaaaaaaaaaaaaaaaaaaaaaaaaaaaaaaaaaaaaaaaaaaaaaaaaaaaaaaaaaaaaaaaaaaa

SEQ ID NO: 28370 - RNA, 1073 nt, Artificial Sequence
  SARS-CoV-2/Wuhan-Hu-1__NC_045512.2/MN908947.2/EPI_ISL_402128__ORF 3a protein (ORF3a) mRNA gc (1-275)(Q57H_N257del)
aggagagucccgcagucggcguccagcggcucugcuuguucgugugugugucguugcaggccuuauucaagcuuaccauggaccuguucaugcgcaucuucaccaucggcaccgugacgcucaagcagggggagaucaaggacgccacccccagcgacuucguccgggccaccgcgaccaucccgauccaggccucccugcccuucggcuggcugaucguggggguggcccuccuggccgucuuccacagcgccuccaagaucaucacgcugaagaagcgcuggcagcucgcgcugagcaagggcgugcacuucgugugcaaccugcuccugcuguucgucaccguguacucccaccuccugcugguggccgccgggcucgaggcccccuuccuguaccuguacgcgcucgucuacuuccugcagagcaucaacuucgugcggaucaucaugcgccuguggcucugcuggaagugccgguccaagaacccccugcuguacgacgccaacuacuuccucugcuggcacaccaacugcuacgacuacugcaucccguacaacagcgugaccuccagcaucgucaucacguccggcgacggcaccaccagccccaucuccgagcacgacuaccagaucgggggcuacaccgagaagugggagagcggggugaaggacugcgugguccugcacuccuacuucacgagcgacuacuaccagcuguacuccacccagcucagcaccgacaccggcguggagcacgugacguucuucaucuacaacaagaucgucgacgagcccgaggagcacgugcagauccacaccaucgacggguccagcggcgugguccccgugauggagccgaucuacgacgagcccaccaccacgaccagcgugccccugugaggacuagucccuguucccagagcccacuuuuuuuucuuuuuuugaaauaaaauagccugucuuucagaucuaaaaaaaaaaaaaaaaaaaaaaaaaaaaaaaaaaaaaaaaaaaaaaaaaaaaaaaaaaaaaaaaaaaaaaaaaaaaaaaaaaaaaaaaaaaaaaaaaaaa

SEQ ID NO: 28371 - RNA, 1073 nt, Artificial Sequence
  SARS-CoV-2/Wuhan-Hu-1__NC_045512.2/MN908947.2/EPI_ISL_402128__ORF 3a protein (ORF3a) mRNA gc (1-275)(N257del)
aggagagucccgcagucggcguccagcggcucugcuuguucgugugugugucguugcaggccuuauucaagcuuaccauggaccuguucaugcgcaucuucaccaucggcaccgugacgcucaagcagggggagaucaaggacgccacccccagcgacuucguccgggccaccgcgaccaucccgauccaggccucccugcccuucggcuggcugaucguggggguggcccuccuggccgucuuccagagcgccuccaagaucaucacgcugaagaagcgcuggcagcucgcgcugagcaagggcgugcacuucgugugcaaccugcuccugcuguucgucaccguguacucccaccuccugcugguggccgccgggcucgaggcccccuuccuguaccuguacgcgcucgucuacuuccugcagagcaucaacuucgugcggaucaucaugcgccuguggcucugcuggaagugccgguccaagaacccccugcuguacgacgccaacuacuuccucugcuggcacaccaacugcuacgacuacugcaucccguacaacagcgugaccuccagcaucgucaucacguccggcgacggcaccaccagccccaucuccgagcacgacuaccagaucgggggcuacaccgagaagugggagagcggggugaaggacugcgugguccugcacuccuacuucacgagcgacuacuaccagcuguacuccacccagcucagcaccgacaccggcguggagcacgugacguucuucaucuacaacaagaucgucgacgagcccgaggagcacgugcagauccacaccaucgacggguccagcggcgugguccccgugauggagccgaucuacgacgagcccaccaccacgaccagcgugccccugugaggacuagucccuguucccagagcccacuuuuuuuucuuuuuuugaaauaaaauagccugucuuucagaucuaaaaaaaaaaaaaaaaaaaaaaaaaaaaaaaaaaaaaaaaaaaaaaaaaaaaaaaaaaaaaaaaaaaaaaaaaaaaaaaaaaaaaaaaaaaaaaaaaaaa

SEQ ID NO: 28372 - RNA, 1076 nt, Artificial Sequence
  SARS-CoV-2/Wuhan-Hu-1__NC_045512.2/MN908947.2/EPI_ISL_402128__ORF 3a protein (ORF3a) mRNA gc (1-275)(P42L_Q57H_P104L)
aggagagucccgcagucggcguccagcggcucugcuuguucgugugugugucguugcaggccuuauucaagcuuaccauggaccuguucaugcgcaucuucaccaucggcaccgugacgcucaagcagggggagaucaaggacgccacccccagcgacuucguccgggccaccgcgaccaucccgauccaggccucccugcuguucggcuggcugaucguggggguggcccuccuggccgucuuccacagcgccuccaagaucaucacgcugaagaagcgcuggcagcucgcgcugagcaagggcgugcacuucgugugcaaccugcuccugcuguucgucaccguguacucccaccuccugcugguggccgccgggcucgaggcccuguuccuguaccuguacgcgcucgucuacuuccugcagagcaucaacuucgugcggaucaucaugcgccuguggcucugcuggaagugccgguccaagaacccccugcuguacgacgccaacuacuuccucugcuggcacaccaacugcuacgacuacugcaucccguacaacagcgugaccuccagcaucgucaucacguccggcgacggcaccaccagccccaucuccgagcacgacuaccagaucgggggcuacaccgagaagugggagagcggggugaaggacugcgugguccugcacuccuacuucacgagcgacuacuaccagcuguacuccacccagcucagcaccgacaccggcguggagcacgugacguucuucaucuacaacaagaucgucgacgagcccgaggagcacgugcagauccacaccaucgacggguccagcggcguggucaaccccgugauggagccgaucuacgacgagcccaccaccacgaccagcgugccccugugaggacuagucccuguucccagagcccacuuuuuuuucuuuuuuugaaauaaaauagccugucuuucagaucuaaaaaaaaaaaaaaaaaaaaaaaaaaaaaaaaaaaaaaaaaaaaaaaaaaaaaaaaaaaaaaaaaaaaaaaaaaaaaaaaaaaaaaaaaaaaaaaaaaaa

SEQ ID NO: 28373 - RNA, 614 nt, Artificial Sequence
  SARS-CoV-2/Wuhan-Hu-1__NC_045512.2/MN908947.2/EPI_ISL_402128__ORF 8 protein (ORF8) mRNA gc (1-121)(R52I_Y73C)
aggagagucccgcagucggcguccagcggcucugcuuguucgugugugugucguugcaggccuuauucaagcuuaccaugaaguuccugguguuccucggcaucaucaccaccgucgccgccuuccaccaggagugcagccugcaguccugcacgcagcaccagcccuacgugguggacgacccgugccccauccacuucuacagcaagugguacauccgcgucggggccaucaaguccgcgccccugaucgagcucugcguggacgaggccggcagcaagucccccauccagugcaucgacaucgggaacuacaccgugagcugccugccguucaccaucaacugccaggagcccaagcugggcucccucgucgugcgcugcagcuucuacgaggacuuccuggaguaccacgacgugcgggucgugcuggacuucaucugaggacuagucccuguucccagagcccacuuuuuuuucuuuuuuugaaauaaaauagccugucuuucagaucuaaaaaaaaaaaaaaaaaaaaaaaaaaaaaaaaaaaaaaaaaaaaaaaaaaaaaaaaaaaaaaaaaaaaaaaaaaaaaaaaaaaaaaaaaaaaaaaaaaaa

SEQ ID NO: 28374 - RNA, 614 nt, Artificial Sequence
  SARS-CoV-2/Wuhan-Hu-1__NC_045512.2/MN908947.2/EPI_ISL_402128__ORF 8 protein (ORF8) mRNA gc (1-121)(E92K)
aggagagucccgcagucggcguccagcggcucugcuuguucgugugugugucguugcaggccuuauucaagcuuaccaugaaguuccugguguuccucggcaucaucaccaccgucgccgccuuccaccaggagugcagccugcaguccugcacgcagcaccagcccuacgugguggacgacccgugccccauccacuucuacagcaagugguacauccgcgucggggcccggaaguccgcgccccugaucgagcucugcguggacgaggccggcagcaagucccccauccaguacaucgacaucgggaacuacaccgugagcugccugccguucaccaucaacugccagaagcccaagcugggcucccucgucgugcgcugcagcuucuacgaggacuuccuggaguaccacgacgugcgggucgugcuggacuucaucugaggacuagucccuguucccagagcccacuuuuuuuucuuuuuuugaaauaaaauagccugucuuucagaucuaaaaaaaaaaaaaaaaaaaaaaaaaaaaaaaaaaaaaaaaaaaaaaaaaaaaaaaaaaaaaaaaaaaaaaaaaaaaaaaaaaaaaaaaaaaaaaaaaaaa

SEQ ID NO: 28375 - RNA, 608 nt, Artificial Sequence
  SARS-CoV-2/Wuhan-Hu-1__NC_045512.2/MN908947.2/EPI_ISL_402128__ORF 8 protein (ORF8) mRNA gc (1-121)(D119I_F120del_I121del)
aggagagucccgcagucggcguccagcggcucugcuuguucgugugugugucguugcaggccuuauucaagcuuaccaugaaguuccugguguuccucggcaucaucaccaccgucgccgccuuccaccaggagugcagccugcaguccugcacgcagcaccagcccuacgugguggacgacccgugccccauccacuucuacagcaagugguacauccgcgucggggcccggaaguccgcgccccugaucgagcucugcguggacgaggccggcagcaagucccccauccaguacaucgacaucgggaacuacaccgugagcugccugccguucaccaucaacugccaggagcccaagcugggcucccucgucgugcgcugcagcuucuacgaggacuuccuggaguaccacgacgugcgggucgugcugaucugaggacuagucccuguucccagagcccacuuuuuuuucuuuuuuugaaauaaaauagccugucuuucagaucuaaaaaaaaaaaaaaaaaaaaaaaaaaaaaaaaaaaaaaaaaaaaaaaaaaaaaaaaaaaaaaaaaaaaaaaaaaaaaaaaaaaaaaaaaaaaaaaaaaaa

SEQ ID NO: 28376 - RNA, 614 nt, Artificial Sequence
  SARS-CoV-2/Wuhan-Hu-1__NC_045512.2/MN908947.2/EPI_ISL_402128__ORF 8 protein (ORF8) mRNA gc (1-121)(K44R_F120V_I121L)
aggagagucccgcagucggcguccagcggcucugcuuguucgugugugugucguugcaggccuuauucaagcuuaccaugaaguuccugguguuccucggcaucaucaccaccgucgccgccuuccaccaggagugcagccugcaguccugcacgcagcaccagcccuacgugguggacgacccgugccccauccacuucuacagccgcugguacauccgcgucggggcccggaaguccgcgccccugaucgagcucugcguggacgaggccggcagcaagucccccauccaguacaucgacaucgggaacuacaccgugagcugccugccguucaccaucaacugccaggagcccaagcugggcucccucgucgugcgcugcagcuucuacgaggacuuccuggaguaccacgacgugcgggucgugcuggacgugcugugaggacuagucccuguucccagagcccacuuuuuuuucuuuuuuugaaauaaaauagccugucuuucagaucuaaaaaaaaaaaaaaaaaaaaaaaaaaaaaaaaaaaaaaaaaaaaaaaaaaaaaaaaaaaaaaaaaaaaaaaaaaaaaaaaaaaaaaaaaaaaaaaaaaaa

SEQ ID NO: 28377 - RNA, 614 nt, Artificial Sequence
  SARS-CoV-2/Wuhan-Hu-1__NC_045512.2/MN908947.2/EPI_ISL_402128__ORF 8 protein (ORF8) mRNA gc (1-121)(K2Q)
aggagagucccgcagucggcguccagcggcucugcuuguucgugugugugucguugcaggccuuauucaagcuuaccaugcaguuccugguguuccucggcaucaucaccaccgucgccgccuuccaccaggagugcagccugcaguccugcacgcagcaccagcccuacgugguggacgacccgugccccauccacuucuacagcaagugguacauccgcgucggggcccggaaguccgcgccccugaucgagcucugcguggacgaggccggcagcaagucccccauccaguacaucgacaucgggaacuacaccgugagcugccugccguucaccaucaacugccaggagcccaagcugggcucccucgucgugcgcugcagcuucuacgaggacuuccuggaguaccacgacgugcgggucgugcuggacuucaucugaggacuagucccuguucccagagcccacuuuuuuuucuuuuuuugaaauaaaauagccugucuuucagaucuaaaaaaaaaaaaaaaaaaaaaaaaaaaaaaaaaaaaaaaaaaaaaaaaaaaaaaaaaaaaaaaaaaaaaaaaaaaaaaaaaaaaaaaaaaaaaaaaaaaa

SEQ ID NO: 28378 - RNA, 614 nt, Artificial Sequence
  SARS-CoV-2/Wuhan-Hu-1__NC_045512.2/MN908947.2/EPI_ISL_402128__ORF 8 protein (ORF8) mRNA gc (1-121)(T11I)
aggagagucccgcagucggcguccagcggcucugcuuguucgugugugugucguugcaggccuuauucaagcuuaccaugaaguuccugguguuccucggcaucaucaucaccgucgccgccuuccaccaggagugcagccugcaguccugcacgcagcaccagcccuacgugguggacgacccgugccccauccacuucuacagcaagugguacauccgcgucggggcccggaaguccgcgccccugaucgagcucugcguggacgaggccggcagcaagucccccauccaguacaucgacaucgggaacuacaccgugagcugccugccguucaccaucaacugccaggagcccaagcugggcucccucgucgugcgcugcagcuucuacgaggacuuccuggaguaccacgacgugcgggucgugcuggacuucaucugaggacuagucccuguucccagagcccacuuuuuuuucuuuuuuugaaauaaaauagccugucuuucagaucuaaaaaaaaaaaaaaaaaaaaaaaaaaaaaaaaaaaaaaaaaaaaaaaaaaaaaaaaaaaaaaaaaaaaaaaaaaaaaaaaaaaaaaaaaaaaaaaaaaaa

SEQ ID NO: 28379 - RNA, 614 nt, Artificial Sequence
  SARS-CoV-2/Wuhan-Hu-1__NC_045512.2/MN908947.2/EPI_ISL_402128__ORF 8 protein (ORF8) mRNA gc (1-121)(T11K_P38S_S67F)
aggagagucccgcagucggcguccagcggcucugcuuguucgugugugugucguugcaggccuuauucaagcuuaccaugaaguuccugguguuccucggcaucaucaagaccgucgccgccuuccaccaggagugcagccugcaguccugcacgcagcaccagcccuacgugguggacgacccgugcagcauccacuucuacagcaagugguacauccgcgucggggcccggaaguccgcgccccugaucgagcucugcguggacgaggccggcuucaagucccccauccaguacaucgacaucgggaacuacaccgugagcugccugccguucaccaucaacugccaggagcccaagcugggcucccucgucgugcgcugcagcuucuacgaggacuuccuggaguaccacgacgugcgggucgugcuggacuucaucugaggacuagucccuguucccagagcccacuuuuuuuucuuuuuuugaaauaaaauagccugucuuucagaucuaaaaaaaaaaaaaaaaaaaaaaaaaaaaaaaaaaaaaaaaaaaaaaaaaaaaaaaaaaaaaaaaaaaaaaaaaaaaaaaaaaaaaaaaaaaaaaaaaaaa

SEQ ID NO: 28380 - RNA, 614 nt, Artificial Sequence
  SARS-CoV-2/Wuhan-Hu-1__NC_045512.2/MN908947.2/EPI_ISL_402128__ORF 8 protein (ORF8) mRNA gc (1-121)(T26I)
aggagagucccgcagucggcguccagcggcucugcuuguucgugugugugucguugcaggccuuauucaagcuuaccaugaaguuccugguguuccucggcaucaucaccaccgucgccgccuuccaccaggagugcagccugcaguccugcauccagcaccagcccuacgugguggacgacccgugccccauccacuucuacagcaagugguacauccgcgucggggcccggaaguccgcgccccugaucgagcucugcguggacgaggccggcagcaagucccccauccaguacaucgacaucgggaacuacaccgugagcugccugccguucaccaucaacugccaggagcccaagcugggcucccucgucgugcgcugcagcuucuacgaggacuuccuggaguaccacgacgugcgggucgugcuggacuucaucugaggacuagucccuguucccagagcccacuuuuuuuucuuuuuuugaaauaaaauagccugucuuucagaucuaaaaaaaaaaaaaaaaaaaaaaaaaaaaaaaaaaaaaaaaaaaaaaaaaaaaaaaaaaaaaaaaaaaaaaaaaaaaaaaaaaaaaaaaaaaaaaaaaaaa

SEQ ID NO: 28381 - RNA, 614 nt, Artificial Sequence
  SARS-CoV-2/Wuhan-Hu-1__NC_045512.2/MN908947.2/EPI_ISL_402128__ORF 8 protein (ORF8) mRNA gc (1-121)(F3Y)
aggagagucccgcagucggcguccagcggcucugcuuguucgugugugugucguugcaggccuuauucaagcuuaccaugaaguaccugguguuccucggcaucaucaccaccgucgccgccuuccaccaggagugcagccugcaguccugcacgcagcaccagcccuacgugguggacgacccgugccccauccacuucuacagcaagugguacauccgcgucggggcccggaaguccgcgccccugaucgagcucugcguggacgaggccggcagcaagucccccauccaguacaucgacaucgggaacuacaccgugagcugccugccguucaccaucaacugccaggagcccaagcugggcucccucgucgugcgcugcagcuucuacgaggacuuccuggaguaccacgacgugcgggucgugcuggacuucaucugaggacuagucccuguucccagagcccacuuuuuuuucuuuuuuugaaauaaaauagccugucuuucagaucuaaaaaaaaaaaaaaaaaaaaaaaaaaaaaaaaaaaaaaaaaaaaaaaaaaaaaaaaaaaaaaaaaaaaaaaaaaaaaaaaaaaaaaaaaaaaaaaaaaaa

SEQ ID NO: 28382 - RNA, 614 nt, Artificial Sequence
  SARS-CoV-2/Wuhan-Hu-1__NC_045512.2/MN908947.2/EPI_ISL_402128__ORF 8 protein (ORF8) mRNA gc (1-121)(T11I_A51S)
aggagagucccgcagucggcguccagcggcucugcuuguucgugugugugucguugcaggccuuauucaagcuuaccaugaaguuccugguguuccucggcaucaucaucaccgucgccgccuuccaccaggagugcagccugcaguccugcacgcagcaccagcccuacgugguggacgacccgugccccauccacuucuacagcaagugguacauccgcgucgggagccggaaguccgcgccccugaucgagcucugcguggacgaggccggcagcaagucccccauccaguacaucgacaucgggaacuacaccgugagcugccugccguucaccaucaacugccaggagcccaagcugggcucccucgucgugcgcugcagcuucuacgaggacuuccuggaguaccacgacgugcgggucgugcuggacuucaucugaggacuagucccuguucccagagcccacuuuuuuuucuuuuuuugaaauaaaauagccugucuuucagaucuaaaaaaaaaaaaaaaaaaaaaaaaaaaaaaaaaaaaaaaaaaaaaaaaaaaaaaaaaaaaaaaaaaaaaaaaaaaaaaaaaaaaaaaaaaaaaaaaaaaa

SEQ ID NO: 28383 - RNA, 614 nt, Artificial Sequence
  SARS-CoV-2/Wuhan-Hu-1__NC_045512.2/MN908947.2/EPI_ISL_402128__ORF 8 protein (ORF8) mRNA gc (1-121)(V32L_V100L)
aggagagucccgcagucggcguccagcggcucugcuuguucgugugugugucguugcaggccuuauucaagcuuaccaugaaguuccugguguuccucggcaucaucaccaccgucgccgccuuccaccaggagugcagccugcaguccugcacgcagcaccagcccuaccugguggacgacccgugccccauccacuucuacagcaagugguacauccgcgucggggcccggaaguccgcgccccugaucgagcucugcguggacgaggccggcagcaagucccccauccaguacaucgacaucgggaacuacaccgugagcugccugccguucaccaucaacugccaggagcccaagcugggcucccucguccugcgcugcagcuucuacgaggacuuccuggaguaccacgacgugcgggucgugcuggacuucaucugaggacuagucccuguucccagagcccacuuuuuuuucuuuuuuugaaauaaaauagccugucuuucagaucuaaaaaaaaaaaaaaaaaaaaaaaaaaaaaaaaaaaaaaaaaaaaaaaaaaaaaaaaaaaaaaaaaaaaaaaaaaaaaaaaaaaaaaaaaaaaaaaaaaaa

SEQ ID NO: 28384 - RNA, 614 nt, Artificial Sequence
  SARS-CoV-2/Wuhan-Hu-1__NC_045512.2/MN908947.2/EPI_ISL_402128__ORF 8 protein (ORF8) mRNA gc (1-121)(A65V)
aggagagucccgcagucggcguccagcggcucugcuuguucgugugugugucguugcaggccuuauucaagcuuaccaugaaguuccugguguuccucggcaucaucaccaccgucgccgccuuccaccaggagugcagccugcaguccugcacgcagcaccagcccuacgugguggacgacccgugccccauccacuucuacagcaagugguacauccgcgucggggcccggaaguccgcgccccugaucgagcucugcguggacgaggugggcagcaagucccccauccaguacaucgacaucgggaacuacaccgugagcugccugccguucaccaucaacugccaggagcccaagcugggcucccucgucgugcgcugcagcuucuacgaggacuuccuggaguaccacgacgugcgggucgugcuggacuucaucugaggacuagucccuguucccagagcccacuuuuuuuucuuuuuuugaaauaaaauagccugucuuucagaucuaaaaaaaaaaaaaaaaaaaaaaaaaaaaaaaaaaaaaaaaaaaaaaaaaaaaaaaaaaaaaaaaaaaaaaaaaaaaaaaaaaaaaaaaaaaaaaaaaaaa

SEQ ID NO: 28385 - RNA, 2057 nt, Artificial Sequence
  SARS-CoV-2/Wuhan-Hu-1__NC_045512.2/MN908947.2/EPI_ISL_402128__non -structural protein 13 (NSP13) mRNA gc (1-602)(P78L)
aggagagucccgcagucggcguccagcggcucugcuuguucgugugugugucguugcaggccuuauucaagcuuaccauggccgugggcgccugcguccugugcaacagccagaccucccuccgcugcggggcgugcauccggcgccccuuccugugcugcaagugcugcuacgaccacgugaucagcaccucccacaagcuggugcucagcgucaacccguacgugugcaacgcccccggcugcgacgugacggacgucacccagcuguaccucgggggcauguccuacuacugcaagagccacaagcugcccaucuccuucccccugugcgccaacggccagguguucggccuguacaagaacacgugcgugggcagcgacaacgucaccgacuucaacgccaucgcgaccugcgacuggaccaacgccggggacuacauccuggccaacacgugcaccgagcggcucaagcuguucgccgccgagacccugaaggcgaccgaggagaccuucaagcucuccuacggcaucgccaccgugcgcgaggugcugagcgaccgggagcugcaccucuccugggaggucgggaagccccgcccgccccugaaccggaacuacguguucacgggcuaccgcgugaccaagaacagcaagguccagaucggggaguacaccuucgagaagggcgacuacggcgacgccgugguguaccgggggaccacgaccuacaagcugaacgucggcgacuacuucgugcucaccucccacaccgugaugccccugagcgcccccacgcuggucccccaggagcacuacgugcgcaucaccgggcucuaccccacccugaacaucuccgacgaguucagcuccaacguggccaacuaccagaaggucggcaugcagaaguacagcacccugcagggcccgcccgggacgggcaagucccacuucgcgaucgggcucgcccuguacuaccccagcgcccggaucguguacaccgccugcagccacgccgcggucgacgcccugugcgagaaggcccucaaguaccugcccaucgacaagugcucccgcaucaucccggcccgggcccgcguggagugcuucgacaaguucaaggugaacagcacccuggagcaguacgucuucugcaccgugaacgcgcuccccgagacgaccgccgacaucguggucuucgacgagaucuccauggccaccaacuacgaccugagcguggugaacgcccggcugcgcgccaagcacuacgucuacaucggcgaccccgcgcagcuccccgccccgcggacccugcugacgaaggggacccucgagcccgaguacuucaacuccgugugccgccugaugaagaccaucggccccgacauguuccuggggaccugccggcgcugccccgccgagaucguggacacggucagcgcccucguguacgacaacaagcugaaggcgcacaaggacaaguccgcccagugcuucaagauguucuacaagggggugaucacccacgacgucagcuccgccaucaaccggccgcagaucggcguggugcgcgaguuccugacccgcaaccccgccuggcggaaggccgucuucaucagccccuacaacucccagaacgcgguggccagcaagauccucgggcugcccacccagaccguggacuccagccagggcuccgaguacgacuacgucaucuucacgcagaccaccgagaccgcccacagcugcaacgugaaccgcuucaacguggccaucacgcgggccaaggucgggauccugugcaucauguccgaccgcgaccucuacgacaagcugcaguucaccagccuggagaucccgcggcgcaacguggcgacccugcagugaggacuagucccuguucccagagcccacuuuuuuuucuuuuuuugaaauaaaauagccugucuuucagaucuaaaaaaaaaaaaaaaaaaaaaaaaaaaaaaaaaaaaaaaaaaaaaaaaaaaaaaaaaaaaaaaaaaaaaaaaaaaaaaaaaaaaaaaaaaaaaaaaaaaa

SEQ ID NO: 28386 - RNA, 2057 nt, Artificial Sequence
  SARS-CoV-2/Wuhan-Hu-1__NC_045512.2/MN908947.2/EPI_ISL_402128__non -structural protein 13 (NSP13) mRNA gc (1-602)(P79S_K461R)
aggagagucccgcagucggcguccagcggcucugcuuguucgugugugugucguugcaggccuuauucaagcuuaccauggccgugggcgccugcguccugugcaacagccagaccucccuccgcugcggggcgugcauccggcgccccuuccugugcugcaagugcugcuacgaccacgugaucagcaccucccacaagcuggugcucagcgucaacccguacgugugcaacgcccccggcugcgacgugacggacgucacccagcuguaccucgggggcauguccuacuacugcaagagccacaagccgagcaucuccuucccccugugcgccaacggccagguguucggccuguacaagaacacgugcgugggcagcgacaacgucaccgacuucaacgccaucgcgaccugcgacuggaccaacgccggggacuacauccuggccaacacgugcaccgagcggcucaagcuguucgccgccgagacccugaaggcgaccgaggagaccuucaagcucuccuacggcaucgccaccgugcgcgaggugcugagcgaccgggagcugcaccucuccugggaggucgggaagccccgcccgccccugaaccggaacuacguguucacgggcuaccgcgugaccaagaacagcaagguccagaucggggaguacaccuucgagaagggcgacuacggcgacgccgugguguaccgggggaccacgaccuacaagcugaacgucggcgacuacuucgugcucaccucccacaccgugaugccccugagcgcccccacgcuggucccccaggagcacuacgugcgcaucaccgggcucuaccccacccugaacaucuccgacgaguucagcuccaacguggccaacuaccagaaggucggcaugcagaaguacagcacccugcagggcccgcccgggacgggcaagucccacuucgcgaucgggcucgcccuguacuaccccagcgcccggaucguguacaccgccugcagccacgccgcggucgacgcccugugcgagaaggcccucaaguaccugcccaucgacaagugcucccgcaucaucccggcccgggcccgcguggagugcuucgacaaguucaaggugaacagcacccuggagcaguacgucuucugcaccgugaacgcgcuccccgagacgaccgccgacaucguggucuucgacgagaucuccauggccaccaacuacgaccugagcguggugaacgcccggcugcgcgccaagcacuacgucuacaucggcgaccccgcgcagcuccccgccccgcggacccugcugacgaaggggacccucgagcccgaguacuucaacuccgugugccgccugaugaagaccaucggccccgacauguuccuggggaccugccggcgcugccccgccgagaucguggacacggucagcgcccucguguacgacaacagccugaaggcgcacaaggacaaguccgcccagugcuucaagauguucuacaagggggugaucacccacgacgucagcuccgccaucaaccggccgcagaucggcguggugcgcgaguuccugacccgcaaccccgccuggcggaaggccgucuucaucagccccuacaacucccagaacgcgguggccagcaagauccucgggcugcccacccagaccguggacuccagccagggcuccgaguacgacuacgucaucuucacgcagaccaccgagaccgcccacagcugcaacgugaaccgcuucaacguggccaucacgcgggccaaggucgggauccugugcaucauguccgaccgcgaccucuacgacaagcugcaguucaccagccuggagaucccgcggcgcaacguggcgacccugcagugaggacuagucccuguucccagagcccacuuuuuuuucuuuuuuugaaauaaaauagccugucuuucagaucuaaaaaaaaaaaaaaaaaaaaaaaaaaaaaaaaaaaaaaaaaaaaaaaaaaaaaaaaaaaaaaaaaaaaaaaaaaaaaaaaaaaaaaaaaaaaaaaaaaaa

SEQ ID NO: 28387 - RNA, 2057 nt, Artificial Sequence
  SARS-CoV-2/Wuhan-Hu-1__NC_045512.2/MN908947.2/EPI_ISL_402128__non -structural protein 13 (NSP13) mRNA gc (1-602)(E342D)
aggagagucccgcagucggcguccagcggcucugcuuguucgugugugugucguugcaggccuuauucaagcuuaccauggccgugggcgccugcguccugugcaacagccagaccucccuccgcugcggggcgugcauccggcgccccuuccugugcugcaagugcugcuacgaccacgugaucagcaccucccacaagcuggugcucagcgucaacccguacgugugcaacgcccccggcugcgacgugacggacgucacccagcuguaccucgggggcauguccuacuacugcaagagccacaagccgcccaucuccuucccccugugcgccaacggccagguguucggccuguacaagaacacgugcgugggcagcgacaacgucaccgacuucaacgccaucgcgaccugcgacuggaccaacgccggggacuacauccuggccaacacgugcaccgagcggcucaagcuguucgccgccgagacccugaaggcgaccgaggagaccuucaagcucuccuacggcaucgccaccgugcgcgaggugcugagcgaccgggagcugcaccucuccugggaggucgggaagccccgcccgccccugaaccggaacuacguguucacgggcuaccgcgugaccaagaacagcaagguccagaucggggaguacaccuucgagaagggcgacuacggcgacgccgugguguaccgggggaccacgaccuacaagcugaacgucggcgacuacuucgugcucaccucccacaccgugaugccccugagcgcccccacgcuggucccccaggagcacuacgugcgcaucaccgggcucuaccccacccugaacaucuccgacgaguucagcuccaacguggccaacuaccagaaggucggcaugcagaaguacagcacccugcagggcccgcccgggacgggcaagucccacuucgcgaucgggcucgcccuguacuaccccagcgcccggaucguguacaccgccugcagccacgccgcggucgacgcccugugcgagaaggcccucaaguaccugcccaucgacaagugcucccgcaucaucccggcccgggcccgcguggacugcuucgacaaguucaaggugaacagcacccuggagcaguacgucuucugcaccgugaacgcgcuccccgagacgaccgccgacaucguggucuucgacgagaucuccauggccaccaacuacgaccugagcguggugaacgcccggcugcgcgccaagcacuacgucuacaucggcgaccccgcgcagcuccccgccccgcggacccugcugacgaaggggacccucgagcccgaguacuucaacuccgugugccgccugaugaagaccaucggccccgacauguuccuggggaccugccggcgcugccccgccgagaucguggacacggucagcgcccucguguacgacaacaagcugaaggcgcacaaggacaaguccgcccagugcuucaagauguucuacaagggggugaucacccacgacgucagcuccgccaucaaccggccgcagaucggcguggugcgcgaguuccugacccgcaaccccgccuggcggaaggccgucuucaucagccccuacaacucccagaacgcgguggccagcaagauccucgggcugcccacccagaccguggacuccagccagggcuccgaguacgacuacgucaucuucacgcagaccaccgagaccgcccacagcugcaacgugaaccgcuucaacguggccaucacgcgggccaaggucgggauccugugcaucauguccgaccgcgaccucuacgacaagcugcaguucaccagccuggagaucccgcggcgcaacguggcgacccugcagugaggacuagucccuguucccagagcccacuuuuuuuucuuuuuuugaaauaaaauagccugucuuucagaucuaaaaaaaaaaaaaaaaaaaaaaaaaaaaaaaaaaaaaaaaaaaaaaaaaaaaaaaaaaaaaaaaaaaaaaaaaaaaaaaaaaaaaaaaaaaaaaaaaaaa

SEQ ID NO: 28388 - RNA, 2057 nt, Artificial Sequence
  SARS-CoV-2/Wuhan-Hu-1__NC_045512.2/MN908947.2/EPI_ISL_402128__non -structural protein 13 (NSP13) mRNA gc (1-602)(T589I)
aggagagucccgcagucggcguccagcggcucugcuuguucgugugugugucguugcaggccuuauucaagcuuaccauggccgugggcgccugcguccugugcaacagccagaccucccuccgcugcggggcgugcauccggcgccccuuccugugcugcaagugcugcuacgaccacgugaucagcaccucccacaagcuggugcucagcgucaacccguacgugugcaacgcccccggcugcgacgugacggacgucacccagcuguaccucgggggcauguccuacuacugcaagagccacaagccgcccaucuccuucccccugugcgccaacggccagguguucggccuguacaagaacacgugcgugggcagcgacaacgucaccgacuucaacgccaucgcgaccugcgacuggaccaacgccggggacuacauccuggccaacacgugcaccgagcggcucaagcuguucgccgccgagacccugaaggcgaccgaggagaccuucaagcucuccuacggcaucgccaccgugcgcgaggugcugagcgaccgggagcugcaccucuccugggaggucgggaagccccgcccgccccugaaccggaacuacguguucacgggcuaccgcgugaccaagaacagcaagguccagaucggggaguacaccuucgagaagggcgacuacggcgacgccgugguguaccgggggaccacgaccuacaagcugaacgucggcgacuacuucgugcucaccucccacaccgugaugccccugagcgcccccacgcuggucccccaggagcacuacgugcgcaucaccgggcucuaccccacccugaacaucuccgacgaguucagcuccaacguggccaacuaccagaaggucggcaugcagaaguacagcacccugcagggcccgcccgggacgggcaagucccacuucgcgaucgggcucgcccuguacuaccccagcgcccggaucguguacaccgccugcagccacgccgcggucgacgcccugugcgagaaggcccucaaguaccugcccaucgacaagugcucccgcaucaucccggcccgggcccgcguggagugcuucgacaaguucaaggugaacagcacccuggagcaguacgucuucugcaccgugaacgcgcuccccgagacgaccgccgacaucguggucuucgacgagaucuccauggccaccaacuacgaccugagcguggugaacgcccggcugcgcgccaagcacuacgucuacaucggcgaccccgcgcagcuccccgccccgcggacccugcugacgaaggggacccucgagcccgaguacuucaacuccgugugccgccugaugaagaccaucggccccgacauguuccuggggaccugccggcgcugccccgccgagaucguggacacggucagcgcccucguguacgacaacaagcugaaggcgcacaaggacaaguccgcccagugcuucaagauguucuacaagggggugaucacccacgacgucagcuccgccaucaaccggccgcagaucggcguggugcgcgaguuccugacccgcaaccccgccuggcggaaggccgucuucaucagccccuacaacucccagaacgcgguggccagcaagauccucgggcugcccacccagaccguggacuccagccagggcuccgaguacgacuacgucaucuucacgcagaccaccgagaccgcccacagcugcaacgugaaccgcuucaacguggccaucacgcgggccaaggucgggauccugugcaucauguccgaccgcgaccucuacgacaagcugcaguucaucagccuggagaucccgcggcgcaacguggcgacccugcagugaggacuagucccuguucccagagcccacuuuuuuuucuuuuuuugaaauaaaauagccugucuuucagaucuaaaaaaaaaaaaaaaaaaaaaaaaaaaaaaaaaaaaaaaaaaaaaaaaaaaaaaaaaaaaaaaaaaaaaaaaaaaaaaaaaaaaaaaaaaaaaaaaaaaa

SEQ ID NO: 28389 - RNA, 2057 nt, Artificial Sequence
  SARS-CoV-2/Wuhan-Hu-1__NC_045512.2/MN908947.2/EPI_ISL_402128__non -structural protein 13 (NSP13) mRNA gc (1-602)(P54L_D261Y)
aggagagucccgcagucggcguccagcggcucugcuuguucgugugugugucguugcaggccuuauucaagcuuaccauggccgugggcgccugcguccugugcaacagccagaccucccuccgcugcggggcgugcauccggcgccccuuccugugcugcaagugcugcuacgaccacgugaucagcaccucccacaagcuggugcucagcgucaacccguacgugugcaacgcccugggcugcgacgugacggacgucacccagcuguaccucgggggcauguccuacuacugcaagagccacaagccgcccaucuccuucccccugugcgccaacggccagguguucggccuguacaagaacacgugcgugggcagcgacaacgucaccgacuucaacgccaucgcgaccugcgacuggaccaacgccggggacuacauccuggccaacacgugcaccgagcggcucaagcuguucgccgccgagacccugaaggcgaccgaggagaccuucaagcucuccuacggcaucgccaccgugcgcgaggugcugagcgaccgggagcugcaccucuccugggaggucgggaagccccgcccgccccugaaccggaacuacguguucacgggcuaccgcgugaccaagaacagcaagguccagaucggggaguacaccuucgagaagggcgacuacggcgacgccgugguguaccgggggaccacgaccuacaagcugaacgucggcgacuacuucgugcucaccucccacaccgugaugccccugagcgcccccacgcuggucccccaggagcacuacgugcgcaucaccgggcucuaccccacccugaacaucuccuacgaguucagcuccaacguggccaacuaccagaaggucggcaugcagaaguacagcacccugcagggcccgcccgggacgggcaagucccacuucgcgaucgggcucgcccuguacuaccccagcgcccggaucguguacaccgccugcagccacgccgcggucgacgcccugugcgagaaggcccucaaguaccugcccaucgacaagugcucccgcaucaucccggcccgggcccgcguggagugcuucgacaaguucaaggugaacagcacccuggagcaguacgucuucugcaccgugaacgcgcuccccgagacgaccgccgacaucguggucuucgacgagaucuccauggccaccaacuacgaccugagcguggugaacgcccggcugcgcgccaagcacuacgucuacaucggcgaccccgcgcagcuccccgccccgcggacccugcugacgaaggggacccucgagcccgaguacuucaacuccgugugccgccugaugaagaccaucggccccgacauguuccuggggaccugccggcgcugccccgccgagaucguggacacggucagcgcccucguguacgacaacaagcugaaggcgcacaaggacaaguccgcccagugcuucaagauguucuacaagggggugaucacccacgacgucagcuccgccaucaaccggccgcagaucggcguggugcgcgaguuccugacccgcaaccccgccuggcggaaggccgucuucaucagccccuacaacucccagaacgcgguggccagcaagauccucgggcugcccacccagaccguggacuccagccagggcuccgaguacgacuacgucaucuucacgcagaccaccgagaccgcccacagcugcaacgugaaccgcuucaacguggccaucacgcgggccaaggucgggauccugugcaucauguccgaccgcgaccucuacgacaagcugcaguucaccagccuggagaucccgcggcgcaacguggcgacccugcagugaggacuagucccuguucccagagcccacuuuuuuuucuuuuuuugaaauaaaauagccugucuuucagaucuaaaaaaaaaaaaaaaaaaaaaaaaaaaaaaaaaaaaaaaaaaaaaaaaaaaaaaaaaaaaaaaaaaaaaaaaaaaaaaaaaaaaaaaaaaaaaaaaaaaa

SEQ ID NO: 28390 - RNA, 2057 nt, Artificial Sequence
  SARS-CoV-2/Wuhan-Hu-1__NC_045512.2/MN908947.2/EPI_ISL_402128__non -structural protein 13 (NSP13) mRNA gc (1-602)(Q89H_H165Y)
aggagagucccgcagucggcguccagcggcucugcuuguucgugugugugucguugcaggccuuauucaagcuuaccauggccgugggcgccugcguccugugcaacagccagaccucccuccgcugcggggcgugcauccggcgccccuuccugugcugcaagugcugcuacgaccacgugaucagcaccucccacaagcuggugcucagcgucaacccguacgugugcaacgcccccggcugcgacgugacggacgucacccagcuguaccucgggggcauguccuacuacugcaagagccacaagccgcccaucuccuucccccugugcgccaacggccacguguucggccuguacaagaacacgugcgugggcagcgacaacgucaccgacuucaacgccaucgcgaccugcgacuggaccaacgccggggacuacauccuggccaacacgugcaccgagcggcucaagcuguucgccgccgagacccugaaggcgaccgaggagaccuucaagcucuccuacggcaucgccaccgugcgcgaggugcugagcgaccgggagcuguaccucuccugggaggucgggaagccccgcccgccccugaaccggaacuacguguucacgggcuaccgcgugaccaagaacagcaagguccagaucggggaguacaccuucgagaagggcgacuacggcgacgccgugguguaccgggggaccacgaccuacaagcugaacgucggcgacuacuucgugcucaccucccacaccgugaugccccugagcgcccccacgcuggucccccaggagcacuacgugcgcaucaccgggcucuaccccacccugaacaucuccgacgaguucagcuccaacguggccaacuaccagaaggucggcaugcagaaguacagcacccugcagggcccgcccgggacgggcaagucccacuucgcgaucgggcucgcccuguacuaccccagcgcccggaucguguacaccgccugcagccacgccgcggucgacgcccugugcgagaaggcccucaaguaccugcccaucgacaagugcucccgcaucaucccggcccgggcccgcguggagugcuucgacaaguucaaggugaacagcacccuggagcaguacgucuucugcaccgugaacgcgcuccccgagacgaccgccgacaucguggucuucgacgagaucuccauggccaccaacuacgaccugagcguggugaacgcccggcugcgcgccaagcacuacgucuacaucggcgaccccgcgcagcuccccgccccgcggacccugcugacgaaggggacccucgagcccgaguacuucaacuccgugugccgccugaugaagaccaucggccccgacauguuccuggggaccugccggcgcugccccgccgagaucguggacacggucagcgcccucguguacgacaacaagcugaaggcgcacaaggacaaguccgcccagugcuucaagauguucuacaagggggugaucacccacgacgucagcuccgccaucaaccggccgcagaucggcguggugcgcgaguuccugacccgcaaccccgccuggcggaaggccgucuucaucagccccuacaacucccagaacgcgguggccagcaagauccucgggcugcccacccagaccguggacuccagccagggcuccgaguacgacuacgucaucuucacgcagaccaccgagaccgcccacagcugcaacgugaaccgcuucaacguggccaucacgcgggccaaggucgggauccugugcaucauguccgaccgcgaccucuacgacaagcugcaguucaccagccuggagaucccgcggcgcaacguggcgacccugcagugaggacuagucccuguucccagagcccacuuuuuuuucuuuuuuugaaauaaaauagccugucuuucagaucuaaaaaaaaaaaaaaaaaaaaaaaaaaaaaaaaaaaaaaaaaaaaaaaaaaaaaaaaaaaaaaaaaaaaaaaaaaaaaaaaaaaaaaaaaaaaaaaaaaaa

SEQ ID NO: 28391 - RNA, 2057 nt, Artificial Sequence
  SARS-CoV-2/Wuhan-Hu-1__NC_045512.2/MN908947.2/EPI_ISL_402128__non -structural protein 13 (NSP13) mRNA gc (1-602)(D106Y_P530L)
aggagagucccgcagucggcguccagcggcucugcuuguucgugugugugucguugcaggccuuauucaagcuuaccauggccgugggcgccugcguccugugcaacagccagaccucccuccgcugcggggcgugcauccggcgccccuuccugugcugcaagugcugcuacgaccacgugaucagcaccucccacaagcuggugcucagcgucaacccguacgugugcaacgcccccggcugcgacgugacggacgucacccagcuguaccucgggggcauguccuacuacugcaagagccacaagccgcccaucuccuucccccugugcgccaacggccagguguucggccuguacaagaacacgugcgugggcagcgacaacgucaccuacuucaacgccaucgcgaccugcgacuggaccaacgccggggacuacauccuggccaacacgugcaccgagcggcucaagcuguucgccgccgagacccugaaggcgaccgaggagaccuucaagcucuccuacggcaucgccaccgugcgcgaggugcugagcgaccgggagcugcaccucuccugggaggucgggaagccccgcccgccccugaaccggaacuacguguucacgggcuaccgcgugaccaagaacagcaagguccagaucggggaguacaccuucgagaagggcgacuacggcgacgccgugguguaccgggggaccacgaccuacaagcugaacgucggcgacuacuucgugcucaccucccacaccgugaugccccugagcgcccccacgcuggucccccaggagcacuacgugcgcaucaccgggcucuaccccacccugaacaucuccgacgaguucagcuccaacguggccaacuaccagaaggucggcaugcagaaguacagcacccugcagggcccgcccgggacgggcaagucccacuucgcgaucgggcucgcccuguacuaccccagcgcccggaucguguacaccgccugcagccacgccgcggucgacgcccugugcgagaaggcccucaaguaccugcccaucgacaagugcucccgcaucaucccggcccgggcccgcguggagugcuucgacaaguucaaggugaacagcacccuggagcaguacgucuucugcaccgugaacgcgcuccccgagacgaccgccgacaucguggucuucgacgagaucuccauggccaccaacuacgaccugagcguggugaacgcccggcugcgcgccaagcacuacgucuacaucggcgaccccgcgcagcuccccgccccgcggacccugcugacgaaggggacccucgagcccgaguacuucaacuccgugugccgccugaugaagaccaucggccccgacauguuccuggggaccugccggcgcugccccgccgagaucguggacacggucagcgcccucguguacgacaacaagcugaaggcgcacaaggacaaguccgcccagugcuucaagauguucuacaagggggugaucacccacgacgucagcuccgccaucaaccggccgcagaucggcguggugcgcgaguuccugacccgcaaccccgccuggcggaaggccgucuucaucagccccuacaacucccagaacgcgguggccagcaagauccucgggcugcugacccagaccguggacuccagccagggcuccgaguacgacuacgucaucuucacgcagaccaccgagaccgcccacagcugcaacgugaaccgcuucaacguggccaucacgcgggccaaggucgggauccugugcaucauguccgaccgcgaccucuacgacaagcugcaguucaccagccuggagaucccgcggcgcaacguggcgacccugcagugaggacuagucccuguucccagagcccacuuuuuuuucuuuuuuugaaauaaaauagccugucuuucagaucuaaaaaaaaaaaaaaaaaaaaaaaaaaaaaaaaaaaaaaaaaaaaaaaaaaaaaaaaaaaaaaaaaaaaaaaaaaaaaaaaaaaaaaaaaaaaaaaaaaaa

SEQ ID NO: 28392 - RNA, 2057 nt, Artificial Sequence
  SARS-CoV-2/Wuhan-Hu-1__NC_045512.2/MN908947.2/EPI_ISL_402128__non -structural protein 13 (NSP13) mRNA gc (1-602)(P173H_E262D_P420S_P492S)
aggagagucccgcagucggcguccagcggcucugcuuguucgugugugugucguugcaggccuuauucaagcuuaccauggccgugggcgccugcguccugugcaacagccagaccucccuccgcugcggggcgugcauccggcgccccuuccugugcugcaagugcugcuacgaccacgugaucagcaccucccacaagcuggugcucagcgucaacccguacgugugcaacgcccccggcugcgacgugacggacgucacccagcuguaccucgggggcauguccuacuacugcaagagccacaagccgcccaucuccuucccccugugcgccaacggccagguguucggccuguacaagaacacgugcgugggcagcgacaacgucaccgacuucaacgccaucgcgaccugcgacuggaccaacgccggggacuacauccuggccaacacgugcaccgagcggcucaagcuguucgccgccgagacccugaaggcgaccgaggagaccuucaagcucuccuacggcaucgccaccgugcgcgaggugcugagcgaccgggagcugcaccucuccugggaggucgggaagcaccgcccgccccugaaccggaacuacguguucacgggcuaccgcgugaccaagaacagcaagguccagaucggggaguacaccuucgagaagggcgacuacggcgacgccgugguguaccgggggaccacgaccuacaagcugaacgucggcgacuacuucgugcucaccucccacaccgugaugccccugagcgcccccacgcuggucccccaggagcacuacgugcgcaucaccgggcucuaccccacccugaacaucuccgacgacuucagcuccaacguggccaacuaccagaaggucggcaugcagaaguacagcacccugcagggcccgcccgggacgggcaagucccacuucgcgaucgggcucgcccuguacuaccccagcgcccggaucguguacaccgccugcagccacgccgcggucgacgcccugugcgagaaggcccucaaguaccugcccaucgacaagugcucccgcaucaucccggcccgggcccgcguggagugcuucgacaaguucaaggugaacagcacccuggagcaguacgucuucugcaccgugaacgcgcuccccgagacgaccgccgacaucguggucuucgacgagaucuccauggccaccaacuacgaccugagcguggugaacgcccggcugcgcgccaagcacuacgucuacaucggcgaccccgcgcagcuccccgccccgcggacccugcugacgaaggggacccucgagagcgaguacuucaacuccgugugccgccugaugaagaccaucggccccgacauguuccuggggaccugccggcgcugccccgccgagaucguggacacggucagcgcccucguguacgacaacaagcugaaggcgcacaaggacaaguccgcccagugcuucaagauguucuacaagggggugaucacccacgacgucagcuccgccaucaaccggagccagaucggcguggugcgcgaguuccugacccgcaaccccgccuggcggaaggccgucuucaucagccccuacaacucccagaacgcgguggccagcaagauccucgggcugcccacccagaccguggacuccagccagggcuccgaguacgacuacgucaucuucacgcagaccaccgagaccgcccacagcugcaacgugaaccgcuucaacguggccaucacgcgggccaaggucgggauccugugcaucauguccgaccgcgaccucuacgacaagcugcaguucaccagccuggagaucccgcggcgcaacguggcgacccugcagugaggacuagucccuguucccagagcccacuuuuuuuucuuuuuuugaaauaaaauagccugucuuucagaucuaaaaaaaaaaaaaaaaaaaaaaaaaaaaaaaaaaaaaaaaaaaaaaaaaaaaaaaaaaaaaaaaaaaaaaaaaaaaaaaaaaaaaaaaaaaaaaaaaaaa

SEQ ID NO: 28393 - RNA, 2057 nt, Artificial Sequence
  SARS-CoV-2/Wuhan-Hu-1__NC_045512.2/MN908947.2/EPI_ISL_402128__non -structural protein 13 (NSP13) mRNA gc (1-602)(D261Y)
aggagagucccgcagucggcguccagcggcucugcuuguucgugugugugucguugcaggccuuauucaagcuuaccauggccgugggcgccugcguccugugcaacagccagaccucccuccgcugcggggcgugcauccggcgccccuuccugugcugcaagugcugcuacgaccacgugaucagcaccucccacaagcuggugcucagcgucaacccguacgugugcaacgcccccggcugcgacgugacggacgucacccagcuguaccucgggggcauguccuacuacugcaagagccacaagccgcccaucuccuucccccugugcgccaacggccagguguucggccuguacaagaacacgugcgugggcagcgacaacgucaccgacuucaacgccaucgcgaccugcgacuggaccaacgccggggacuacauccuggccaacacgugcaccgagcggcucaagcuguucgccgccgagacccugaaggcgaccgaggagaccuucaagcucuccuacggcaucgccaccgugcgcgaggugcugagcgaccgggagcugcaccucuccugggaggucgggaagccccgcccgccccugaaccggaacuacguguucacgggcuaccgcgugaccaagaacagcaagguccagaucggggaguacaccuucgagaagggcgacuacggcgacgccgugguguaccgggggaccacgaccuacaagcugaacgucggcgacuacuucgugcucaccucccacaccgugaugccccugagcgcccccacgcuggucccccaggagcacuacgugcgcaucaccgggcucuaccccacccugaacaucuccuacgaguucagcuccaacguggccaacuaccagaaggucggcaugcagaaguacagcacccugcagggcccgcccgggacgggcaagucccacuucgcgaucgggcucgcccuguacuaccccagcgcccggaucguguacaccgccugcagccacgccgcggucgacgcccugugcgagaaggcccucaaguaccugcccaucgacaagugcucccgcaucaucccggcccgggcccgcguggagugcuucgacaaguucaaggugaacagcacccuggagcaguacgucuucugcaccgugaacgcgcuccccgagacgaccgccgacaucguggucuucgacgagaucuccauggccaccaacuacgaccugagcguggugaacgcccggcugcgcgccaagcacuacgucuacaucggcgaccccgcgcagcuccccgccccgcggacccugcugacgaaggggacccucgagcccgaguacuucaacuccgugugccgccugaugaagaccaucggccccgacauguuccuggggaccugccggcgcugccccgccgagaucguggacacggucagcgcccucguguacgacaacaagcugaaggcgcacaaggacaaguccgcccagugcuucaagauguucuacaagggggugaucacccacgacgucagcuccgccaucaaccggccgcagaucggcguggugcgcgaguuccugacccgcaaccccgccuggcggaaggccgucuucaucagccccuacaacucccagaacgcgguggccagcaagauccucgggcugcccacccagaccguggacuccagccagggcuccgaguacgacuacgucaucuucacgcagaccaccgagaccgcccacagcugcaacgugaaccgcuucaacguggccaucacgcgggccaaggucgggauccugugcaucauguccgaccgcgaccucuacgacaagcugcaguucaccagccuggagaucccgcggcgcaacguggcgacccugcagugaggacuagucccuguucccagagcccacuuuuuuuucuuuuuuugaaauaaaauagccugucuuucagaucuaaaaaaaaaaaaaaaaaaaaaaaaaaaaaaaaaaaaaaaaaaaaaaaaaaaaaaaaaaaaaaaaaaaaaaaaaaaaaaaaaaaaaaaaaaaaaaaaaaaa

SEQ ID NO: 28394 - RNA, 1835 nt, Artificial Sequence
  SARS-CoV-2/Wuhan-Hu-1__NC_045512.2/MN908947.2/EPI_ISL_402128__non -structural protein 14 (NSP14) mRNA gc (1-528)(T32I_P143S_P444S)
aggagagucccgcagucggcguccagcggcucugcuuguucgugugugugucguugcaggccuuauucaagcuuaccauggccgagaacgugaccggccuguucaaggacugcagcaaggucaucaccgggcuccaccccacgcaggccccgacccaccuguccguggacaucaaguucaagaccgagggccugugcguggacauccccgggauccccaaggacaugacguaccgccggcucaucagcaugaugggcuucaagaugaacuaccaggucaacggguaccccaacauguucaucacccgcgaggaggcgauccggcacgugcgcgccuggaucggcuucgacguggagggcugccacgccacccgggaggccgucgggaccaaccugccgcugcagcucggcuucuccacgggggugaaccugguggccguccccaccggcuacguggacacccccaacaacaccgacuucagccgcguguccgcgaagcccccgagcggggaccaguucaagcaccugaucccccucauguacaagggccugcccuggaacgucgugcggaucaagaucgugcagaugcugagcgacacgcucaagaaccuguccgaccgcgucguguucgugcugugggcccacggcuucgagcucaccagcaugaaguacuucgucaagaucgggccggagcggaccugcugccugugcgaccgccgggcgaccugcuucuccacggccagcgacaccuacgccugcuggcaccacuccaucggcuucgacuacguguacaaccccuucaugaucgacgugcagcaguggggguucaccggcaaccugcagagcaaccacgaccucuacugccagguccacggcaacgcccacguggccuccugcgacgccaucaugacccgcugccuggccgugcacgagugcuucgucaagcggguggacuggacgaucgaguaccccaucaucggggacgagcugaagaucaacgcggccugccgcaagguccagcacaugguggugaaggccgcccuccuggccgacaaguuccccguccugcacgacaucggcaacccgaaggcgaucaagugcgugccccaggccgacguggaguggaaguucuacgacgcccagcccugcagcgacaaggccuacaagaucgaggagcuguucuacuccuacgccacccacagcgacaaguucaccgacggggucugccuguucuggaacugcaacguggaccgguaccccgcgaacuccaucgugugccgcuucgacacccggguccugagcaaccucaaccugccgggcugcgacgggggcucccuguacgugaacaagcacgccuuccacacgcccgccuucgacaagagcgccuucgugaaccucaagcagcugagcuucuucuacuacagcgacucccccugcgagagccacggcaagcaggucguguccgacaucgacuacgugccgcucaagagcgcgaccugcaucacccgcugcaaccucgggggcgccgucugccggcaccacgccaacgaguaccgccuguaccuggacgccuacaacaugaugaucuccgccggguucagccucuggguguacaagcaguucgacaccuacaaccuguggaacacguucacccggcugcagugaggacuagucccuguucccagagcccacuuuuuuuucuuuuuuugaaauaaaauagccugucuuucagaucuaaaaaaaaaaaaaaaaaaaaaaaaaaaaaaaaaaaaaaaaaaaaaaaaaaaaaaaaaaaaaaaaaaaaaaaaaaaaaaaaaaaaaaaaaaaaaaaaaaaa

SEQ ID NO: 28395 - RNA, 1835 nt, Artificial Sequence
  SARS-CoV-2/Wuhan-Hu-1__NC_045512.2/MN908947.2/EPI_ISL_402128__non -structural protein 14 (NSP14) mRNA gc (1-528)(P204L_F218Y_P328Q)
aggagagucccgcagucggcguccagcggcucugcuuguucgugugugugucguugcaggccuuauucaagcuuaccauggccgagaacgugaccggccuguucaaggacugcagcaaggucaucaccgggcuccaccccacgcaggccccgacccaccuguccguggacaccaaguucaagaccgagggccugugcguggacauccccgggauccccaaggacaugacguaccgccggcucaucagcaugaugggcuucaagaugaacuaccaggucaacggguaccccaacauguucaucacccgcgaggaggcgauccggcacgugcgcgccuggaucggcuucgacguggagggcugccacgccacccgggaggccgucgggaccaaccugccgcugcagcucggcuucuccacgggggugaaccugguggccguccccaccggcuacguggacacccccaacaacaccgacuucagccgcguguccgcgaagcccccgcccggggaccaguucaagcaccugaucccccucauguacaagggccugcccuggaacgucgugcggaucaagaucgugcagaugcugagcgacacgcucaagaaccuguccgaccgcgucguguucgugcugugggcccacggcuucgagcucaccagcaugaaguacuucgucaagaucgggcuggagcggaccugcugccugugcgaccgccgggcgaccugcuacuccacggccagcgacaccuacgccugcuggcaccacuccaucggcuucgacuacguguacaaccccuucaugaucgacgugcagcaguggggguucaccggcaaccugcagagcaaccacgaccucuacugccagguccacggcaacgcccacguggccuccugcgacgccaucaugacccgcugccuggccgugcacgagugcuucgucaagcggguggacuggacgaucgaguaccccaucaucggggacgagcugaagaucaacgcggccugccgcaagguccagcacaugguggugaaggccgcccuccuggccgacaaguuccagguccugcacgacaucggcaacccgaaggcgaucaagugcgugccccaggccgacguggaguggaaguucuacgacgcccagcccugcagcgacaaggccuacaagaucgaggagcuguucuacuccuacgccacccacagcgacaaguucaccgacggggucugccuguucuggaacugcaacguggaccgguaccccgcgaacuccaucgugugccgcuucgacacccggguccugagcaaccucaaccugccgggcugcgacgggggcucccuguacgugaacaagcacgccuuccacacgcccgccuucgacaagagcgccuucgugaaccucaagcagcugcccuucuucuacuacagcgacucccccugcgagagccacggcaagcaggucguguccgacaucgacuacgugccgcucaagagcgcgaccugcaucacccgcugcaaccucgggggcgccgucugccggcaccacgccaacgaguaccgccuguaccuggacgccuacaacaugaugaucuccgccggguucagccucuggguguacaagcaguucgacaccuacaaccuguggaacacguucacccggcugcagugaggacuagucccuguucccagagcccacuuuuuuuucuuuuuuugaaauaaaauagccugucuuucagaucuaaaaaaaaaaaaaaaaaaaaaaaaaaaaaaaaaaaaaaaaaaaaaaaaaaaaaaaaaaaaaaaaaaaaaaaaaaaaaaaaaaaaaaaaaaaaaaaaaaaa

SEQ ID NO: 28396 - RNA, 1835 nt, Artificial Sequence
  SARS-CoV-2/Wuhan-Hu-1__NC_045512.2/MN908947.2/EPI_ISL_402128__non -structural protein 14 (NSP14) mRNA gc (1-528)(E348G_P452S)
aggagagucccgcagucggcguccagcggcucugcuuguucgugugugugucguugcaggccuuauucaagcuuaccauggccgagaacgugaccggccuguucaaggacugcagcaaggucaucaccgggcuccaccccacgcaggccccgacccaccuguccguggacaccaaguucaagaccgagggccugugcguggacauccccgggauccccaaggacaugacguaccgccggcucaucagcaugaugggcuucaagaugaacuaccaggucaacggguaccccaacauguucaucacccgcgaggaggcgauccggcacgugcgcgccuggaucggcuucgacguggagggcugccacgccacccgggaggccgucgggaccaaccugccgcugcagcucggcuucuccacgggggugaaccugguggccguccccaccggcuacguggacacccccaacaacaccgacuucagccgcguguccgcgaagcccccgcccggggaccaguucaagcaccugaucccccucauguacaagggccugcccuggaacgucgugcggaucaagaucgugcagaugcugagcgacacgcucaagaaccuguccgaccgcgucguguucgugcugugggcccacggcuucgagcucaccagcaugaaguacuucgucaagaucgggccggagcggaccugcugccugugcgaccgccgggcgaccugcuucuccacggccagcgacaccuacgccugcuggcaccacuccaucggcuucgacuacguguacaaccccuucaugaucgacgugcagcaguggggguucaccggcaaccugcagagcaaccacgaccucuacugccagguccacggcaacgcccacguggccuccugcgacgccaucaugacccgcugccuggccgugcacgagugcuucgucaagcggguggacuggacgaucgaguaccccaucaucggggacgagcugaagaucaacgcggccugccgcaagguccagcacaugguggugaaggccgcccuccuggccgacaaguuccccguccugcacgacaucggcaacccgaaggcgaucaagugcgugccccaggccgacgugggcuggaaguucuacgacgcccagcccugcagcgacaaggccuacaagaucgaggagcuguucuacuccuacgccacccacagcgacaaguucaccgacggggucugccuguucuggaacugcaacguggaccgguaccccgcgaacuccaucgugugccgcuucgacacccggguccugagcaaccucaaccugccgggcugcgacgggggcucccuguacgugaacaagcacgccuuccacacgcccgccuucgacaagagcgccuucgugaaccucaagcagcugcccuucuucuacuacagcgacuccagcugcgagagccacggcaagcaggucguguccgacaucgacuacgugccgcucaagagcgcgaccugcaucacccgcugcaaccucgggggcgccgucugccggcaccacgccaacgaguaccgccuguaccuggacgccuacaacaugaugaucuccgccggguucagccucuggguguacaagcaguucgacaccuacaaccuguggaacacguucacccggcugcagugaggacuagucccuguucccagagcccacuuuuuuuucuuuuuuugaaauaaaauagccugucuuucagaucuaaaaaaaaaaaaaaaaaaaaaaaaaaaaaaaaaaaaaaaaaaaaaaaaaaaaaaaaaaaaaaaaaaaaaaaaaaaaaaaaaaaaaaaaaaaaaaaaaaaa

SEQ ID NO: 28397 - RNA, 1835 nt, Artificial Sequence
  SARS-CoV-2/Wuhan-Hu-1__NC_045512.2/MN908947.2/EPI_ISL_402128__non -structural protein 14 (NSP14) mRNA gc (1-528)(A395V)
aggagagucccgcagucggcguccagcggcucugcuuguucgugugugugucguugcaggccuuauucaagcuuaccauggccgagaacgugaccggccuguucaaggacugcagcaaggucaucaccgggcuccaccccacgcaggccccgacccaccuguccguggacaccaaguucaagaccgagggccugugcguggacauccccgggauccccaaggacaugacguaccgccggcucaucagcaugaugggcuucaagaugaacuaccaggucaacggguaccccaacauguucaucacccgcgaggaggcgauccggcacgugcgcgccuggaucggcuucgacguggagggcugccacgccacccgggaggccgucgggaccaaccugccgcugcagcucggcuucuccacgggggugaaccugguggccguccccaccggcuacguggacacccccaacaacaccgacuucagccgcguguccgcgaagcccccgcccggggaccaguucaagcaccugaucccccucauguacaagggccugcccuggaacgucgugcggaucaagaucgugcagaugcugagcgacacgcucaagaaccuguccgaccgcgucguguucgugcugugggcccacggcuucgagcucaccagcaugaaguacuucgucaagaucgggccggagcggaccugcugccugugcgaccgccgggcgaccugcuucuccacggccagcgacaccuacgccugcuggcaccacuccaucggcuucgacuacguguacaaccccuucaugaucgacgugcagcaguggggguucaccggcaaccugcagagcaaccacgaccucuacugccagguccacggcaacgcccacguggccuccugcgacgccaucaugacccgcugccuggccgugcacgagugcuucgucaagcggguggacuggacgaucgaguaccccaucaucggggacgagcugaagaucaacgcggccugccgcaagguccagcacaugguggugaaggccgcccuccuggccgacaaguuccccguccugcacgacaucggcaacccgaaggcgaucaagugcgugccccaggccgacguggaguggaaguucuacgacgcccagcccugcagcgacaaggccuacaagaucgaggagcuguucuacuccuacgccacccacagcgacaaguucaccgacggggucugccuguucuggaacugcaacguggaccgguaccccgugaacuccaucgugugccgcuucgacacccggguccugagcaaccucaaccugccgggcugcgacgggggcucccuguacgugaacaagcacgccuuccacacgcccgccuucgacaagagcgccuucgugaaccucaagcagcugcccuucuucuacuacagcgacucccccugcgagagccacggcaagcaggucguguccgacaucgacuacgugccgcucaagagcgcgaccugcaucacccgcugcaaccucgggggcgccgucugccggcaccacgccaacgaguaccgccuguaccuggacgccuacaacaugaugaucuccgccggguucagccucuggguguacaagcaguucgacaccuacaaccuguggaacacguucacccggcugcagugaggacuagucccuguucccagagcccacuuuuuuuucuuuuuuugaaauaaaauagccugucuuucagaucuaaaaaaaaaaaaaaaaaaaaaaaaaaaaaaaaaaaaaaaaaaaaaaaaaaaaaaaaaaaaaaaaaaaaaaaaaaaaaaaaaaaaaaaaaaaaaaaaaaaa

SEQ ID NO: 28398 - RNA, 1835 nt, Artificial Sequence
  SARS-CoV-2/Wuhan-Hu-1__NC_045512.2/MN908947.2/EPI_ISL_402128__non -structural protein 14 (NSP14) mRNA gc (1-528)(D145E_A275S)
aggagagucccgcagucggcguccagcggcucugcuuguucgugugugugucguugcaggccuuauucaagcuuaccauggccgagaacgugaccggccuguucaaggacugcagcaaggucaucaccgggcuccaccccacgcaggccccgacccaccuguccguggacaccaaguucaagaccgagggccugugcguggacauccccgggauccccaaggacaugacguaccgccggcucaucagcaugaugggcuucaagaugaacuaccaggucaacggguaccccaacauguucaucacccgcgaggaggcgauccggcacgugcgcgccuggaucggcuucgacguggagggcugccacgccacccgggaggccgucgggaccaaccugccgcugcagcucggcuucuccacgggggugaaccugguggccguccccaccggcuacguggacacccccaacaacaccgacuucagccgcguguccgcgaagcccccgcccggggagcaguucaagcaccugaucccccucauguacaagggccugcccuggaacgucgugcggaucaagaucgugcagaugcugagcgacacgcucaagaaccuguccgaccgcgucguguucgugcugugggcccacggcuucgagcucaccagcaugaaguacuucgucaagaucgggccggagcggaccugcugccugugcgaccgccgggcgaccugcuucuccacggccagcgacaccuacgccugcuggcaccacuccaucggcuucgacuacguguacaaccccuucaugaucgacgugcagcaguggggguucaccggcaaccugcagagcaaccacgaccucuacugccagguccacggcaacgcccacguggccuccugcgacagcaucaugacccgcugccuggccgugcacgagugcuucgucaagcggguggacuggacgaucgaguaccccaucaucggggacgagcugaagaucaacgcggccugccgcaagguccagcacaugguggugaaggccgcccuccuggccgacaaguuccccguccugcacgacaucggcaacccgaaggcgaucaagugcgugccccaggccgacguggaguggaaguucuacgacgcccagcccugcagcgacaaggccuacaagaucgaggagcuguucuacuccuacgccacccacagcgacaaguucaccgacggggucugccuguucuggaacugcaacguggaccgguaccccgcgaacuccaucgugugccgcuucgacacccggguccugagcaaccucaaccugccgggcugcgacgggggcucccuguacgugaacaagcacgccuuccacacgcccgccuucgacaagagcgccuucgugaaccucaagcagcugcccuucuucuacuacagcgacucccccugcgagagccacggcaagcaggucguguccgacaucgacuacgugccgcucaagagcgcgaccugcaucacccgcugcaaccucgggggcgccgucugccggcaccacgccaacgaguaccgccuguaccuggacgccuacaacaugaugaucuccgccggguucagccucuggguguacaagcaguucgacaccuacaaccuguggaacacguucacccggcugcagugaggacuagucccuguucccagagcccacuuuuuuuucuuuuuuugaaauaaaauagccugucuuucagaucuaaaaaaaaaaaaaaaaaaaaaaaaaaaaaaaaaaaaaaaaaaaaaaaaaaaaaaaaaaaaaaaaaaaaaaaaaaaaaaaaaaaaaaaaaaaaaaaaaaaa

SEQ ID NO: 28399 - RNA, 1835 nt, Artificial Sequence
  SARS-CoV-2/Wuhan-Hu-1__NC_045512.2/MN908947.2/EPI_ISL_402128__non -structural protein 14 (NSP14) mRNA gc (1-528)(D145G_Q355H)
aggagagucccgcagucggcguccagcggcucugcuuguucgugugugugucguugcaggccuuauucaagcuuaccauggccgagaacgugaccggccuguucaaggacugcagcaaggucaucaccgggcuccaccccacgcaggccccgacccaccuguccguggacaccaaguucaagaccgagggccugugcguggacauccccgggauccccaaggacaugacguaccgccggcucaucagcaugaugggcuucaagaugaacuaccaggucaacggguaccccaacauguucaucacccgcgaggaggcgauccggcacgugcgcgccuggaucggcuucgacguggagggcugccacgccacccgggaggccgucgggaccaaccugccgcugcagcucggcuucuccacgggggugaaccugguggccguccccaccggcuacguggacacccccaacaacaccgacuucagccgcguguccgcgaagcccccgcccgggggccaguucaagcaccugaucccccucauguacaagggccugcccuggaacgucgugcggaucaagaucgugcagaugcugagcgacacgcucaagaaccuguccgaccgcgucguguucgugcugugggcccacggcuucgagcucaccagcaugaaguacuucgucaagaucgggccggagcggaccugcugccugugcgaccgccgggcgaccugcuucuccacggccagcgacaccuacgccugcuggcaccacuccaucggcuucgacuacguguacaaccccuucaugaucgacgugcagcaguggggguucaccggcaaccugcagagcaaccacgaccucuacugccagguccacggcaacgcccacguggccuccugcgacgccaucaugacccgcugccuggccgugcacgagugcuucgucaagcggguggacuggacgaucgaguaccccaucaucggggacgagcugaagaucaacgcggccugccgcaagguccagcacaugguggugaaggccgcccuccuggccgacaaguuccccguccugcacgacaucggcaacccgaaggcgaucaagugcgugccccaggccgacguggaguggaaguucuacgacgcccaccccugcagcgacaaggccuacaagaucgaggagcuguucuacuccuacgccacccacagcgacaaguucaccgacggggucugccuguucuggaacugcaacguggaccgguaccccgcgaacuccaucgugugccgcuucgacacccggguccugagcaaccucaaccugccgggcugcgacgggggcucccuguacgugaacaagcacgccuuccacacgcccgccuucgacaagagcgccuucgugaaccucaagcagcugcccuucuucuacuacagcgacucccccugcgagagccacggcaagcaggucguguccgacaucgacuacgugccgcucaagagcgcgaccugcaucacccgcugcaaccucgggggcgccgucugccggcaccacgccaacgaguaccgccuguaccuggacgccuacaacaugaugaucuccgccggguucagccucuggguguacaagcaguucgacaccuacaaccuguggaacacguucacccggcugcagugaggacuagucccuguucccagagcccacuuuuuuuucuuuuuuugaaauaaaauagccugucuuucagaucuaaaaaaaaaaaaaaaaaaaaaaaaaaaaaaaaaaaaaaaaaaaaaaaaaaaaaaaaaaaaaaaaaaaaaaaaaaaaaaaaaaaaaaaaaaaaaaaaaaaa

SEQ ID NO: 28400 - RNA, 1835 nt, Artificial Sequence
  SARS-CoV-2/Wuhan-Hu-1__NC_045512.2/MN908947.2/EPI_ISL_402128__non -structural protein 14 (NSP14) mRNA gc (1-528)(S256I_A361V_A372T)
aggagagucccgcagucggcguccagcggcucugcuuguucgugugugugucguugcaggccuuauucaagcuuaccauggccgagaacgugaccggccuguucaaggacugcagcaaggucaucaccgggcuccaccccacgcaggccccgacccaccuguccguggacaccaaguucaagaccgagggccugugcguggacauccccgggauccccaaggacaugacguaccgccggcucaucagcaugaugggcuucaagaugaacuaccaggucaacggguaccccaacauguucaucacccgcgaggaggcgauccggcacgugcgcgccuggaucggcuucgacguggagggcugccacgccacccgggaggccgucgggaccaaccugccgcugcagcucggcuucuccacgggggugaaccugguggccguccccaccggcuacguggacacccccaacaacaccgacuucagccgcguguccgcgaagcccccgcccggggaccaguucaagcaccugaucccccucauguacaagggccugcccuggaacgucgugcggaucaagaucgugcagaugcugagcgacacgcucaagaaccuguccgaccgcgucguguucgugcugugggcccacggcuucgagcucaccagcaugaaguacuucgucaagaucgggccggagcggaccugcugccugugcgaccgccgggcgaccugcuucuccacggccagcgacaccuacgccugcuggcaccacuccaucggcuucgacuacguguacaaccccuucaugaucgacgugcagcaguggggguucaccggcaaccugcagaucaaccacgaccucuacugccagguccacggcaacgcccacguggccuccugcgacgccaucaugacccgcugccuggccgugcacgagugcuucgucaagcggguggacuggacgaucgaguaccccaucaucggggacgagcugaagaucaacgcggccugccgcaagguccagcacaugguggugaaggccgcccuccuggccgacaaguuccccguccugcacgacaucggcaacccgaaggcgaucaagugcgugccccaggccgacguggaguggaaguucuacgacgcccagcccugcagcgacaagguguacaagaucgaggagcuguucuacuccuacaccacccacagcgacaaguucaccgacggggucugccuguucuggaacugcaacguggaccgguaccccgcgaacuccaucgugugccgcuucgacacccggguccugagcaaccucaaccugccgggcugcgacgggggcucccuguacgugaacaagcacgccuuccacacgcccgccuucgacaagagcgccuucgugaaccucaagcagcugcccuucuucuacuacagcgacucccccugcgagagccacggcaagcaggucguguccgacaucgacuacgugccgcucaagagcgcgaccugcaucacccgcugcaaccucgggggcgccgucugccggcaccacgccaacgaguaccgccuguaccuggacgccuacaacaugaugaucuccgccggguucagccucuggguguacaagcaguucgacaccuacaaccuguggaacacguucacccggcugcagugaggacuagucccuguucccagagcccacuuuuuuuucuuuuuuugaaauaaaauagccugucuuucagaucuaaaaaaaaaaaaaaaaaaaaaaaaaaaaaaaaaaaaaaaaaaaaaaaaaaaaaaaaaaaaaaaaaaaaaaaaaaaaaaaaaaaaaaaaaaaaaaaaaaaa

SEQ ID NO: 28401 - RNA, 2026 nt, Artificial Sequence
  SARS-CoV-2/Wuhan-Hu-1__NC_045512.2/MN908947.2/EPI_ISL_402128__non -structural protein 13 (NSP13) mRNA gc R10354
aggagaaagcuuaccauggccgugggcgccugcguccugugcaacagccagaccucccuccgcugcggggcgugcauccggcgccccuuccugugcugcaagugcugcuacgaccacgugaucagcaccucccacaagcuggugcucagcgucaacccguacgugugcaacgcccccggcugcgacgugacggacgucacccagcuguaccucgggggcauguccuacuacugcaagagccacaagccgcccaucuccuucccccugugcgccaacggccagguguucggccuguacaagaacacgugcgugggcagcgacaacgucaccgacuucaacgccaucgcgaccugcgacuggaccaacgccggggacuacauccuggccaacacgugcaccgagcggcucaagcuguucgccgccgagacccugaaggcgaccgaggagaccuucaagcucuccuacggcaucgccaccgugcgcgaggugcugagcgaccgggagcugcaccucuccugggaggucgggaagccccgcccgccccugaaccggaacuacguguucacgggcuaccgcgugaccaagaacagcaagguccagaucggggaguacaccuucgagaagggcgacuacggcgacgccgugguguaccgggggaccacgaccuacaagcugaacgucggcgacuacuucgugcucaccucccacaccgugaugccccugagcgcccccacgcuggucccccaggagcacuacgugcgcaucaccgggcucuaccccacccugaacaucuccgacgaguucagcuccaacguggccaacuaccagaaggucggcaugcagaaguacagcacccugcagggcccgcccgggacgggcaagucccacuucgcgaucgggcucgcccuguacuaccccagcgcccggaucguguacaccgccugcagccacgccgcggucgacgcccugugcgagaaggcccucaaguaccugcccaucgacaagugcucccgcaucaucccggcccgggcccgcguggagugcuucgacaaguucaaggugaacagcacccuggagcaguacgucuucugcaccgugaacgcgcuccccgagacgaccgccgacaucguggucuucgacgagaucuccauggccaccaacuacgaccugagcguggugaacgcccggcugcgcgccaagcacuacgucuacaucggcgaccccgcgcagcuccccgccccgcggacccugcugacgaaggggacccucgagcccgaguacuucaacuccgugugccgccugaugaagaccaucggccccgacauguuccuggggaccugccggcgcugccccgccgagaucguggacacggucagcgcccucguguacgacaacaagcugaaggcgcacaaggacaaguccgcccagugcuucaagauguucuacaagggggugaucacccacgacgucagcuccgccaucaaccggccgcagaucggcguggugcgcgaguuccugacccgcaaccccgccuggcggaaggccgucuucaucagccccuacaacucccagaacgcgguggccagcaagauccucgggcugcccacccagaccguggacuccagccagggcuccgaguacgacuacgucaucuucacgcagaccaccgagaccgcccacagcugcaacgugaaccgcuucaacguggccaucacgcgggccaaggucgggauccugugcaucauguccgaccgcgaccucuacgacaagcugcaguucaccagccuggagaucccgcggcgcaacguggcgacccugcagugaggacuaguuauaagacugacuagcccgaugggccucccaacgggcccuccuccccuccuugcaccgagauuaauaaaaaaaaaaaaaaaaaaaaaaaaaaaaaaaaaaaaaaaaaaaaaaaaaaaaaaaaaaaaaaaaugcaucccccccccccccccccccccccccccccccaaaggcucuuuucagagccaccagaauu

SEQ ID NO: 28402 - RNA, 1804 nt, Artificial Sequence
  SARS-CoV-2/Wuhan-Hu-1__NC_045512.2/MN908947.2/EPI_ISL_402128__non -structural protein 14 (NSP14) mRNA gc R10355
aggagaaagcuuaccauggccgagaacgugaccggccuguucaaggacugcagcaaggucaucaccgggcuccaccccacgcaggccccgacccaccuguccguggacaccaaguucaagaccgagggccugugcguggacauccccgggauccccaaggacaugacguaccgccggcucaucagcaugaugggcuucaagaugaacuaccaggucaacggguaccccaacauguucaucacccgcgaggaggcgauccggcacgugcgcgccuggaucggcuucgacguggagggcugccacgccacccgggaggccgucgggaccaaccugccgcugcagcucggcuucuccacgggggugaaccugguggccguccccaccggcuacguggacacccccaacaacaccgacuucagccgcguguccgcgaagcccccgcccggggaccaguucaagcaccugaucccccucauguacaagggccugcccuggaacgucgugcggaucaagaucgugcagaugcugagcgacacgcucaagaaccuguccgaccgcgucguguucgugcugugggcccacggcuucgagcucaccagcaugaaguacuucgucaagaucgggccggagcggaccugcugccugugcgaccgccgggcgaccugcuucuccacggccagcgacaccuacgccugcuggcaccacuccaucggcuucgacuacguguacaaccccuucaugaucgacgugcagcaguggggguucaccggcaaccugcagagcaaccacgaccucuacugccagguccacggcaacgcccacguggccuccugcgacgccaucaugacccgcugccuggccgugcacgagugcuucgucaagcggguggacuggacgaucgaguaccccaucaucggggacgagcugaagaucaacgcggccugccgcaagguccagcacaugguggugaaggccgcccuccuggccgacaaguuccccguccugcacgacaucggcaacccgaaggcgaucaagugcgugccccaggccgacguggaguggaaguucuacgacgcccagcccugcagcgacaaggccuacaagaucgaggagcuguucuacuccuacgccacccacagcgacaaguucaccgacggggucugccuguucuggaacugcaacguggaccgguaccccgcgaacuccaucgugugccgcuucgacacccggguccugagcaaccucaaccugccgggcugcgacgggggcucccuguacgugaacaagcacgccuuccacacgcccgccuucgacaagagcgccuucgugaaccucaagcagcugcccuucuucuacuacagcgacucccccugcgagagccacggcaagcaggucguguccgacaucgacuacgugccgcucaagagcgcgaccugcaucacccgcugcaaccucgggggcgccgucugccggcaccacgccaacgaguaccgccuguaccuggacgccuacaacaugaugaucuccgccggguucagccucuggguguacaagcaguucgacaccuacaaccuguggaacacguucacccggcugcagugaggacuaguuauaagacugacuagcccgaugggccucccaacgggcccuccuccccuccuugcaccgagauuaauaaaaaaaaaaaaaaaaaaaaaaaaaaaaaaaaaaaaaaaaaaaaaaaaaaaaaaaaaaaaaaaaugcaucccccccccccccccccccccccccccccccaaaggcucuuuucagagccaccagaauu

SEQ ID NO: 28403 - RNA, 886 nt, Artificial Sequence
  SARS-CoV-2/Wuhan-Hu-1__NC_045512.2/MN908947.2/EPI_ISL_402128__mem brane protein (M) mRNA gc (1-222)(I82T)
aggagaaagcuuaccauggccgacagcaacggcaccaucaccguggaggagcugaagaagcuccuggagcaguggaaccuggucaucggguuccucuuccugacguggaucugccugcuccaguucgccuacgcgaaccgcaaccgguuccuguacaucaucaagcugaucuuccucuggcugcuguggcccgugacccucgccugcuucgugcuggccgccgucuaccgcaucaacuggaucaccggcgggaucgccaccgcgauggccugccuggugggccucauguggcuguccuacuucaucgccagcuuccggcuguucgcccgcacccgguccauguggagcuucaacccggagacgaacauccuccugaacgugccccugcacgggaccauccucacccgcccccugcuggaguccgagcucgucaucggcgcggugauccugcggggccaccuccgcaucgccgggcaccaccugggccggugcgacaucaaggaccugcccaaggagaucaccguggccacgagccgcacccuguccuacuacaagcucggggccagccagcgggucgccggcgacuccggguucgcggccuacagccgcuaccggaucggcaacuacaagcugaacaccgaccacuccagcuccagcgacaacaucgcccugcucgugcagugaggacuaguuauaagacugacuagcccgaugggccucccaacgggcccuccuccccuccuugcaccgagauuaauaaaaaaaaaaaaaaaaaaaaaaaaaaaaaaaaaaaaaaaaaaaaaaaaaaaaaaaaaaaaaaaaugcaucccccccccccccccccccccccccccccccaaaggcucuuuucagagccaccagaauu

SEQ ID NO: 28404 - RNA, 886 nt, Artificial Sequence
  SARS-CoV-2/Wuhan-Hu-1__NC_045512.2/MN908947.2/EPI_ISL_402128__mem brane protein (M) mRNA gc (1-222)(A2S_F28L_V70L)
aggagaaagcuuaccaugagcgacagcaacggcaccaucaccguggaggagcugaagaagcuccuggagcaguggaaccuggucaucggguuccuccugcugacguggaucugccugcuccaguucgccuacgcgaaccgcaaccgguuccuguacaucaucaagcugaucuuccucuggcugcuguggcccgugacccucgccugcuucgugcuggccgcccuguaccgcaucaacuggaucaccggcgggaucgccaucgcgauggccugccuggugggccucauguggcuguccuacuucaucgccagcuuccggcuguucgcccgcacccgguccauguggagcuucaacccggagacgaacauccuccugaacgugccccugcacgggaccauccucacccgcccccugcuggaguccgagcucgucaucggcgcggugauccugcggggccaccuccgcaucgccgggcaccaccugggccggugcgacaucaaggaccugcccaaggagaucaccguggccacgagccgcacccuguccuacuacaagcucggggccagccagcgggucgccggcgacuccggguucgcggccuacagccgcuaccggaucggcaacuacaagcugaacaccgaccacuccagcuccagcgacaacaucgcccugcucgugcagugaggacuaguuauaagacugacuagcccgaugggccucccaacgggcccuccuccccuccuugcaccgagauuaauaaaaaaaaaaaaaaaaaaaaaaaaaaaaaaaaaaaaaaaaaaaaaaaaaaaaaaaaaaaaaaaaugcaucccccccccccccccccccccccccccccccaaaggcucuuuucagagccaccagaauu

SEQ ID NO: 28405 - RNA, 886 nt, Artificial Sequence
  SARS-CoV-2/Wuhan-Hu-1__NC_045512.2/MN908947.2/EPI_ISL_402128__mem brane protein (M) mRNA gc (1-222)(A2T_I201V)
aggagaaagcuuaccaugaccgacagcaacggcaccaucaccguggaggagcugaagaagcuccuggagcaguggaaccuggucaucggguuccucuuccugacguggaucugccugcuccaguucgccuacgcgaaccgcaaccgguuccuguacaucaucaagcugaucuuccucuggcugcuguggcccgugacccucgccugcuucgugcuggccgccgucuaccgcaucaacuggaucaccggcgggaucgccaucgcgauggccugccuggugggccucauguggcuguccuacuucaucgccagcuuccggcuguucgcccgcacccgguccauguggagcuucaacccggagacgaacauccuccugaacgugccccugcacgggaccauccucacccgcccccugcuggaguccgagcucgucaucggcgcggugauccugcggggccaccuccgcaucgccgggcaccaccugggccggugcgacaucaaggaccugcccaaggagaucaccguggccacgagccgcacccuguccuacuacaagcucggggccagccagcgggucgccggcgacuccggguucgcggccuacagccgcuaccgggugggcaacuacaagcugaacaccgaccacuccagcuccagcgacaacaucgcccugcucgugcagugaggacuaguuauaagacugacuagcccgaugggccucccaacgggcccuccuccccuccuugcaccgagauuaauaaaaaaaaaaaaaaaaaaaaaaaaaaaaaaaaaaaaaaaaaaaaaaaaaaaaaaaaaaaaaaaaugcaucccccccccccccccccccccccccccccccaaaggcucuuuucagagccaccagaauu

SEQ ID NO: 28406 - RNA, 886 nt, Artificial Sequence
  SARS-CoV-2/Wuhan-Hu-1__NC_045512.2/MN908947.2/EPI_ISL_402128__mem brane protein (M) mRNA gc (1-222)(N121K_H125Y_H148Y_H155Y_K162N)
aggagaaagcuuaccauggccgacagcaacggcaccaucaccguggaggagcugaagaagcuccuggagcaguggaaccuggucaucggguuccucuuccugacguggaucugccugcuccaguucgccuacgcgaaccgcaaccgguuccuguacaucaucaagcugaucuuccucuggcugcuguggcccgugacccucgccugcuucgugcuggccgccgucuaccgcaucaacuggaucaccggcgggaucgccaucgcgauggccugccuggugggccucauguggcuguccuacuucaucgccagcuuccggcuguucgcccgcacccgguccauguggagcuucaacccggagacgaacauccuccugaaggugccccuguacgggaccauccucacccgcccccugcuggaguccgagcucgucaucggcgcggugauccugcggggcuaccuccgcaucgccgggcacuaccugggccggugcgacaucaacgaccugcccaaggagaucaccguggccacgagccgcacccuguccuacuacaagcucggggccagccagcgggucgccggcgacuccggguucgcggccuacagccgcuaccggaucggcaacuacaagcugaacaccgaccacuccagcuccagcgacaacaucgcccugcucgugcagugaggacuaguuauaagacugacuagcccgaugggccucccaacgggcccuccuccccuccuugcaccgagauuaauaaaaaaaaaaaaaaaaaaaaaaaaaaaaaaaaaaaaaaaaaaaaaaaaaaaaaaaaaaaaaaaaugcaucccccccccccccccccccccccccccccccaaaggcucuuuucagagccaccagaauu

SEQ ID NO: 28407 - RNA, 886 nt, Artificial Sequence
  SARS-CoV-2/Wuhan-Hu-1__NC_045512.2/MN908947.2/EPI_ISL_402128__mem brane protein (M) mRNA gc (1-222)(A63T_H125Y)
aggagaaagcuuaccauggccgacagcaacggcaccaucaccguggaggagcugaagaagcuccuggagcaguggaaccuggucaucggguuccucuuccugacguggaucugccugcuccaguucgccuacgcgaaccgcaaccgguuccuguacaucaucaagcugaucuuccucuggcugcuguggcccgugacccucaccugcuucgugcuggccgccgucuaccgcaucaacuggaucaccggcgggaucgccaucgcgauggccugccuggugggccucauguggcuguccuacuucaucgccagcuuccggcuguucgcccgcacccgguccauguggagcuucaacccggagacgaacauccuccugaacgugccccuguacgggaccauccucacccgcccccugcuggaguccgagcucgucaucggcgcggugauccugcggggccaccuccgcaucgccgggcaccaccugggccggugcgacaucaaggaccugcccaaggagaucaccguggccacgagccgcacccuguccuacuacaagcucggggccagccagcgggucgccggcgacuccggguucgcggccuacagccgcuaccggaucggcaacuacaagcugaacaccgaccacuccagcuccagcgacaacaucgcccugcucgugcagugaggacuaguuauaagacugacuagcccgaugggccucccaacgggcccuccuccccuccuugcaccgagauuaauaaaaaaaaaaaaaaaaaaaaaaaaaaaaaaaaaaaaaaaaaaaaaaaaaaaaaaaaaaaaaaaaugcaucccccccccccccccccccccccccccccccaaaggcucuuuucagagccaccagaauu

SEQ ID NO: 28408 - RNA, 886 nt, Artificial Sequence
  SARS-CoV-2/Wuhan-Hu-1__NC_045512.2/MN908947.2/EPI_ISL_402128__mem brane protein (M) mRNA gc (1-222)(A2S_M109I_H125Y)
aggagaaagcuuaccaugagcgacagcaacggcaccaucaccguggaggagcugaagaagcuccuggagcaguggaaccuggucaucggguuccucuuccugacguggaucugccugcuccaguucgccuacgcgaaccgcaaccgguuccuguacaucaucaagcugaucuuccucuggcugcuguggcccgugacccucgccugcuucgugcuggccgccgucuaccgcaucaacuggaucaccggcgggaucgccaucgcgauggccugccuggugggccucauguggcuguccuacuucaucgccagcuuccggcuguucgcccgcacccgguccaucuggagcuucaacccggagacgaacauccuccugaacgugccccuguacgggaccauccucacccgcccccugcuggaguccgagcucgucaucggcgcggugauccugcggggccaccuccgcaucgccgggcaccaccugggccggugcgacaucaaggaccugcccaaggagaucaccguggccacgagccgcacccuguccuacuacaagcucggggccagccagcgggucgccggcgacuccggguucgcggccuacagccgcuaccggaucggcaacuacaagcugaacaccgaccacuccagcuccagcgacaacaucgcccugcucgugcagugaggacuaguuauaagacugacuagcccgaugggccucccaacgggcccuccuccccuccuugcaccgagauuaauaaaaaaaaaaaaaaaaaaaaaaaaaaaaaaaaaaaaaaaaaaaaaaaaaaaaaaaaaaaaaaaaugcaucccccccccccccccccccccccccccccccaaaggcucuuuucagagccaccagaauu

SEQ ID NO: 28409 - RNA, 886 nt, Artificial Sequence
  SARS-CoV-2/Wuhan-Hu-1__NC_045512.2/MN908947.2/EPI_ISL_402128__mem brane protein (M) mRNA gc (1-222)(A2V_M109I_H125Y)
aggagaaagcuuaccaugguggacagcaacggcaccaucaccguggaggagcugaagaagcuccuggagcaguggaaccuggucaucggguuccucuuccugacguggaucugccugcuccaguucgccuacgcgaaccgcaaccgguuccuguacaucaucaagcugaucuuccucuggcugcuguggcccgugacccucgccugcuucgugcuggccgccgucuaccgcaucaacuggaucaccggcgggaucgccaucgcgauggccugccuggugggccucauguggcuguccuacuucaucgccagcuuccggcuguucgcccgcacccgguccaucuggagcuucaacccggagacgaacauccuccugaacgugccccuguacgggaccauccucacccgcccccugcuggaguccgagcucgucaucggcgcggugauccugcggggccaccuccgcaucgccgggcaccaccugggccggugcgacaucaaggaccugcccaaggagaucaccguggccacgagccgcacccuguccuacuacaagcucggggccagccagcgggucgccggcgacuccggguucgcggccuacagccgcuaccggaucggcaacuacaagcugaacaccgaccacuccagcuccagcgacaacaucgcccugcucgugcagugaggacuaguuauaagacugacuagcccgaugggccucccaacgggcccuccuccccuccuugcaccgagauuaauaaaaaaaaaaaaaaaaaaaaaaaaaaaaaaaaaaaaaaaaaaaaaaaaaaaaaaaaaaaaaaaaugcaucccccccccccccccccccccccccccccccaaaggcucuuuucagagccaccagaauu

SEQ ID NO: 28410 - RNA, 886 nt, Artificial Sequence
  SARS-CoV-2/Wuhan-Hu-1__NC_045512.2/MN908947.2/EPI_ISL_402128__mem brane protein (M) mRNA gc (1-222)(L17F_M109I)
aggagaaagcuuaccauggccgacagcaacggcaccaucaccguggaggagcugaagaagcucuucgagcaguggaaccuggucaucggguuccucuuccugacguggaucugccugcuccaguucgccuacgcgaaccgcaaccgguuccuguacaucaucaagcugaucuuccucuggcugcuguggcccgugacccucgccugcuucgugcuggccgccgucuaccgcaucaacuggaucaccggcgggaucgccaucgcgauggccugccuggugggccucauguggcuguccuacuucaucgccagcuuccggcuguucgcccgcacccgguccaucuggagcuucaacccggagacgaacauccuccugaacgugccccugcacgggaccauccucacccgcccccugcuggaguccgagcucgucaucggcgcggugauccugcggggccaccuccgcaucgccgggcaccaccugggccggugcgacaucaaggaccugcccaaggagaucaccguggccacgagccgcacccuguccuacuacaagcucggggccagccagcgggucgccggcgacuccggguucgcggccuacagccgcuaccggaucggcaacuacaagcugaacaccgaccacuccagcuccagcgacaacaucgcccugcucgugcagugaggacuaguuauaagacugacuagcccgaugggccucccaacgggcccuccuccccuccuugcaccgagauuaauaaaaaaaaaaaaaaaaaaaaaaaaaaaaaaaaaaaaaaaaaaaaaaaaaaaaaaaaaaaaaaaaugcaucccccccccccccccccccccccccccccccaaaggcucuuuucagagccaccagaauu

SEQ ID NO: 28411 - RNA, 1474 nt, Artificial Sequence
  SARS-CoV-2/Wuhan-Hu-1__NC_045512.2/MN908947.2/EPI_ISL_402128__nuc leocapsid protein (N) mRNA gc (1-419)(D3L_R203K_G204R_S235F)
aggagaaagcuuaccaugagcaacggcccccagaaccagcgcaacgccccgcggaucaccuucgggggccccuccgacagcaccggguccaaccagaacggcgagcgcagcggggcccgguccaagcagcgccggccccagggccugcccaacaacacggcgagcugguucaccgcccucacccagcacggcaaggaggaccugaaguucccgcgcgggcagggcgugcccaucaacaccaacuccagccccgacgaccagaucggguacuaccggcgcgccacgcggcgcauccggggcggggacggcaagaugaaggaccugagcccccgcugguacuucuacuaccucggcaccgggccggaggccggccugcccuacggggccaacaaggacggcaucaucugggucgcgaccgagggcgcccugaacacccccaaggaccacaucgggacgcggaaccccgccaacaacgccgcgaucgugcuccagcugccgcagggcaccacccugcccaagggguucuacgccgagggcucccgcgggggcucccaggccagcucccggagcuccagccgcucccggaacagcucccgcaacagcacccccggcagcuccaagcgcacgagccccgcccgcauggccggcaacgggggcgacgcggcccucgcccugcugcuccuggaccggcugaaccagcucgaguccaagauguucgggaagggccagcagcagcagggccagaccgugaccaagaaguccgccgccgaggcgagcaagaagccgcgccagaagcgcaccgccacgaaggccuacaacgucacccaggccuucgggcggcgcggccccgagcagacccaggggaacuucggcgaccaggagcugauccggcaggggaccgacuacaagcacuggccccagaucgcccaguucgcgcccuccgccagcgccuucuucggcaugucccgcaucggcauggaggugacgccgagcgggaccuggcugaccuacaccggcgccaucaagcucgacgacaaggaccccaacuucaaggaccaggugauccugcugaacaagcacaucgacgccuacaagacguucccgcccaccgagcccaagaaggacaagaagaagaaggcggacgagacccaggcccucccccagcggcagaagaagcagcagaccgucacgcugcugcccgccgccgaccucgacgacuucuccaagcagcugcagcagagcauguccagcgcggacuccacccaggccugaggacuaguuauaagacugacuagcccgaugggccucccaacgggcccuccuccccuccuugcaccgagauuaauaaaaaaaaaaaaaaaaaaaaaaaaaaaaaaaaaaaaaaaaaaaaaaaaaaaaaaaaaaaaaaaaugcaucccccccccccccccccccccccccccccccaaaggcucuuuucagagccaccagaauu

SEQ ID NO: 28412 - RNA, 1477 nt, Artificial Sequence
  SARS-CoV-2/Wuhan-Hu-1__NC_045512.2/MN908947.2/EPI_ISL_402128__nuc leocapsid protein (N) mRNA gc (1-419)(T205I)
aggagaaagcuuaccaugagcgacaacggcccccagaaccagcgcaacgccccgcggaucaccuucgggggccccuccgacagcaccggguccaaccagaacggcgagcgcagcggggcccgguccaagcagcgccggccccagggccugcccaacaacacggcgagcugguucaccgcccucacccagcacggcaaggaggaccugaaguucccgcgcgggcagggcgugcccaucaacaccaacuccagccccgacgaccagaucggguacuaccggcgcgccacgcggcgcauccggggcggggacggcaagaugaaggaccugagcccccgcugguacuucuacuaccucggcaccgggccggaggccggccugcccuacggggccaacaaggacggcaucaucugggucgcgaccgagggcgcccugaacacccccaaggaccacaucgggacgcggaaccccgccaacaacgccgcgaucgugcuccagcugccgcagggcaccacccugcccaagggguucuacgccgagggcucccgcgggggcucccaggccagcucccggagcuccagccgcucccggaacagcucccgcaacagcacccccggcagcucccgggggaucagccccgcccgcauggccggcaacgggggcgacgcggcccucgcccugcugcuccuggaccggcugaaccagcucgaguccaagaugagcgggaagggccagcagcagcagggccagaccgugaccaagaaguccgccgccgaggcgagcaagaagccgcgccagaagcgcaccgccacgaaggccuacaacgucacccaggccuucgggcggcgcggccccgagcagacccaggggaacuucggcgaccaggagcugauccggcaggggaccgacuacaagcacuggccccagaucgcccaguucgcgcccuccgccagcgccuucuucggcaugucccgcaucggcauggaggugacgccgagcgggaccuggcugaccuacaccggcgccaucaagcucgacgacaaggaccccaacuucaaggaccaggugauccugcugaacaagcacaucgacgccuacaagacguucccgcccaccgagcccaagaaggacaagaagaagaaggcggacgagacccaggcccucccccagcggcagaagaagcagcagaccgucacgcugcugcccgccgccgaccucgacgacuucuccaagcagcugcagcagagcauguccagcgcggacuccacccaggccugaggacuaguuauaagacugacuagcccgaugggccucccaacgggcccuccuccccuccuugcaccgagauuaauaaaaaaaaaaaaaaaaaaaaaaaaaaaaaaaaaaaaaaaaaaaaaaaaaaaaaaaaaaaaaaaaugcaucccccccccccccccccccccccccccccccaaaggcucuuuucagagccaccagaauu

SEQ ID NO: 28413 - RNA, 1477 nt, Artificial Sequence
  SARS-CoV-2/Wuhan-Hu-1__NC_045512.2/MN908947.2/EPI_ISL_402128__nuc leocapsid protein (N) mRNA gc (1-419)(P80R)
aggagaaagcuuaccaugagcgacaacggcccccagaaccagcgcaacgccccgcggaucaccuucgggggccccuccgacagcaccggguccaaccagaacggcgagcgcagcggggcccgguccaagcagcgccggccccagggccugcccaacaacacggcgagcugguucaccgcccucacccagcacggcaaggaggaccugaaguucccgcgcgggcagggcgugcccaucaacaccaacuccagccgcgacgaccagaucggguacuaccggcgcgccacgcggcgcauccggggcggggacggcaagaugaaggaccugagcccccgcugguacuucuacuaccucggcaccgggccggaggccggccugcccuacggggccaacaaggacggcaucaucugggucgcgaccgagggcgcccugaacacccccaaggaccacaucgggacgcggaaccccgccaacaacgccgcgaucgugcuccagcugccgcagggcaccacccugcccaagggguucuacgccgagggcucccgcgggggcucccaggccagcucccggagcuccagccgcucccggaacagcucccgcaacagcacccccggcagcucccgggggacgagccccgcccgcauggccggcaacgggggcgacgcggcccucgcccugcugcuccuggaccggcugaaccagcucgaguccaagaugagcgggaagggccagcagcagcagggccagaccgugaccaagaaguccgccgccgaggcgagcaagaagccgcgccagaagcgcaccgccacgaaggccuacaacgucacccaggccuucgggcggcgcggccccgagcagacccaggggaacuucggcgaccaggagcugauccggcaggggaccgacuacaagcacuggccccagaucgcccaguucgcgcccuccgccagcgccuucuucggcaugucccgcaucggcauggaggugacgccgagcgggaccuggcugaccuacaccggcgccaucaagcucgacgacaaggaccccaacuucaaggaccaggugauccugcugaacaagcacaucgacgccuacaagacguucccgcccaccgagcccaagaaggacaagaagaagaaggcggacgagacccaggcccucccccagcggcagaagaagcagcagaccgucacgcugcugcccgccgccgaccucgacgacuucuccaagcagcugcagcagagcauguccagcgcggacuccacccaggccugaggacuaguuauaagacugacuagcccgaugggccucccaacgggcccuccuccccuccuugcaccgagauuaauaaaaaaaaaaaaaaaaaaaaaaaaaaaaaaaaaaaaaaaaaaaaaaaaaaaaaaaaaaaaaaaaugcaucccccccccccccccccccccccccccccccaaaggcucuuuucagagccaccagaauu

SEQ ID NO: 28414 - RNA, 1477 nt, Artificial Sequence
  SARS-CoV-2/Wuhan-Hu-1__NC_045512.2/MN908947.2/EPI_ISL_402128__nuc leocapsid protein (N) mRNA gc (1-419)(P80R_R203K_G204R)
aggagaaagcuuaccaugagcgacaacggcccccagaaccagcgcaacgccccgcggaucaccuucgggggccccuccgacagcaccggguccaaccagaacggcgagcgcagcggggcccgguccaagcagcgccggccccagggccugcccaacaacacggcgagcugguucaccgcccucacccagcacggcaaggaggaccugaaguucccgcgcgggcagggcgugcccaucaacaccaacuccagccgcgacgaccagaucggguacuaccggcgcgccacgcggcgcauccggggcggggacggcaagaugaaggaccugagcccccgcugguacuucuacuaccucggcaccgggccggaggccggccugcccuacggggccaacaaggacggcaucaucugggucgcgaccgagggcgcccugaacacccccaaggaccacaucgggacgcggaaccccgccaacaacgccgcgaucgugcuccagcugccgcagggcaccacccugcccaagggguucuacgccgagggcucccgcgggggcucccaggccagcucccggagcuccagccgcucccggaacagcucccgcaacagcacccccggcagcuccaagcgcacgagccccgcccgcauggccggcaacgggggcgacgcggcccucgcccugcugcuccuggaccggcugaaccagcucgaguccaagaugagcgggaagggccagcagcagcagggccagaccgugaccaagaaguccgccgccgaggcgagcaagaagccgcgccagaagcgcaccgccacgaaggccuacaacgucacccaggccuucgggcggcgcggccccgagcagacccaggggaacuucggcgaccaggagcugauccggcaggggaccgacuacaagcacuggccccagaucgcccaguucgcgcccuccgccagcgccuucuucggcaugucccgcaucggcauggaggugacgccgagcgggaccuggcugaccuacaccggcgccaucaagcucgacgacaaggaccccaacuucaaggaccaggugauccugcugaacaagcacaucgacgccuacaagacguucccgcccaccgagcccaagaaggacaagaagaagaaggcggacgagacccaggcccucccccagcggcagaagaagcagcagaccgucacgcugcugcccgccgccgaccucgacgacuucuccaagcagcugcagcagagcauguccagcgcggacuccacccaggccugaggacuaguuauaagacugacuagcccgaugggccucccaacgggcccuccuccccuccuugcaccgagauuaauaaaaaaaaaaaaaaaaaaaaaaaaaaaaaaaaaaaaaaaaaaaaaaaaaaaaaaaaaaaaaaaaugcaucccccccccccccccccccccccccccccccaaaggcucuuuucagagccaccagaauu

SEQ ID NO: 28415 - RNA, 1477 nt, Artificial Sequence
  SARS-CoV-2/Wuhan-Hu-1__NC_045512.2/MN908947.2/EPI_ISL_402128__nuc leocapsid protein (N) mRNA gc (1-419)(D63G_R203M_G215C_D377Y)
aggagaaagcuuaccaugagcgacaacggcccccagaaccagcgcaacgccccgcggaucaccuucgggggccccuccgacagcaccggguccaaccagaacggcgagcgcagcggggcccgguccaagcagcgccggccccagggccugcccaacaacacggcgagcugguucaccgcccucacccagcacggcaaggagggccugaaguucccgcgcgggcagggcgugcccaucaacaccaacuccagccccgacgaccagaucggguacuaccggcgcgccacgcggcgcauccggggcggggacggcaagaugaaggaccugagcccccgcugguacuucuacuaccucggcaccgggccggaggccggccugcccuacggggccaacaaggacggcaucaucugggucgcgaccgagggcgcccugaacacccccaaggaccacaucgggacgcggaaccccgccaacaacgccgcgaucgugcuccagcugccgcagggcaccacccugcccaagggguucuacgccgagggcucccgcgggggcucccaggccagcucccggagcuccagccgcucccggaacagcucccgcaacagcacccccggcagcuccauggggacgagccccgcccgcauggccggcaacgggugcgacgcggcccucgcccugcugcuccuggaccggcugaaccagcucgaguccaagaugagcgggaagggccagcagcagcagggccagaccgugaccaagaaguccgccgccgaggcgagcaagaagccgcgccagaagcgcaccgccacgaaggccuacaacgucacccaggccuucgggcggcgcggccccgagcagacccaggggaacuucggcgaccaggagcugauccggcaggggaccgacuacaagcacuggccccagaucgcccaguucgcgcccuccgccagcgccuucuucggcaugucccgcaucggcauggaggugacgccgagcgggaccuggcugaccuacaccggcgccaucaagcucgacgacaaggaccccaacuucaaggaccaggugauccugcugaacaagcacaucgacgccuacaagacguucccgcccaccgagcccaagaaggacaagaagaagaaggcguacgagacccaggcccucccccagcggcagaagaagcagcagaccgucacgcugcugcccgccgccgaccucgacgacuucuccaagcagcugcagcagagcauguccagcgcggacuccacccaggccugaggacuaguuauaagacugacuagcccgaugggccucccaacgggcccuccuccccuccuugcaccgagauuaauaaaaaaaaaaaaaaaaaaaaaaaaaaaaaaaaaaaaaaaaaaaaaaaaaaaaaaaaaaaaaaaaugcaucccccccccccccccccccccccccccccccaaaggcucuuuucagagccaccagaauu

SEQ ID NO: 28416 - RNA, 1477 nt, Artificial Sequence
  SARS-CoV-2/Wuhan-Hu-1__NC_045512.2/MN908947.2/EPI_ISL_402128__nuc leocapsid protein (N) mRNA gc (1-419)(D63G_R203M_D377Y)
aggagaaagcuuaccaugagcgacaacggcccccagaaccagcgcaacgccccgcggaucaccuucgggggccccuccgacagcaccggguccaaccagaacggcgagcgcagcggggcccgguccaagcagcgccggccccagggccugcccaacaacacggcgagcugguucaccgcccucacccagcacggcaaggagggccugaaguucccgcgcgggcagggcgugcccaucaacaccaacuccagccccgacgaccagaucggguacuaccggcgcgccacgcggcgcauccggggcggggacggcaagaugaaggaccugagcccccgcugguacuucuacuaccucggcaccgggccggaggccggccugcccuacggggccaacaaggacggcaucaucugggucgcgaccgagggcgcccugaacacccccaaggaccacaucgggacgcggaaccccgccaacaacgccgcgaucgugcuccagcugccgcagggcaccacccugcccaagggguucuacgccgagggcucccgcgggggcucccaggccagcucccggagcuccagccgcucccggaacagcucccgcaacagcacccccggcagcuccauggggacgagccccgcccgcauggccggcaacgggggcgacgcggcccucgcccugcugcuccuggaccggcugaaccagcucgaguccaagaugagcgggaagggccagcagcagcagggccagaccgugaccaagaaguccgccgccgaggcgagcaagaagccgcgccagaagcgcaccgccacgaaggccuacaacgucacccaggccuucgggcggcgcggccccgagcagacccaggggaacuucggcgaccaggagcugauccggcaggggaccgacuacaagcacuggccccagaucgcccaguucgcgcccuccgccagcgccuucuucggcaugucccgcaucggcauggaggugacgccgagcgggaccuggcugaccuacaccggcgccaucaagcucgacgacaaggaccccaacuucaaggaccaggugauccugcugaacaagcacaucgacgccuacaagacguucccgcccaccgagcccaagaaggacaagaagaagaaggcguacgagacccaggcccucccccagcggcagaagaagcagcagaccgucacgcugcugcccgccgccgaccucgacgacuucuccaagcagcugcagcagagcauguccagcgcggacuccacccaggccugaggacuaguuauaagacugacuagcccgaugggccucccaacgggcccuccuccccuccuugcaccgagauuaauaaaaaaaaaaaaaaaaaaaaaaaaaaaaaaaaaaaaaaaaaaaaaaaaaaaaaaaaaaaaaaaaugcaucccccccccccccccccccccccccccccccaaaggcucuuuucagagccaccagaauu

SEQ ID NO: 28417 - RNA, 1477 nt, Artificial Sequence
  SARS-CoV-2/Wuhan-Hu-1__NC_045512.2/MN908947.2/EPI_ISL_402128__nuc leocapsid protein (N) mRNA gc (1-419)(T205I_T362I)
aggagaaagcuuaccaugagcgacaacggcccccagaaccagcgcaacgccccgcggaucaccuucgggggccccuccgacagcaccggguccaaccagaacggcgagcgcagcggggcccgguccaagcagcgccggccccagggccugcccaacaacacggcgagcugguucaccgcccucacccagcacggcaaggaggaccugaaguucccgcgcgggcagggcgugcccaucaacaccaacuccagccccgacgaccagaucggguacuaccggcgcgccacgcggcgcauccggggcggggacggcaagaugaaggaccugagcccccgcugguacuucuacuaccucggcaccgggccggaggccggccugcccuacggggccaacaaggacggcaucaucugggucgcgaccgagggcgcccugaacacccccaaggaccacaucgggacgcggaaccccgccaacaacgccgcgaucgugcuccagcugccgcagggcaccacccugcccaagggguucuacgccgagggcucccgcgggggcucccaggccagcucccggagcuccagccgcucccggaacagcucccgcaacagcacccccggcagcucccgggggaucagccccgcccgcauggccggcaacgggggcgacgcggcccucgcccugcugcuccuggaccggcugaaccagcucgaguccaagaugagcgggaagggccagcagcagcagggccagaccgugaccaagaaguccgccgccgaggcgagcaagaagccgcgccagaagcgcaccgccacgaaggccuacaacgucacccaggccuucgggcggcgcggccccgagcagacccaggggaacuucggcgaccaggagcugauccggcaggggaccgacuacaagcacuggccccagaucgcccaguucgcgcccuccgccagcgccuucuucggcaugucccgcaucggcauggaggugacgccgagcgggaccuggcugaccuacaccggcgccaucaagcucgacgacaaggaccccaacuucaaggaccaggugauccugcugaacaagcacaucgacgccuacaagaucuucccgcccaccgagcccaagaaggacaagaagaagaaggcggacgagacccaggcccucccccagcggcagaagaagcagcagaccgucacgcugcugcccgccgccgaccucgacgacuucuccaagcagcugcagcagagcauguccagcgcggacuccacccaggccugaggacuaguuauaagacugacuagcccgaugggccucccaacgggcccuccuccccuccuugcaccgagauuaauaaaaaaaaaaaaaaaaaaaaaaaaaaaaaaaaaaaaaaaaaaaaaaaaaaaaaaaaaaaaaaaaugcaucccccccccccccccccccccccccccccccaaaggcucuuuucagagccaccagaauu

SEQ ID NO: 28418 - RNA, 1474 nt, Artificial Sequence
  SARS-CoV-2/Wuhan-Hu-1__NC_045512.2/MN908947.2/EPI_ISL_402128__nuc leocapsid protein (N) mRNA gc (1-419)(S2Y_D3del_A12G_T205I)
aggagaaagcuuaccauguacaacggcccccagaaccagcgcaacggcccgcggaucaccuucgggggccccuccgacagcaccggguccaaccagaacggcgagcgcagcggggcccgguccaagcagcgccggccccagggccugcccaacaacacggcgagcugguucaccgcccucacccagcacggcaaggaggaccugaaguucccgcgcgggcagggcgugcccaucaacaccaacuccagccccgacgaccagaucggguacuaccggcgcgccacgcggcgcauccggggcggggacggcaagaugaaggaccugagcccccgcugguacuucuacuaccucggcaccgggccggaggccggccugcccuacggggccaacaaggacggcaucaucugggucgcgaccgagggcgcccugaacacccccaaggaccacaucgggacgcggaaccccgccaacaacgccgcgaucgugcuccagcugccgcagggcaccacccugcccaagggguucuacgccgagggcucccgcgggggcucccaggccagcucccggagcuccagccgcucccggaacagcucccgcaacagcacccccggcagcucccgggggaucagccccgcccgcauggccggcaacgggggcgacgcggcccucgcccugcugcuccuggaccggcugaaccagcucgaguccaagaugagcgggaagggccagcagcagcagggccagaccgugaccaagaaguccgccgccgaggcgagcaagaagccgcgccagaagcgcaccgccacgaaggccuacaacgucacccaggccuucgggcggcgcggccccgagcagacccaggggaacuucggcgaccaggagcugauccggcaggggaccgacuacaagcacuggccccagaucgcccaguucgcgcccuccgccagcgccuucuucggcaugucccgcaucggcauggaggugacgccgagcgggaccuggcugaccuacaccggcgccaucaagcucgacgacaaggaccccaacuucaaggaccaggugauccugcugaacaagcacaucgacgccuacaagacguucccgcccaccgagcccaagaaggacaagaagaagaaggcggacgagacccaggcccucccccagcggcagaagaagcagcagaccgucacgcugcugcccgccgccgaccucgacgacuucuccaagcagcugcagcagagcauguccagcgcggacuccacccaggccugaggacuaguuauaagacugacuagcccgaugggccucccaacgggcccuccuccccuccuugcaccgagauuaauaaaaaaaaaaaaaaaaaaaaaaaaaaaaaaaaaaaaaaaaaaaaaaaaaaaaaaaaaaaaaaaaugcaucccccccccccccccccccccccccccccccaaaggcucuuuucagagccaccagaauu

SEQ ID NO: 28419 - RNA, 1477 nt, Artificial Sequence
  SARS-CoV-2/Wuhan-Hu-1__NC_045512.2/MN908947.2/EPI_ISL_402128__nuc leocapsid protein (N) mRNA gc (1-419)(P13L_R203K_G204R_G214C)
aggagaaagcuuaccaugagcgacaacggcccccagaaccagcgcaacgcccugcggaucaccuucgggggccccuccgacagcaccggguccaaccagaacggcgagcgcagcggggcccgguccaagcagcgccggccccagggccugcccaacaacacggcgagcugguucaccgcccucacccagcacggcaaggaggaccugaaguucccgcgcgggcagggcgugcccaucaacaccaacuccagccccgacgaccagaucggguacuaccggcgcgccacgcggcgcauccggggcggggacggcaagaugaaggaccugagcccccgcugguacuucuacuaccucggcaccgggccggaggccggccugcccuacggggccaacaaggacggcaucaucugggucgcgaccgagggcgcccugaacacccccaaggaccacaucgggacgcggaaccccgccaacaacgccgcgaucgugcuccagcugccgcagggcaccacccugcccaagggguucuacgccgagggcucccgcgggggcucccaggccagcucccggagcuccagccgcucccggaacagcucccgcaacagcacccccggcagcuccaagcgcacgagccccgcccgcauggccggcaacugcggcgacgcggcccucgcccugcugcuccuggaccggcugaaccagcucgaguccaagaugagcgggaagggccagcagcagcagggccagaccgugaccaagaaguccgccgccgaggcgagcaagaagccgcgccagaagcgcaccgccacgaaggccuacaacgucacccaggccuucgggcggcgcggccccgagcagacccaggggaacuucggcgaccaggagcugauccggcaggggaccgacuacaagcacuggccccagaucgcccaguucgcgcccuccgccagcgccuucuucggcaugucccgcaucggcauggaggugacgccgagcgggaccuggcugaccuacaccggcgccaucaagcucgacgacaaggaccccaacuucaaggaccaggugauccugcugaacaagcacaucgacgccuacaagacguucccgcccaccgagcccaagaaggacaagaagaagaaggcggacgagacccaggcccucccccagcggcagaagaagcagcagaccgucacgcugcugcccgccgccgaccucgacgacuucuccaagcagcugcagcagagcauguccagcgcggacuccacccaggccugaggacuaguuauaagacugacuagcccgaugggccucccaacgggcccuccuccccuccuugcaccgagauuaauaaaaaaaaaaaaaaaaaaaaaaaaaaaaaaaaaaaaaaaaaaaaaaaaaaaaaaaaaaaaaaaaugcaucccccccccccccccccccccccccccccccaaaggcucuuuucagagccaccagaauu

SEQ ID NO: 28420 - RNA, 1477 nt, Artificial Sequence
  SARS-CoV-2/Wuhan-Hu-1__NC_045512.2/MN908947.2/EPI_ISL_402128__nuc leocapsid protein (N) mRNA gc (1-419)(P67S_R203M_D377Y)
aggagaaagcuuaccaugagcgacaacggcccccagaaccagcgcaacgccccgcggaucaccuucgggggccccuccgacagcaccggguccaaccagaacggcgagcgcagcggggcccgguccaagcagcgccggccccagggccugcccaacaacacggcgagcugguucaccgcccucacccagcacggcaaggaggaccugaaguucagccgcgggcagggcgugcccaucaacaccaacuccagccccgacgaccagaucggguacuaccggcgcgccacgcggcgcauccggggcggggacggcaagaugaaggaccugagcccccgcugguacuucuacuaccucggcaccgggccggaggccggccugcccuacggggccaacaaggacggcaucaucugggucgcgaccgagggcgcccugaacacccccaaggaccacaucgggacgcggaaccccgccaacaacgccgcgaucgugcuccagcugccgcagggcaccacccugcccaagggguucuacgccgagggcucccgcgggggcucccaggccagcucccggagcuccagccgcucccggaacagcucccgcaacagcacccccggcagcuccauggggacgagccccgcccgcauggccggcaacgggggcgacgcggcccucgcccugcugcuccuggaccggcugaaccagcucgaguccaagaugagcgggaagggccagcagcagcagggccagaccgugaccaagaaguccgccgccgaggcgagcaagaagccgcgccagaagcgcaccgccacgaaggccuacaacgucacccaggccuucgggcggcgcggccccgagcagacccaggggaacuucggcgaccaggagcugauccggcaggggaccgacuacaagcacuggccccagaucgcccaguucgcgcccuccgccagcgccuucuucggcaugucccgcaucggcauggaggugacgccgagcgggaccuggcugaccuacaccggcgccaucaagcucgacgacaaggaccccaacuucaaggaccaggugauccugcugaacaagcacaucgacgccuacaagacguucccgcccaccgagcccaagaaggacaagaagaagaaggcguacgagacccaggcccucccccagcggcagaagaagcagcagaccgucacgcugcugcccgccgccgaccucgacgacuucuccaagcagcugcagcagagcauguccagcgcggacuccacccaggccugaggacuaguuauaagacugacuagcccgaugggccucccaacgggcccuccuccccuccuugcaccgagauuaauaaaaaaaaaaaaaaaaaaaaaaaaaaaaaaaaaaaaaaaaaaaaaaaaaaaaaaaaaaaaaaaaugcaucccccccccccccccccccccccccccccccaaaggcucuuuucagagccaccagaauu

SEQ ID NO: 28421 - RNA, 1477 nt, Artificial Sequence
  SARS-CoV-2/Wuhan-Hu-1__NC_045512.2/MN908947.2/EPI_ISL_402128__nuc leocapsid protein (N) mRNA gc (1-419)(I157V_R203K_G204R)
aggagaaagcuuaccaugagcgacaacggcccccagaaccagcgcaacgccccgcggaucaccuucgggggccccuccgacagcaccggguccaaccagaacggcgagcgcagcggggcccgguccaagcagcgccggccccagggccugcccaacaacacggcgagcugguucaccgcccucacccagcacggcaaggaggaccugaaguucccgcgcgggcagggcgugcccaucaacaccaacuccagccccgacgaccagaucggguacuaccggcgcgccacgcggcgcauccggggcggggacggcaagaugaaggaccugagcccccgcugguacuucuacuaccucggcaccgggccggaggccggccugcccuacggggccaacaaggacggcaucaucugggucgcgaccgagggcgcccugaacacccccaaggaccacaucgggacgcggaaccccgccaacaacgccgcgguggugcuccagcugccgcagggcaccacccugcccaagggguucuacgccgagggcucccgcgggggcucccaggccagcucccggagcuccagccgcucccggaacagcucccgcaacagcacccccggcagcuccaagcgcacgagccccgcccgcauggccggcaacgggggcgacgcggcccucgcccugcugcuccuggaccggcugaaccagcucgaguccaagaugagcgggaagggccagcagcagcagggccagaccgugaccaagaaguccgccgccgaggcgagcaagaagccgcgccagaagcgcaccgccacgaaggccuacaacgucacccaggccuucgggcggcgcggccccgagcagacccaggggaacuucggcgaccaggagcugauccggcaggggaccgacuacaagcacuggccccagaucgcccaguucgcgcccuccgccagcgccuucuucggcaugucccgcaucggcauggaggugacgccgagcgggaccuggcugaccuacaccggcgccaucaagcucgacgacaaggaccccaacuucaaggaccaggugauccugcugaacaagcacaucgacgccuacaagacguucccgcccaccgagcccaagaaggacaagaagaagaaggcggacgagacccaggcccucccccagcggcagaagaagcagcagaccgucacgcugcugcccgccgccgaccucgacgacuucuccaagcagcugcagcagagcauguccagcgcggacuccacccaggccugaggacuaguuauaagacugacuagcccgaugggccucccaacgggcccuccuccccuccuugcaccgagauuaauaaaaaaaaaaaaaaaaaaaaaaaaaaaaaaaaaaaaaaaaaaaaaaaaaaaaaaaaaaaaaaaaugcaucccccccccccccccccccccccccccccccaaaggcucuuuucagagccaccagaauu

SEQ ID NO: 28422 - RNA, 1477 nt, Artificial Sequence
  SARS-CoV-2/Wuhan-Hu-1__NC_045512.2/MN908947.2/EPI_ISL_402128__nuc leocapsid protein (N) mRNA gc (1-419)(A119S_R203K_G204R_M234I)
aggagaaagcuuaccaugagcgacaacggcccccagaaccagcgcaacgccccgcggaucaccuucgggggccccuccgacagcaccggguccaaccagaacggcgagcgcagcggggcccgguccaagcagcgccggccccagggccugcccaacaacacggcgagcugguucaccgcccucacccagcacggcaaggaggaccugaaguucccgcgcgggcagggcgugcccaucaacaccaacuccagccccgacgaccagaucggguacuaccggcgcgccacgcggcgcauccggggcggggacggcaagaugaaggaccugagcccccgcugguacuucuacuaccucggcaccgggccggagagcggccugcccuacggggccaacaaggacggcaucaucugggucgcgaccgagggcgcccugaacacccccaaggaccacaucgggacgcggaaccccgccaacaacgccgcgaucgugcuccagcugccgcagggcaccacccugcccaagggguucuacgccgagggcucccgcgggggcucccaggccagcucccggagcuccagccgcucccggaacagcucccgcaacagcacccccggcagcuccaagcgcacgagccccgcccgcauggccggcaacgggggcgacgcggcccucgcccugcugcuccuggaccggcugaaccagcucgaguccaagaucagcgggaagggccagcagcagcagggccagaccgugaccaagaaguccgccgccgaggcgagcaagaagccgcgccagaagcgcaccgccacgaaggccuacaacgucacccaggccuucgggcggcgcggccccgagcagacccaggggaacuucggcgaccaggagcugauccggcaggggaccgacuacaagcacuggccccagaucgcccaguucgcgcccuccgccagcgccuucuucggcaugucccgcaucggcauggaggugacgccgagcgggaccuggcugaccuacaccggcgccaucaagcucgacgacaaggaccccaacuucaaggaccaggugauccugcugaacaagcacaucgacgccuacaagacguucccgcccaccgagcccaagaaggacaagaagaagaaggcggacgagacccaggcccucccccagcggcagaagaagcagcagaccgucacgcugcugcccgccgccgaccucgacgacuucuccaagcagcugcagcagagcauguccagcgcggacuccacccaggccugaggacuaguuauaagacugacuagcccgaugggccucccaacgggcccuccuccccuccuugcaccgagauuaauaaaaaaaaaaaaaaaaaaaaaaaaaaaaaaaaaaaaaaaaaaaaaaaaaaaaaaaaaaaaaaaaugcaucccccccccccccccccccccccccccccccaaaggcucuuuucagagccaccagaauu

SEQ ID NO: 28423 - RNA, 1477 nt, Artificial Sequence
  SARS-CoV-2/Wuhan-Hu-1__NC_045512.2/MN908947.2/EPI_ISL_402128__nuc leocapsid protein (N) mRNA gc (1-419)(R203K_G204R)
aggagaaagcuuaccaugagcgacaacggcccccagaaccagcgcaacgccccgcggaucaccuucgggggccccuccgacagcaccggguccaaccagaacggcgagcgcagcggggcccgguccaagcagcgccggccccagggccugcccaacaacacggcgagcugguucaccgcccucacccagcacggcaaggaggaccugaaguucccgcgcgggcagggcgugcccaucaacaccaacuccagccccgacgaccagaucggguacuaccggcgcgccacgcggcgcauccggggcggggacggcaagaugaaggaccugagcccccgcugguacuucuacuaccucggcaccgggccggaggccggccugcccuacggggccaacaaggacggcaucaucugggucgcgaccgagggcgcccugaacacccccaaggaccacaucgggacgcggaaccccgccaacaacgccgcgaucgugcuccagcugccgcagggcaccacccugcccaagggguucuacgccgagggcucccgcgggggcucccaggccagcucccggagcuccagccgcucccggaacagcucccgcaacagcacccccggcagcuccaagcgcacgagccccgcccgcauggccggcaacgggggcgacgcggcccucgcccugcugcuccuggaccggcugaaccagcucgaguccaagaugagcgggaagggccagcagcagcagggccagaccgugaccaagaaguccgccgccgaggcgagcaagaagccgcgccagaagcgcaccgccacgaaggccuacaacgucacccaggccuucgggcggcgcggccccgagcagacccaggggaacuucggcgaccaggagcugauccggcaggggaccgacuacaagcacuggccccagaucgcccaguucgcgcccuccgccagcgccuucuucggcaugucccgcaucggcauggaggugacgccgagcgggaccuggcugaccuacaccggcgccaucaagcucgacgacaaggaccccaacuucaaggaccaggugauccugcugaacaagcacaucgacgccuacaagacguucccgcccaccgagcccaagaaggacaagaagaagaaggcggacgagacccaggcccucccccagcggcagaagaagcagcagaccgucacgcugcugcccgccgccgaccucgacgacuucuccaagcagcugcagcagagcauguccagcgcggacuccacccaggccugaggacuaguuauaagacugacuagcccgaugggccucccaacgggcccuccuccccuccuugcaccgagauuaauaaaaaaaaaaaaaaaaaaaaaaaaaaaaaaaaaaaaaaaaaaaaaaaaaaaaaaaaaaaaaaaaugcaucccccccccccccccccccccccccccccccaaaggcucuuuucagagccaccagaauu

SEQ ID NO: 28424 - RNA, 1477 nt, Artificial Sequence
  SARS-CoV-2/Wuhan-Hu-1__NC_045512.2/MN908947.2/EPI_ISL_402128__nuc leocapsid protein (N) mRNA gc (1-419)(R203K_G204R_G212V)
aggagaaagcuuaccaugagcgacaacggcccccagaaccagcgcaacgccccgcggaucaccuucgggggccccuccgacagcaccggguccaaccagaacggcgagcgcagcggggcccgguccaagcagcgccggccccagggccugcccaacaacacggcgagcugguucaccgcccucacccagcacggcaaggaggaccugaaguucccgcgcgggcagggcgugcccaucaacaccaacuccagccccgacgaccagaucggguacuaccggcgcgccacgcggcgcauccggggcggggacggcaagaugaaggaccugagcccccgcugguacuucuacuaccucggcaccgggccggaggccggccugcccuacggggccaacaaggacggcaucaucugggucgcgaccgagggcgcccugaacacccccaaggaccacaucgggacgcggaaccccgccaacaacgccgcgaucgugcuccagcugccgcagggcaccacccugcccaagggguucuacgccgagggcucccgcgggggcucccaggccagcucccggagcuccagccgcucccggaacagcucccgcaacagcacccccggcagcuccaagcgcacgagccccgcccgcauggccgugaacgggggcgacgcggcccucgcccugcugcuccuggaccggcugaaccagcucgaguccaagaugagcgggaagggccagcagcagcagggccagaccgugaccaagaaguccgccgccgaggcgagcaagaagccgcgccagaagcgcaccgccacgaaggccuacaacgucacccaggccuucgggcggcgcggccccgagcagacccaggggaacuucggcgaccaggagcugauccggcaggggaccgacuacaagcacuggccccagaucgcccaguucgcgcccuccgccagcgccuucuucggcaugucccgcaucggcauggaggugacgccgagcgggaccuggcugaccuacaccggcgccaucaagcucgacgacaaggaccccaacuucaaggaccaggugauccugcugaacaagcacaucgacgccuacaagacguucccgcccaccgagcccaagaaggacaagaagaagaaggcggacgagacccaggcccucccccagcggcagaagaagcagcagaccgucacgcugcugcccgccgccgaccucgacgacuucuccaagcagcugcagcagagcauguccagcgcggacuccacccaggccugaggacuaguuauaagacugacuagcccgaugggccucccaacgggcccuccuccccuccuugcaccgagauuaauaaaaaaaaaaaaaaaaaaaaaaaaaaaaaaaaaaaaaaaaaaaaaaaaaaaaaaaaaaaaaaaaugcaucccccccccccccccccccccccccccccccaaaggcucuuuucagagccaccagaauu

SEQ ID NO: 28425 - RNA, 1474 nt, Artificial Sequence
  SARS-CoV-2/Wuhan-Hu-1__NC_045512.2/MN908947.2/EPI_ISL_402128__nuc leocapsid protein (N) mRNA gc (1-419)(R203K_G204R_A208G_R209del)
aggagaaagcuuaccaugagcgacaacggcccccagaaccagcgcaacgccccgcggaucaccuucgggggccccuccgacagcaccggguccaaccagaacggcgagcgcagcggggcccgguccaagcagcgccggccccagggccugcccaacaacacggcgagcugguucaccgcccucacccagcacggcaaggaggaccugaaguucccgcgcgggcagggcgugcccaucaacaccaacuccagccccgacgaccagaucggguacuaccggcgcgccacgcggcgcauccggggcggggacggcaagaugaaggaccugagcccccgcugguacuucuacuaccucggcaccgggccggaggccggccugcccuacggggccaacaaggacggcaucaucugggucgcgaccgagggcgcccugaacacccccaaggaccacaucgggacgcggaaccccgccaacaacgccgcgaucgugcuccagcugccgcagggcaccacccugcccaagggguucuacgccgagggcucccgcgggggcucccaggccagcucccggagcuccagccgcucccggaacagcucccgcaacagcacccccggcagcuccaagcgcacgagccccggcauggccggcaacgggggcgacgcggcccucgcccugcugcuccuggaccggcugaaccagcucgaguccaagaugagcgggaagggccagcagcagcagggccagaccgugaccaagaaguccgccgccgaggcgagcaagaagccgcgccagaagcgcaccgccacgaaggccuacaacgucacccaggccuucgggcggcgcggccccgagcagacccaggggaacuucggcgaccaggagcugauccggcaggggaccgacuacaagcacuggccccagaucgcccaguucgcgcccuccgccagcgccuucuucggcaugucccgcaucggcauggaggugacgccgagcgggaccuggcugaccuacaccggcgccaucaagcucgacgacaaggaccccaacuucaaggaccaggugauccugcugaacaagcacaucgacgccuacaagacguucccgcccaccgagcccaagaaggacaagaagaagaaggcggacgagacccaggcccucccccagcggcagaagaagcagcagaccgucacgcugcugcccgccgccgaccucgacgacuucuccaagcagcugcagcagagcauguccagcgcggacuccacccaggccugaggacuaguuauaagacugacuagcccgaugggccucccaacgggcccuccuccccuccuugcaccgagauuaauaaaaaaaaaaaaaaaaaaaaaaaaaaaaaaaaaaaaaaaaaaaaaaaaaaaaaaaaaaaaaaaaugcaucccccccccccccccccccccccccccccccaaaggcucuuuucagagccaccagaauu

SEQ ID NO: 28426 - RNA, 1477 nt, Artificial Sequence
  SARS-CoV-2/Wuhan-Hu-1__NC_045512.2/MN908947.2/EPI_ISL_402128__nuc leocapsid protein (N) mRNA gc (1-419)(R203M_D377Y)
aggagaaagcuuaccaugagcgacaacggcccccagaaccagcgcaacgccccgcggaucaccuucgggggccccuccgacagcaccggguccaaccagaacggcgagcgcagcggggcccgguccaagcagcgccggccccagggccugcccaacaacacggcgagcugguucaccgcccucacccagcacggcaaggaggaccugaaguucccgcgcgggcagggcgugcccaucaacaccaacuccagccccgacgaccagaucggguacuaccggcgcgccacgcggcgcauccggggcggggacggcaagaugaaggaccugagcccccgcugguacuucuacuaccucggcaccgggccggaggccggccugcccuacggggccaacaaggacggcaucaucugggucgcgaccgagggcgcccugaacacccccaaggaccacaucgggacgcggaaccccgccaacaacgccgcgaucgugcuccagcugccgcagggcaccacccugcccaagggguucuacgccgagggcucccgcgggggcucccaggccagcucccggagcuccagccgcucccggaacagcucccgcaacagcacccccggcagcuccauggggacgagccccgcccgcauggccggcaacgggggcgacgcggcccucgcccugcugcuccuggaccggcugaaccagcucgaguccaagaugagcgggaagggccagcagcagcagggccagaccgugaccaagaaguccgccgccgaggcgagcaagaagccgcgccagaagcgcaccgccacgaaggccuacaacgucacccaggccuucgggcggcgcggccccgagcagacccaggggaacuucggcgaccaggagcugauccggcaggggaccgacuacaagcacuggccccagaucgcccaguucgcgcccuccgccagcgccuucuucggcaugucccgcaucggcauggaggugacgccgagcgggaccuggcugaccuacaccggcgccaucaagcucgacgacaaggaccccaacuucaaggaccaggugauccugcugaacaagcacaucgacgccuacaagacguucccgcccaccgagcccaagaaggacaagaagaagaaggcguacgagacccaggcccucccccagcggcagaagaagcagcagaccgucacgcugcugcccgccgccgaccucgacgacuucuccaagcagcugcagcagagcauguccagcgcggacuccacccaggccugaggacuaguuauaagacugacuagcccgaugggccucccaacgggcccuccuccccuccuugcaccgagauuaauaaaaaaaaaaaaaaaaaaaaaaaaaaaaaaaaaaaaaaaaaaaaaaaaaaaaaaaaaaaaaaaaugcaucccccccccccccccccccccccccccccccaaaggcucuuuucagagccaccagaauu

SEQ ID NO: 28427 - RNA, 1477 nt, Artificial Sequence
  SARS-CoV-2/Wuhan-Hu-1__NC_045512.2/MN908947.2/EPI_ISL_402128__nuc leocapsid protein (N) mRNA gc (1-419)(T205I_M234I)
aggagaaagcuuaccaugagcgacaacggcccccagaaccagcgcaacgccccgcggaucaccuucgggggccccuccgacagcaccggguccaaccagaacggcgagcgcagcggggcccgguccaagcagcgccggccccagggccugcccaacaacacggcgagcugguucaccgcccucacccagcacggcaaggaggaccugaaguucccgcgcgggcagggcgugcccaucaacaccaacuccagccccgacgaccagaucggguacuaccggcgcgccacgcggcgcauccggggcggggacggcaagaugaaggaccugagcccccgcugguacuucuacuaccucggcaccgggccggaggccggccugcccuacggggccaacaaggacggcaucaucugggucgcgaccgagggcgcccugaacacccccaaggaccacaucgggacgcggaaccccgccaacaacgccgcgaucgugcuccagcugccgcagggcaccacccugcccaagggguucuacgccgagggcucccgcgggggcucccaggccagcucccggagcuccagccgcucccggaacagcucccgcaacagcacccccggcagcucccgggggaucagccccgcccgcauggccggcaacgggggcgacgcggcccucgcccugcugcuccuggaccggcugaaccagcucgaguccaagaucagcgggaagggccagcagcagcagggccagaccgugaccaagaaguccgccgccgaggcgagcaagaagccgcgccagaagcgcaccgccacgaaggccuacaacgucacccaggccuucgggcggcgcggccccgagcagacccaggggaacuucggcgaccaggagcugauccggcaggggaccgacuacaagcacuggccccagaucgcccaguucgcgcccuccgccagcgccuucuucggcaugucccgcaucggcauggaggugacgccgagcgggaccuggcugaccuacaccggcgccaucaagcucgacgacaaggaccccaacuucaaggaccaggugauccugcugaacaagcacaucgacgccuacaagacguucccgcccaccgagcccaagaaggacaagaagaagaaggcggacgagacccaggcccucccccagcggcagaagaagcagcagaccgucacgcugcugcccgccgccgaccucgacgacuucuccaagcagcugcagcagagcauguccagcgcggacuccacccaggccugaggacuaguuauaagacugacuagcccgaugggccucccaacgggcccuccuccccuccuugcaccgagauuaauaaaaaaaaaaaaaaaaaaaaaaaaaaaaaaaaaaaaaaaaaaaaaaaaaaaaaaaaaaaaaaaaugcaucccccccccccccccccccccccccccccccaaaggcucuuuucagagccaccagaauu

SEQ ID NO: 28428 - RNA, 1477 nt, Artificial Sequence; identical to SEQ ID NO: 21026
  SARS-CoV-2/Wuhan-Hu-1__NC_045512.2/MN908947.2/EPI_ISL_402128__nuc leocapsid protein (N) mRNA gc (1-419)(M234I)

SEQ ID NO: 28429 - RNA, 1477 nt, Artificial Sequence
  SARS-CoV-2/Wuhan-Hu-1__NC_045512.2/MN908947.2/EPI_ISL_402128__nuc leocapsid protein (N) mRNA gc (1-419)(A12G_T205I)
aggagaaagcuuaccaugagcgacaacggcccccagaaccagcgcaacggcccgcggaucaccuucgggggccccuccgacagcaccggguccaaccagaacggcgagcgcagcggggcccgguccaagcagcgccggccccagggccugcccaacaacacggcgagcugguucaccgcccucacccagcacggcaaggaggaccugaaguucccgcgcgggcagggcgugcccaucaacaccaacuccagccccgacgaccagaucggguacuaccggcgcgccacgcggcgcauccggggcggggacggcaagaugaaggaccugagcccccgcugguacuucuacuaccucggcaccgggccggaggccggccugcccuacggggccaacaaggacggcaucaucugggucgcgaccgagggcgcccugaacacccccaaggaccacaucgggacgcggaaccccgccaacaacgccgcgaucgugcuccagcugccgcagggcaccacccugcccaagggguucuacgccgagggcucccgcgggggcucccaggccagcucccggagcuccagccgcucccggaacagcucccgcaacagcacccccggcagcucccgggggaucagccccgcccgcauggccggcaacgggggcgacgcggcccucgcccugcugcuccuggaccggcugaaccagcucgaguccaagaugagcgggaagggccagcagcagcagggccagaccgugaccaagaaguccgccgccgaggcgagcaagaagccgcgccagaagcgcaccgccacgaaggccuacaacgucacccaggccuucgggcggcgcggccccgagcagacccaggggaacuucggcgaccaggagcugauccggcaggggaccgacuacaagcacuggccccagaucgcccaguucgcgcccuccgccagcgccuucuucggcaugucccgcaucggcauggaggugacgccgagcgggaccuggcugaccuacaccggcgccaucaagcucgacgacaaggaccccaacuucaaggaccaggugauccugcugaacaagcacaucgacgccuacaagacguucccgcccaccgagcccaagaaggacaagaagaagaaggcggacgagacccaggcccucccccagcggcagaagaagcagcagaccgucacgcugcugcccgccgccgaccucgacgacuucuccaagcagcugcagcagagcauguccagcgcggacuccacccaggccugaggacuaguuauaagacugacuagcccgaugggccucccaacgggcccuccuccccuccuugcaccgagauuaauaaaaaaaaaaaaaaaaaaaaaaaaaaaaaaaaaaaaaaaaaaaaaaaaaaaaaaaaaaaaaaaaugcaucccccccccccccccccccccccccccccccaaaggcucuuuucagagccaccagaauu

SEQ ID NO: 28430 - RNA, 1477 nt, Artificial Sequence
  SARS-CoV-2/Wuhan-Hu-1__NC_045512.2/MN908947.2/EPI_ISL_402128__nuc leocapsid protein (N) mRNA gc (1-419)(P13L_P199L_S202R_T205I_M234I)
aggagaaagcuuaccaugagcgacaacggcccccagaaccagcgcaacgcccugcggaucaccuucgggggccccuccgacagcaccggguccaaccagaacggcgagcgcagcggggcccgguccaagcagcgccggccccagggccugcccaacaacacggcgagcugguucaccgcccucacccagcacggcaaggaggaccugaaguucccgcgcgggcagggcgugcccaucaacaccaacuccagccccgacgaccagaucggguacuaccggcgcgccacgcggcgcauccggggcggggacggcaagaugaaggaccugagcccccgcugguacuucuacuaccucggcaccgggccggaggccggccugcccuacggggccaacaaggacggcaucaucugggucgcgaccgagggcgcccugaacacccccaaggaccacaucgggacgcggaaccccgccaacaacgccgcgaucgugcuccagcugccgcagggcaccacccugcccaagggguucuacgccgagggcucccgcgggggcucccaggccagcucccggagcuccagccgcucccggaacagcucccgcaacagcacccugggcagccgccgggggaucagccccgcccgcauggccggcaacgggggcgacgcggcccucgcccugcugcuccuggaccggcugaaccagcucgaguccaagaucagcgggaagggccagcagcagcagggccagaccgugaccaagaaguccgccgccgaggcgagcaagaagccgcgccagaagcgcaccgccacgaaggccuacaacgucacccaggccuucgggcggcgcggccccgagcagacccaggggaacuucggcgaccaggagcugauccggcaggggaccgacuacaagcacuggccccagaucgcccaguucgcgcccuccgccagcgccuucuucggcaugucccgcaucggcauggaggugacgccgagcgggaccuggcugaccuacaccggcgccaucaagcucgacgacaaggaccccaacuucaaggaccaggugauccugcugaacaagcacaucgacgccuacaagacguucccgcccaccgagcccaagaaggacaagaagaagaaggcggacgagacccaggcccucccccagcggcagaagaagcagcagaccgucacgcugcugcccgccgccgaccucgacgacuucuccaagcagcugcagcagagcauguccagcgcggacuccacccaggccugaggacuaguuauaagacugacuagcccgaugggccucccaacgggcccuccuccccuccuugcaccgagauuaauaaaaaaaaaaaaaaaaaaaaaaaaaaaaaaaaaaaaaaaaaaaaaaaaaaaaaaaaaaaaaaaaugcaucccccccccccccccccccccccccccccccaaaggcucuuuucagagccaccagaauu

SEQ ID NO: 28431 - RNA, 1477 nt, Artificial Sequence
  SARS-CoV-2/Wuhan-Hu-1__NC_045512.2/MN908947.2/EPI_ISL_402128__nuc leocapsid protein (N) mRNA gc (1-419)(P13L_R203K_G204R_G214C_T366I)
aggagaaagcuuaccaugagcgacaacggcccccagaaccagcgcaacgcccugcggaucaccuucgggggccccuccgacagcaccggguccaaccagaacggcgagcgcagcggggcccgguccaagcagcgccggccccagggccugcccaacaacacggcgagcugguucaccgcccucacccagcacggcaaggaggaccugaaguucccgcgcgggcagggcgugcccaucaacaccaacuccagccccgacgaccagaucggguacuaccggcgcgccacgcggcgcauccggggcggggacggcaagaugaaggaccugagcccccgcugguacuucuacuaccucggcaccgggccggaggccggccugcccuacggggccaacaaggacggcaucaucugggucgcgaccgagggcgcccugaacacccccaaggaccacaucgggacgcggaaccccgccaacaacgccgcgaucgugcuccagcugccgcagggcaccacccugcccaagggguucuacgccgagggcucccgcgggggcucccaggccagcucccggagcuccagccgcucccggaacagcucccgcaacagcacccccggcagcuccaagcgcacgagccccgcccgcauggccggcaacugcggcgacgcggcccucgcccugcugcuccuggaccggcugaaccagcucgaguccaagaugagcgggaagggccagcagcagcagggccagaccgugaccaagaaguccgccgccgaggcgagcaagaagccgcgccagaagcgcaccgccacgaaggccuacaacgucacccaggccuucgggcggcgcggccccgagcagacccaggggaacuucggcgaccaggagcugauccggcaggggaccgacuacaagcacuggccccagaucgcccaguucgcgcccuccgccagcgccuucuucggcaugucccgcaucggcauggaggugacgccgagcgggaccuggcugaccuacaccggcgccaucaagcucgacgacaaggaccccaacuucaaggaccaggugauccugcugaacaagcacaucgacgccuacaagacguucccgcccaucgagcccaagaaggacaagaagaagaaggcggacgagacccaggcccucccccagcggcagaagaagcagcagaccgucacgcugcugcccgccgccgaccucgacgacuucuccaagcagcugcagcagagcauguccagcgcggacuccacccaggccugaggacuaguuauaagacugacuagcccgaugggccucccaacgggcccuccuccccuccuugcaccgagauuaauaaaaaaaaaaaaaaaaaaaaaaaaaaaaaaaaaaaaaaaaaaaaaaaaaaaaaaaaaaaaaaaaugcaucccccccccccccccccccccccccccccccaaaggcucuuuucagagccaccagaauu

SEQ ID NO: 28432 - RNA, 1474 nt, Artificial Sequence
  SARS-CoV-2/Wuhan-Hu-1__NC_045512.2/MN908947.2/EPI_ISL_402128__nuc leocapsid protein (N) mRNA gc (1-419)(R203K_G204R_A208G_R209del_M234I)
aggagaaagcuuaccaugagcgacaacggcccccagaaccagcgcaacgccccgcggaucaccuucgggggccccuccgacagcaccggguccaaccagaacggcgagcgcagcggggcccgguccaagcagcgccggccccagggccugcccaacaacacggcgagcugguucaccgcccucacccagcacggcaaggaggaccugaaguucccgcgcgggcagggcgugcccaucaacaccaacuccagccccgacgaccagaucggguacuaccggcgcgccacgcggcgcauccggggcggggacggcaagaugaaggaccugagcccccgcugguacuucuacuaccucggcaccgggccggaggccggccugcccuacggggccaacaaggacggcaucaucugggucgcgaccgagggcgcccugaacacccccaaggaccacaucgggacgcggaaccccgccaacaacgccgcgaucgugcuccagcugccgcagggcaccacccugcccaagggguucuacgccgagggcucccgcgggggcucccaggccagcucccggagcuccagccgcucccggaacagcucccgcaacagcacccccggcagcuccaagcgcacgagccccggcauggccggcaacgggggcgacgcggcccucgcccugcugcuccuggaccggcugaaccagcucgaguccaagaucagcgggaagggccagcagcagcagggccagaccgugaccaagaaguccgccgccgaggcgagcaagaagccgcgccagaagcgcaccgccacgaaggccuacaacgucacccaggccuucgggcggcgcggccccgagcagacccaggggaacuucggcgaccaggagcugauccggcaggggaccgacuacaagcacuggccccagaucgcccaguucgcgcccuccgccagcgccuucuucggcaugucccgcaucggcauggaggugacgccgagcgggaccuggcugaccuacaccggcgccaucaagcucgacgacaaggaccccaacuucaaggaccaggugauccugcugaacaagcacaucgacgccuacaagacguucccgcccaccgagcccaagaaggacaagaagaagaaggcggacgagacccaggcccucccccagcggcagaagaagcagcagaccgucacgcugcugcccgccgccgaccucgacgacuucuccaagcagcugcagcagagcauguccagcgcggacuccacccaggccugaggacuaguuauaagacugacuagcccgaugggccucccaacgggcccuccuccccuccuugcaccgagauuaauaaaaaaaaaaaaaaaaaaaaaaaaaaaaaaaaaaaaaaaaaaaaaaaaaaaaaaaaaaaaaaaaugcaucccccccccccccccccccccccccccccccaaaggcucuuuucagagccaccagaauu

SEQ ID NO: 28433 - RNA, 445 nt, Artificial Sequence
  SARS-CoV-2/Wuhan-Hu-1__NC_045512.2/MN908947.2/EPI_ISL_402128__env elope protein (E) mRNA gc (1-75)(P71L)
aggagaaagcuuaccauguacagcuucguguccgaggagaccggcacccugaucgucaacagcgugcuccuguuccuggccuucguggucuuccuccuggugacgcuggccauccucaccgcgcugcgccugugcgccuacugcugcaacaucgugaacgucucccucgugaagcccagcuucuacguguacucccgggucaagaaccugaacagcucccgcgugcuggaccugcucgugugaggacuaguuauaagacugacuagcccgaugggccucccaacgggcccuccuccccuccuugcaccgagauuaauaaaaaaaaaaaaaaaaaaaaaaaaaaaaaaaaaaaaaaaaaaaaaaaaaaaaaaaaaaaaaaaaugcaucccccccccccccccccccccccccccccccaaaggcucuuuucagagccaccagaauu

SEQ ID NO: 28434 - RNA, 445 nt, Artificial Sequence
  SARS-CoV-2/Wuhan-Hu-1__NC_045512.2/MN908947.2/EPI_ISL_402128__env elope protein (E) mRNA gc (1-75)(T9I_C43F_V49L_V58F_V62F_L73F)
aggagaaagcuuaccauguacagcuucguguccgaggagaucggcacccugaucgucaacagcgugcuccuguuccuggccuucguggucuuccuccuggugacgcuggccauccucaccgcgcugcgccugugcgccuacuucugcaacaucgugaaccugucccucgugaagcccagcuucuacuucuacucccgguucaagaaccugaacagcucccgcgugccggacuuccucgugugaggacuaguuauaagacugacuagcccgaugggccucccaacgggcccuccuccccuccuugcaccgagauuaauaaaaaaaaaaaaaaaaaaaaaaaaaaaaaaaaaaaaaaaaaaaaaaaaaaaaaaaaaaaaaaaaugcaucccccccccccccccccccccccccccccccaaaggcucuuuucagagccaccagaauu

SEQ ID NO: 28435 - RNA, 445 nt, Artificial Sequence
  SARS-CoV-2/Wuhan-Hu-1__NC_045512.2/MN908947.2/EPI_ISL_402128__env elope protein (E) mRNA gc (1-75)(T9I_V58F_V62F_S68F_L73F)
aggagaaagcuuaccauguacagcuucguguccgaggagaucggcacccugaucgucaacagcgugcuccuguuccuggccuucguggucuuccuccuggugacgcuggccauccucaccgcgcugcgccugugcgccuacugcugcaacaucgugaacgucucccucgugaagcccagcuucuacuucuacucccgguucaagaaccugaacagcuuccgcgugccggacuuccucgugugaggacuaguuauaagacugacuagcccgaugggccucccaacgggcccuccuccccuccuugcaccgagauuaauaaaaaaaaaaaaaaaaaaaaaaaaaaaaaaaaaaaaaaaaaaaaaaaaaaaaaaaaaaaaaaaaugcaucccccccccccccccccccccccccccccccaaaggcucuuuucagagccaccagaauu

SEQ ID NO: 28436 - RNA, 445 nt, Artificial Sequence
  SARS-CoV-2/Wuhan-Hu-1__NC_045512.2/MN908947.2/EPI_ISL_402128__env elope protein (E) mRNA gc (1-75)(T9I_V58F_S68A_R69G_P71S)
aggagaaagcuuaccauguacagcuucguguccgaggagaucggcacccugaucgucaacagcgugcuccuguuccuggccuucguggucuuccuccuggugacgcuggccauccucaccgcgcugcgccugugcgccuacugcugcaacaucgugaacgucucccucgugaagcccagcuucuacuucuacucccgggucaagaaccugaacagcgccggcgugagcgaccugcucgugugaggacuaguuauaagacugacuagcccgaugggccucccaacgggcccuccuccccuccuugcaccgagauuaauaaaaaaaaaaaaaaaaaaaaaaaaaaaaaaaaaaaaaaaaaaaaaaaaaaaaaaaaaaaaaaaaugcaucccccccccccccccccccccccccccccccaaaggcucuuuucagagccaccagaauu

SEQ ID NO: 28437 - RNA, 445 nt, Artificial Sequence
  SARS-CoV-2/Wuhan-Hu-1__NC_045512.2/MN908947.2/EPI_ISL_402128__env elope protein (E) mRNA gc (1-75)(L21F)
aggagaaagcuuaccauguacagcuucguguccgaggagaccggcacccugaucgucaacagcgugcuccuguucuucgccuucguggucuuccuccuggugacgcuggccauccucaccgcgcugcgccugugcgccuacugcugcaacaucgugaacgucucccucgugaagcccagcuucuacguguacucccgggucaagaaccugaacagcucccgcgugccggaccugcucgugugaggacuaguuauaagacugacuagcccgaugggccucccaacgggcccuccuccccuccuugcaccgagauuaauaaaaaaaaaaaaaaaaaaaaaaaaaaaaaaaaaaaaaaaaaaaaaaaaaaaaaaaaaaaaaaaaugcaucccccccccccccccccccccccccccccccaaaggcucuuuucagagccaccagaauu

SEQ ID NO: 28438 - RNA, 445 nt, Artificial Sequence
  SARS-CoV-2/Wuhan-Hu-1__NC_045512.2/MN908947.2/EPI_ISL_402128__env elope protein (E) mRNA gc (1-75)(T9I_L21F_S55F_V58F_S68F_L73F)
aggagaaagcuuaccauguacagcuucguguccgaggagaucggcacccugaucgucaacagcgugcuccuguucuucgccuucguggucuuccuccuggugacgcuggccauccucaccgcgcugcgccugugcgccuacugcugcaacaucgugaacgucucccucgugaagcccuucuucuacuucuacucccgggucaagaaccugaacagcuuccgcgugccggacuuccucgugugaggacuaguuauaagacugacuagcccgaugggccucccaacgggcccuccuccccuccuugcaccgagauuaauaaaaaaaaaaaaaaaaaaaaaaaaaaaaaaaaaaaaaaaaaaaaaaaaaaaaaaaaaaaaaaaaugcaucccccccccccccccccccccccccccccccaaaggcucuuuucagagccaccagaauu

SEQ ID NO: 28439 - RNA, 445 nt, Artificial Sequence
  SARS-CoV-2/Wuhan-Hu-1__NC_045512.2/MN908947.2/EPI_ISL_402128__env elope protein (E) mRNA gc (1-75)(T9I_S55F_V58F_S68F_P71L_D72Y_L73F)
aggagaaagcuuaccauguacagcuucguguccgaggagaucggcacccugaucgucaacagcgugcuccuguuccuggccuucguggucuuccuccuggugacgcuggccauccucaccgcgcugcgccugugcgccuacugcugcaacaucgugaacgucucccucgugaagcccuucuucuacuucuacucccgggucaagaaccugaacagcuuccgcgugcuguacuuccucgugugaggacuaguuauaagacugacuagcccgaugggccucccaacgggcccuccuccccuccuugcaccgagauuaauaaaaaaaaaaaaaaaaaaaaaaaaaaaaaaaaaaaaaaaaaaaaaaaaaaaaaaaaaaaaaaaaugcaucccccccccccccccccccccccccccccccaaaggcucuuuucagagccaccagaauu

SEQ ID NO: 28440 - RNA, 445 nt, Artificial Sequence
  SARS-CoV-2/Wuhan-Hu-1__NC_045512.2/MN908947.2/EPI_ISL_402128__env elope protein (E) mRNA gc (1-75)(T9I_S55F_V58F_S68F_D72Y_L73F)
aggagaaagcuuaccauguacagcuucguguccgaggagaucggcacccugaucgucaacagcgugcuccuguuccuggccuucguggucuuccuccuggugacgcuggccauccucaccgcgcugcgccugugcgccuacugcugcaacaucgugaacgucucccucgugaagcccuucuucuacuucuacucccgggucaagaaccugaacagcuuccgcgugccguacuuccucgugugaggacuaguuauaagacugacuagcccgaugggccucccaacgggcccuccuccccuccuugcaccgagauuaauaaaaaaaaaaaaaaaaaaaaaaaaaaaaaaaaaaaaaaaaaaaaaaaaaaaaaaaaaaaaaaaaugcaucccccccccccccccccccccccccccccccaaaggcucuuuucagagccaccagaauu

SEQ ID NO: 28441 - RNA, 6058 nt, Artificial Sequence
  SARS-CoV-2/Wuhan-Hu-1__NC_045512.2/MN908947.2__non-structural protein 3 (NSP3) mRNA gc (1-1946)(T184I_A891D_I1413T)
aggagaaagcuuaccauggcccccaccaaggugaccuucggcgacgacaccgucaucgaggugcagggguacaagagcgugaacaucaccuucgagcuggacgagcgcaucgacaagguccucaacgagaagugcuccgccuacaccguggagcugggcaccgaggugaacgaguucgcgugcgucguggccgacgccgugaucaagacgcugcagccggucagcgagcuccugacgccccuggggaucgaccucgacgagugguccauggccaccuacuaccuguucgacgagagcggcgaguucaagcuggccucccacauguacugcagcuucuacccgcccgacgaggacgaggaggagggggacugcgaggaggaggaguucgagcccuccacccaguacgaguacggcacggaggacgacuaccagggcaagccccucgaguucggggcgaccagcgccgcccugcagcccgaggaggagcaggaggaggacuggcuggacgacgacucccagcagaccgugggccagcaggacgggagcgaggacaaccagaccacgaucauccagaccaucguggagguccagccccagcucgagauggagcugaccccgguggugcagacgaucgaggucaacuccuucagcggcuaccugaagcucaccgacaacguguacaucaagaacgccgacaucguggaggaggcgaagaaggucaagcccaccgugguggucaacgccgccaacguguaccugaagcacgggggcggcguggccggggcccugaacaaggcgaccaacaacgccaugcaggucgaguccgacgacuacaucgccacgaacggcccccucaaggucgggggcagcugcgugcuguccggccacaaccuggccaagcacugccuccacgugguggggcccaacgucaacaagggcgaggacauccagcugcucaagagcgccuacgagaacuucaaccagcacgaggugcugcuggcgccgcugcucuccgccgggaucuucggcgccgaccccauccacagccugcgggugugcgucgacaccgugcgcaccaacguguaccuggccgucuucgacaagaaccucuacgacaagcugguguccagcuuccuggagaugaaguccgagaagcaggucgagcagaagaucgccgagauccccaaggaggaggugaagcccuucaucaccgagagcaagccgagcguggagcagcggaagcaggacgacaagaagaucaaggcgugcguggaggaggucacgaccacccucgaggagaccaaguuccugacggagaaccugcuccuguacaucgacaucaacgggaaccugcaccccgacuccgccacccucgugagcgacaucgacaucaccuuccugaagaaggacgcccccuacaucgugggcgacgucgugcaggagggcgugcugaccgccgucgugauccccacgaagaaggccgggggcaccaccgagaugcucgcgaaggcccugcgcaaggugccgaccgacaacuacaucacgaccuaccccgggcagggccugaacggguacaccgucgaggaggccaagaccgugcucaagaagugcaaguccgccuucuacauccugcccagcaucaucuccaacgagaagcaggagauccugggcaccgugagcuggaaccugcgggagaugcucgcgcacgccgaggagacgcgcaagcugaugcccgucugcguggagaccaaggccaucguguccaccauccagcggaaguacaagggcaucaagauccaggagggggucguggacuacggcgcccgcuucuacuucuacaccagcaagacgaccguggccucccugaucaacacccucaacgaccugaacgagacccuggucacgaugccgcucggguacgugacccacggccugaaccuggaggaggcggcccgguacaugcgcagccucaaggugcccgccaccgucuccgugagcucccccgacgccgugaccgccuacaacggguaccugacgagcuccagcaagacccccgaggagcacuucaucgagaccaucucccuggcgggcagcuacaaggacuggagcuacuccggccagagcacccagcucgggaucgaguuccugaagcggggcgacaaguccgucuacuacacgagcaacccgaccaccuuccaccuggacggggaggugaucaccuucgacaaccucaagacgcugcugucccuccgcgaggugcggaccaucaaggucuucaccaccguggacaacaucaaccugcacacccagguggucgacaugagcaugaccuacggccagcaguucggccccaccuaccuggacggggccgacgugaccaagaucaagccccacaacucccacgagggcaagacguucuacgugcucccgaacgacgacacccugcgcgucgaggccuucgaguacuaccacaccaccgaccccagcuuccuggggcgguacauguccgcccucaaccacacgaagaaguggaaguacccccaggugaacggccugaccagcaucaagugggccgacaacaacugcuaccuggcgaccgcccuccugacccugcagcagaucgagcucaaguucaacccgcccgcccugcaggacgccuacuaccgcgcgcgggccggggaggccgacaacuucugcgcccugauccucgcguacugcaacaagacggugggcgagcugggcgacguccgcgagaccauguccuaccuguuccagcacgccaaccucgacagcugcaagcgggugcugaacgucgugugcaagaccugcgggcagcagcagaccacccugaagggcguggaggccgucauguacauggggacgcucuccuacgagcaguucaagaagggcgugcagauccccugcacgugcgggaagcaggccaccaaguaccuggugcagcaggagagccccuucgucaugauguccgcgcccccggcccaguacgagcugaagcacggcaccuucacgugcgccagcgaguacaccggcaacuaccagugcgggcacuacaagcacaucaccuccaaggagacccucuacugcaucgacggcgcccugcugaccaagagcagcgaguacaaggggcccaucaccgacguguucuacaaggagaacuccuacaccaccacgaucaagcccgugaccuacaagcucgacggcgucgugugcaccgagaucgaccccaagcuggacaacuacuacaagaaggacaacagcuacuucaccgagcagccgaucgaccuggugcccaaccagcccuaccccaacgccuccuucgacaacuucaaguucgucugcgacaacaucaaguucgccgacgaccucaaccagcugacgggguacaagaagccggcgagccgcgagcugaaggugaccuucuuccccgaccucaacggcgacguggucgccaucgacuacaagcacuacacccccuccuucaagaagggcgccaagcugcugcacaagcccaucguguggcacgugaacaacgccaccaacaaggcgacguacaagccgaacaccuggugcauccggugccucuggagcaccaagcccgucgagaccuccaacagcuucgacgugcugaaguccgaggacgcccaggggauggacaaccuggccugcgaggaccucaagcccgugagcgaggaggucguggagaaccccacgauccagaaggacgugcuggagugcaacgucaagaccaccgagguggugggcgacaucauccugaagccggccaacaacucccucaagaucaccgaggaggucgggcacacggaccugauggccgcguacguggacaacagcucccugaccaucaagaagcccaacgagcucagccgcgugcugggccugaagacccucgccacccacgggcuggccgccgucaacuccgugcccugggacacgaucgccaacuacgcgaagccguuccugaacaagguggucagcaccaccaccaacaucgugacgcgcugccucaaccgggugugcaccaacuacaugcccuacuucuucacccugcugcuccagcugugcaccuucacgcgcuccaccaacagccggaucaaggccuccaugcccaccaccaucgccaagaacaccgucaagagcgugggcaaguucugccuggaggccagcuucaacuaccucaagucccccaacuucagcaagcugaucaacaucaccaucugguuccugcuccuguccgugugccugggcagccucaucuacuccacggccgcgcuggggguccugaugagcaaccucggcaugccguccuacugcaccggguaccgcgagggcuaccugaacagcaccaacgugaccaucgccacguacugcaccggcuccauccccugcagcgugugccuguccgggcucgacagccuggacaccuaccccucccuggagaccauccagaucacgaucagcuccuucaagugggaccucaccgccuucggccuggucgccgagugguuccuggccuacauccucuucacccgguucuucuacgugcuggggcuggcggccaucaugcagcuguucuucagcuacuucgccgugcacuucaucuccaacagcuggcucauguggcugaucaucaaccugguccagauggcccccaucuccgcgauggugcgcauguacaucuucuucgccagcuucuacuacguguggaaguccuacguccacgugguggacggcugcaacagcagcacgugcaugaugugcuacaagcggaaccgcgccacgcgggucgagugcaccaccaucgugaacgggguccgccgguccuucuacguguacgccaacggcggcaagggguucugcaagcuccacaacuggaacugcgugaacugcgacaccuucugcgccggcagcacguucaucuccgacgaggucgcgcgcgaccugagccugcaguucaagcggccgaucaaccccaccgaccaguccagcuacaucguggacuccgugaccgucaagaacgggagcauccaccucuacuucgacaaggccggccagaagaccuacgagcgccacucccugagccacuucgugaaccuggacaaccuccgggccaacaacacgaaggggucccugcccaucaacgugaucgucuucgacggcaagagcaagugcgaggaguccagcgccaaguccgccagcguguacuacucccagcugaugugccagcccauccuccugcuggaccaggcgcucgugagcgacgucggcgacagcgccgagguggccgugaagauguucgacgccuacgucaacaccuucuccagcaccuucaacgugccgauggagaagcugaagacccugguggccacggcggaggccgagcucgccaagaacgucucccuggacaacgugcugagcaccuucaucuccgccgcgcgccagggguucguggacagcgacgucgagaccaaggacgugguggagugccucaagcugucccaccagagcgacaucgaggucaccggcgacuccugcaacaacuacaugcugacguacaacaagguggagaacaugacgccccgggaccucggggccugcaucgacugcagcgcccgccacaucaacgcccagguggccaagucccacaacaucgcgcugaucuggaacgucaaggacuucaugagccuguccgagcagcuccggaagcagauccgcagcgccgccaagaagaacaaccugcccuucaagcugaccugcgccaccacccgccagguggugaacgucgugaccaccaagaucgcccucaagggcgggugaggacuaguuauaagacugacuagcccgaugggccucccaacgggcccuccuccccuccuugcaccgagauuaauaaaaaaaaaaaaaaaaaaaaaaaaaaaaaaaaaaaaaaaaaaaaaaaaaaaaaaaaaaaaaaaaugcaucccccccccccccccccccccccccccccccaaaggcucuuuucagagccaccagaauu

SEQ ID NO: 28442 - RNA, 6058 nt, Artificial Sequence
  SARS-CoV-2/Wuhan-Hu-1__NC_045512.2/MN908947.2__non-structural protein 3 (NSP3) mRNA gc (1-1946)(A329T_P823L)
aggagaaagcuuaccauggcccccaccaaggugaccuucggcgacgacaccgucaucgaggugcagggguacaagagcgugaacaucaccuucgagcuggacgagcgcaucgacaagguccucaacgagaagugcuccgccuacaccguggagcugggcaccgaggugaacgaguucgcgugcgucguggccgacgccgugaucaagacgcugcagccggucagcgagcuccugacgccccuggggaucgaccucgacgagugguccauggccaccuacuaccuguucgacgagagcggcgaguucaagcuggccucccacauguacugcagcuucuacccgcccgacgaggacgaggaggagggggacugcgaggaggaggaguucgagcccuccacccaguacgaguacggcacggaggacgacuaccagggcaagccccucgaguucggggcgaccagcgccgcccugcagcccgaggaggagcaggaggaggacuggcuggacgacgacucccagcagaccgugggccagcaggacgggagcgaggacaaccagaccacgaccauccagaccaucguggagguccagccccagcucgagauggagcugaccccgguggugcagacgaucgaggucaacuccuucagcggcuaccugaagcucaccgacaacguguacaucaagaacgccgacaucguggaggaggcgaagaaggucaagcccaccgugguggucaacgccgccaacguguaccugaagcacgggggcggcguggccggggcccugaacaaggcgaccaacaacgccaugcaggucgaguccgacgacuacaucgccacgaacggcccccucaaggucgggggcagcugcgugcuguccggccacaaccuggccaagcacugccuccacgugguggggcccaacgucaacaagggcgaggacauccagcugcucaagagcgccuacgagaacuucaaccagcacgaggugcugcugaccccgcugcucuccgccgggaucuucggcgccgaccccauccacagccugcgggugugcgucgacaccgugcgcaccaacguguaccuggccgucuucgacaagaaccucuacgacaagcugguguccagcuuccuggagaugaaguccgagaagcaggucgagcagaagaucgccgagauccccaaggaggaggugaagcccuucaucaccgagagcaagccgagcguggagcagcggaagcaggacgacaagaagaucaaggcgugcguggaggaggucacgaccacccucgaggagaccaaguuccugacggagaaccugcuccuguacaucgacaucaacgggaaccugcaccccgacuccgccacccucgugagcgacaucgacaucaccuuccugaagaaggacgcccccuacaucgugggcgacgucgugcaggagggcgugcugaccgccgucgugauccccacgaagaaggccgggggcaccaccgagaugcucgcgaaggcccugcgcaaggugccgaccgacaacuacaucacgaccuaccccgggcagggccugaacggguacaccgucgaggaggccaagaccgugcucaagaagugcaaguccgccuucuacauccugcccagcaucaucuccaacgagaagcaggagauccugggcaccgugagcuggaaccugcgggagaugcucgcgcacgccgaggagacgcgcaagcugaugcccgucugcguggagaccaaggccaucguguccaccauccagcggaaguacaagggcaucaagauccaggagggggucguggacuacggcgcccgcuucuacuucuacaccagcaagacgaccguggccucccugaucaacacccucaacgaccugaacgagacccuggucacgaugccgcucggguacgugacccacggccugaaccuggaggaggcggcccgguacaugcgcagccucaaggugcccgccaccgucuccgugagcucccccgacgccgugaccgccuacaacggguaccugacgagcuccagcaagacccccgaggagcacuucaucgagaccaucucccuggcgggcagcuacaaggacuggagcuacuccggccagagcacccagcucgggaucgaguuccugaagcggggcgacaaguccgucuacuacacgagcaacccgaccaccuuccaccuggacggggaggugaucaccuucgacaaccucaagacgcugcugucccuccgcgaggugcggaccaucaaggucuucaccaccguggacaacaucaaccugcacacccagguggucgacaugagcaugaccuacggccagcaguucggccccaccuaccuggacggggccgacgugaccaagaucaagccccacaacucccacgagggcaagacguucuacgugcucccgaacgacgacacccugcgcgucgaggccuucgaguacuaccacaccaccgaccugagcuuccuggggcgguacauguccgcccucaaccacacgaagaaguggaaguacccccaggugaacggccugaccagcaucaagugggccgacaacaacugcuaccuggcgaccgcccuccugacccugcagcagaucgagcucaaguucaacccgcccgcccugcaggacgccuacuaccgcgcgcgggccggggaggccgccaacuucugcgcccugauccucgcguacugcaacaagacggugggcgagcugggcgacguccgcgagaccauguccuaccuguuccagcacgccaaccucgacagcugcaagcgggugcugaacgucgugugcaagaccugcgggcagcagcagaccacccugaagggcguggaggccgucauguacauggggacgcucuccuacgagcaguucaagaagggcgugcagauccccugcacgugcgggaagcaggccaccaaguaccuggugcagcaggagagccccuucgucaugauguccgcgcccccggcccaguacgagcugaagcacggcaccuucacgugcgccagcgaguacaccggcaacuaccagugcgggcacuacaagcacaucaccuccaaggagacccucuacugcaucgacggcgcccugcugaccaagagcagcgaguacaaggggcccaucaccgacguguucuacaaggagaacuccuacaccaccacgaucaagcccgugaccuacaagcucgacggcgucgugugcaccgagaucgaccccaagcuggacaacuacuacaagaaggacaacagcuacuucaccgagcagccgaucgaccuggugcccaaccagcccuaccccaacgccuccuucgacaacuucaaguucgucugcgacaacaucaaguucgccgacgaccucaaccagcugacgggguacaagaagccggcgagccgcgagcugaaggugaccuucuuccccgaccucaacggcgacguggucgccaucgacuacaagcacuacacccccuccuucaagaagggcgccaagcugcugcacaagcccaucguguggcacgugaacaacgccaccaacaaggcgacguacaagccgaacaccuggugcauccggugccucuggagcaccaagcccgucgagaccuccaacagcuucgacgugcugaaguccgaggacgcccaggggauggacaaccuggccugcgaggaccucaagcccgugagcgaggaggucguggagaaccccacgauccagaaggacgugcuggagugcaacgucaagaccaccgagguggugggcgacaucauccugaagccggccaacaacucccucaagaucaccgaggaggucgggcacacggaccugauggccgcguacguggacaacagcucccugaccaucaagaagcccaacgagcucagccgcgugcugggccugaagacccucgccacccacgggcuggccgccgucaacuccgugcccugggacacgaucgccaacuacgcgaagccguuccugaacaagguggucagcaccaccaccaacaucgugacgcgcugccucaaccgggugugcaccaacuacaugcccuacuucuucacccugcugcuccagcugugcaccuucacgcgcuccaccaacagccggaucaaggccuccaugcccaccaccaucgccaagaacaccgucaagagcgugggcaaguucugccuggaggccagcuucaacuaccucaagucccccaacuucagcaagcugaucaacaucaucaucugguuccugcuccuguccgugugccugggcagccucaucuacuccacggccgcgcuggggguccugaugagcaaccucggcaugccguccuacugcaccggguaccgcgagggcuaccugaacagcaccaacgugaccaucgccacguacugcaccggcuccauccccugcagcgugugccuguccgggcucgacagccuggacaccuaccccucccuggagaccauccagaucacgaucagcuccuucaagugggaccucaccgccuucggccuggucgccgagugguuccuggccuacauccucuucacccgguucuucuacgugcuggggcuggcggccaucaugcagcuguucuucagcuacuucgccgugcacuucaucuccaacagcuggcucauguggcugaucaucaaccugguccagauggcccccaucuccgcgauggugcgcauguacaucuucuucgccagcuucuacuacguguggaaguccuacguccacgugguggacggcugcaacagcagcacgugcaugaugugcuacaagcggaaccgcgccacgcgggucgagugcaccaccaucgugaacgggguccgccgguccuucuacguguacgccaacggcggcaagggguucugcaagcuccacaacuggaacugcgugaacugcgacaccuucugcgccggcagcacguucaucuccgacgaggucgcgcgcgaccugagccugcaguucaagcggccgaucaaccccaccgaccaguccagcuacaucguggacuccgugaccgucaagaacgggagcauccaccucuacuucgacaaggccggccagaagaccuacgagcgccacucccugagccacuucgugaaccuggacaaccuccgggccaacaacacgaaggggucccugcccaucaacgugaucgucuucgacggcaagagcaagugcgaggaguccagcgccaaguccgccagcguguacuacucccagcugaugugccagcccauccuccugcuggaccaggcgcucgugagcgacgucggcgacagcgccgagguggccgugaagauguucgacgccuacgucaacaccuucuccagcaccuucaacgugccgauggagaagcugaagacccugguggccacggcggaggccgagcucgccaagaacgucucccuggacaacgugcugagcaccuucaucuccgccgcgcgccagggguucguggacagcgacgucgagaccaaggacgugguggagugccucaagcugucccaccagagcgacaucgaggucaccggcgacuccugcaacaacuacaugcugacguacaacaagguggagaacaugacgccccgggaccucggggccugcaucgacugcagcgcccgccacaucaacgcccagguggccaagucccacaacaucgcgcugaucuggaacgucaaggacuucaugagccuguccgagcagcuccggaagcagauccgcagcgccgccaagaagaacaaccugcccuucaagcugaccugcgccaccacccgccagguggugaacgucgugaccaccaagaucgcccucaagggcgggugaggacuaguuauaagacugacuagcccgaugggccucccaacgggcccuccuccccuccuugcaccgagauuaauaaaaaaaaaaaaaaaaaaaaaaaaaaaaaaaaaaaaaaaaaaaaaaaaaaaaaaaaaaaaaaaaugcaucccccccccccccccccccccccccccccccaaaggcucuuuucagagccaccagaauu

SEQ ID NO: 28443 - RNA, 6058 nt, Artificial Sequence
  SARS-CoV-2/Wuhan-Hu-1__NC_045512.2/MN908947.2__non-structural protein 3 (NSP3) mRNA gc (1-1946)(S371L_K978Q)
aggagaaagcuuaccauggcccccaccaaggugaccuucggcgacgacaccgucaucgaggugcagggguacaagagcgugaacaucaccuucgagcuggacgagcgcaucgacaagguccucaacgagaagugcuccgccuacaccguggagcugggcaccgaggugaacgaguucgcgugcgucguggccgacgccgugaucaagacgcugcagccggucagcgagcuccugacgccccuggggaucgaccucgacgagugguccauggccaccuacuaccuguucgacgagagcggcgaguucaagcuggccucccacauguacugcagcuucuacccgcccgacgaggacgaggaggagggggacugcgaggaggaggaguucgagcccuccacccaguacgaguacggcacggaggacgacuaccagggcaagccccucgaguucggggcgaccagcgccgcccugcagcccgaggaggagcaggaggaggacuggcuggacgacgacucccagcagaccgugggccagcaggacgggagcgaggacaaccagaccacgaccauccagaccaucguggagguccagccccagcucgagauggagcugaccccgguggugcagacgaucgaggucaacuccuucagcggcuaccugaagcucaccgacaacguguacaucaagaacgccgacaucguggaggaggcgaagaaggucaagcccaccgugguggucaacgccgccaacguguaccugaagcacgggggcggcguggccggggcccugaacaaggcgaccaacaacgccaugcaggucgaguccgacgacuacaucgccacgaacggcccccucaaggucgggggcagcugcgugcuguccggccacaaccuggccaagcacugccuccacgugguggggcccaacgucaacaagggcgaggacauccagcugcucaagagcgccuacgagaacuucaaccagcacgaggugcugcuggcgccgcugcucuccgccgggaucuucggcgccgaccccauccacagccugcgggugugcgucgacaccgugcgcaccaacguguaccuggccgucuucgacaagaaccucuacgacaagcuggugcugagcuuccuggagaugaaguccgagaagcaggucgagcagaagaucgccgagauccccaaggaggaggugaagcccuucaucaccgagagcaagccgagcguggagcagcggaagcaggacgacaagaagaucaaggcgugcguggaggaggucacgaccacccucgaggagaccaaguuccugacggagaaccugcuccuguacaucgacaucaacgggaaccugcaccccgacuccgccacccucgugagcgacaucgacaucaccuuccugaagaaggacgcccccuacaucgugggcgacgucgugcaggagggcgugcugaccgccgucgugauccccacgaagaaggccgggggcaccaccgagaugcucgcgaaggcccugcgcaaggugccgaccgacaacuacaucacgaccuaccccgggcagggccugaacggguacaccgucgaggaggccaagaccgugcucaagaagugcaaguccgccuucuacauccugcccagcaucaucuccaacgagaagcaggagauccugggcaccgugagcuggaaccugcgggagaugcucgcgcacgccgaggagacgcgcaagcugaugcccgucugcguggagaccaaggccaucguguccaccauccagcggaaguacaagggcaucaagauccaggagggggucguggacuacggcgcccgcuucuacuucuacaccagcaagacgaccguggccucccugaucaacacccucaacgaccugaacgagacccuggucacgaugccgcucggguacgugacccacggccugaaccuggaggaggcggcccgguacaugcgcagccucaaggugcccgccaccgucuccgugagcucccccgacgccgugaccgccuacaacggguaccugacgagcuccagcaagacccccgaggagcacuucaucgagaccaucucccuggcgggcagcuacaaggacuggagcuacuccggccagagcacccagcucgggaucgaguuccugaagcggggcgacaaguccgucuacuacacgagcaacccgaccaccuuccaccuggacggggaggugaucaccuucgacaaccucaagacgcugcugucccuccgcgaggugcggaccaucaaggucuucaccaccguggacaacaucaaccugcacacccagguggucgacaugagcaugaccuacggccagcaguucggccccaccuaccuggacggggccgacgugaccaagaucaagccccacaacucccacgagggcaagacguucuacgugcucccgaacgacgacacccugcgcgucgaggccuucgaguacuaccacaccaccgaccccagcuuccuggggcgguacauguccgcccucaaccacacgaagaaguggaaguacccccaggugaacggccugaccagcaucaagugggccgacaacaacugcuaccuggcgaccgcccuccugacccugcagcagaucgagcucaaguucaacccgcccgcccugcaggacgccuacuaccgcgcgcgggccggggaggccgccaacuucugcgcccugauccucgcguacugcaacaagacggugggcgagcugggcgacguccgcgagaccauguccuaccuguuccagcacgccaaccucgacagcugcaagcgggugcugaacgucgugugcaagaccugcgggcagcagcagaccacccugaagggcguggaggccgucauguacauggggacgcucuccuacgagcaguucaagaagggcgugcagauccccugcacgugcgggaagcaggccacccaguaccuggugcagcaggagagccccuucgucaugauguccgcgcccccggcccaguacgagcugaagcacggcaccuucacgugcgccagcgaguacaccggcaacuaccagugcgggcacuacaagcacaucaccuccaaggagacccucuacugcaucgacggcgcccugcugaccaagagcagcgaguacaaggggcccaucaccgacguguucuacaaggagaacuccuacaccaccacgaucaagcccgugaccuacaagcucgacggcgucgugugcaccgagaucgaccccaagcuggacaacuacuacaagaaggacaacagcuacuucaccgagcagccgaucgaccuggugcccaaccagcccuaccccaacgccuccuucgacaacuucaaguucgucugcgacaacaucaaguucgccgacgaccucaaccagcugacgggguacaagaagccggcgagccgcgagcugaaggugaccuucuuccccgaccucaacggcgacguggucgccaucgacuacaagcacuacacccccuccuucaagaagggcgccaagcugcugcacaagcccaucguguggcacgugaacaacgccaccaacaaggcgacguacaagccgaacaccuggugcauccggugccucuggagcaccaagcccgucgagaccuccaacagcuucgacgugcugaaguccgaggacgcccaggggauggacaaccuggccugcgaggaccucaagcccgugagcgaggaggucguggagaaccccacgauccagaaggacgugcuggagugcaacgucaagaccaccgagguggugggcgacaucauccugaagccggccaacaacucccucaagaucaccgaggaggucgggcacacggaccugauggccgcguacguggacaacagcucccugaccaucaagaagcccaacgagcucagccgcgugcugggccugaagacccucgccacccacgggcuggccgccgucaacuccgugcccugggacacgaucgccaacuacgcgaagccguuccugaacaagguggucagcaccaccaccaacaucgugacgcgcugccucaaccgggugugcaccaacuacaugcccuacuucuucacccugcugcuccagcugugcaccuucacgcgcuccaccaacagccggaucaaggccuccaugcccaccaccaucgccaagaacaccgucaagagcgugggcaaguucugccuggaggccagcuucaacuaccucaagucccccaacuucagcaagcugaucaacaucaucaucugguuccugcuccuguccgugugccugggcagccucaucuacuccacggccgcgcuggggguccugaugagcaaccucggcaugccguccuacugcaccggguaccgcgagggcuaccugaacagcaccaacgugaccaucgccacguacugcaccggcuccauccccugcagcgugugccuguccgggcucgacagccuggacaccuaccccucccuggagaccauccagaucacgaucagcuccuucaagugggaccucaccgccuucggccuggucgccgagugguuccuggccuacauccucuucacccgguucuucuacgugcuggggcuggcggccaucaugcagcuguucuucagcuacuucgccgugcacuucaucuccaacagcuggcucauguggcugaucaucaaccugguccagauggcccccaucuccgcgauggugcgcauguacaucuucuucgccagcuucuacuacguguggaaguccuacguccacgugguggacggcugcaacagcagcacgugcaugaugugcuacaagcggaaccgcgccacgcgggucgagugcaccaccaucgugaacgggguccgccgguccuucuacguguacgccaacggcggcaagggguucugcaagcuccacaacuggaacugcgugaacugcgacaccuucugcgccggcagcacguucaucuccgacgaggucgcgcgcgaccugagccugcaguucaagcggccgaucaaccccaccgaccaguccagcuacaucguggacuccgugaccgucaagaacgggagcauccaccucuacuucgacaaggccggccagaagaccuacgagcgccacucccugagccacuucgugaaccuggacaaccuccgggccaacaacacgaaggggucccugcccaucaacgugaucgucuucgacggcaagagcaagugcgaggaguccagcgccaaguccgccagcguguacuacucccagcugaugugccagcccauccuccugcuggaccaggcgcucgugagcgacgucggcgacagcgccgagguggccgugaagauguucgacgccuacgucaacaccuucuccagcaccuucaacgugccgauggagaagcugaagacccugguggccacggcggaggccgagcucgccaagaacgucucccuggacaacgugcugagcaccuucaucuccgccgcgcgccagggguucguggacagcgacgucgagaccaaggacgugguggagugccucaagcugucccaccagagcgacaucgaggucaccggcgacuccugcaacaacuacaugcugacguacaacaagguggagaacaugacgccccgggaccucggggccugcaucgacugcagcgcccgccacaucaacgcccagguggccaagucccacaacaucgcgcugaucuggaacgucaaggacuucaugagccuguccgagcagcuccggaagcagauccgcagcgccgccaagaagaacaaccugcccuucaagcugaccugcgccaccacccgccagguggugaacgucgugaccaccaagaucgcccucaagggcgggugaggacuaguuauaagacugacuagcccgaugggccucccaacgggcccuccuccccuccuugcaccgagauuaauaaaaaaaaaaaaaaaaaaaaaaaaaaaaaaaaaaaaaaaaaaaaaaaaaaaaaaaaaaaaaaaaugcaucccccccccccccccccccccccccccccccaaaggcucuuuucagagccaccagaauu

SEQ ID NO: 28444 - RNA, 6058 nt, Artificial Sequence
  SARS-CoV-2/Wuhan-Hu-1__NC_045512.2/MN908947.2__non-structural protein 3 (NSP3) mRNA gc (1-1946)(A489S_P1229L_P1470S)
aggagaaagcuuaccauggcccccaccaaggugaccuucggcgacgacaccgucaucgaggugcagggguacaagagcgugaacaucaccuucgagcuggacgagcgcaucgacaagguccucaacgagaagugcuccgccuacaccguggagcugggcaccgaggugaacgaguucgcgugcgucguggccgacgccgugaucaagacgcugcagccggucagcgagcuccugacgccccuggggaucgaccucgacgagugguccauggccaccuacuaccuguucgacgagagcggcgaguucaagcuggccucccacauguacugcagcuucuacccgcccgacgaggacgaggaggagggggacugcgaggaggaggaguucgagcccuccacccaguacgaguacggcacggaggacgacuaccagggcaagccccucgaguucggggcgaccagcgccgcccugcagcccgaggaggagcaggaggaggacuggcuggacgacgacucccagcagaccgugggccagcaggacgggagcgaggacaaccagaccacgaccauccagaccaucguggagguccagccccagcucgagauggagcugaccccgguggugcagacgaucgaggucaacuccuucagcggcuaccugaagcucaccgacaacguguacaucaagaacgccgacaucguggaggaggcgaagaaggucaagcccaccgugguggucaacgccgccaacguguaccugaagcacgggggcggcguggccggggcccugaacaaggcgaccaacaacgccaugcaggucgaguccgacgacuacaucgccacgaacggcccccucaaggucgggggcagcugcgugcuguccggccacaaccuggccaagcacugccuccacgugguggggcccaacgucaacaagggcgaggacauccagcugcucaagagcgccuacgagaacuucaaccagcacgaggugcugcuggcgccgcugcucuccgccgggaucuucggcgccgaccccauccacagccugcgggugugcgucgacaccgugcgcaccaacguguaccuggccgucuucgacaagaaccucuacgacaagcugguguccagcuuccuggagaugaaguccgagaagcaggucgagcagaagaucgccgagauccccaaggaggaggugaagcccuucaucaccgagagcaagccgagcguggagcagcggaagcaggacgacaagaagaucaaggcgugcguggaggaggucacgaccacccucgaggagaccaaguuccugacggagaaccugcuccuguacaucgacaucaacgggaaccugcaccccgacuccgccacccucgugagcgacaucgacaucaccuuccugaagaaggacgcccccuacaucgugggcgacgucgugcaggagggcgugcugaccgccgucgugauccccacgaagaagagcgggggcaccaccgagaugcucgcgaaggcccugcgcaaggugccgaccgacaacuacaucacgaccuaccccgggcagggccugaacggguacaccgucgaggaggccaagaccgugcucaagaagugcaaguccgccuucuacauccugcccagcaucaucuccaacgagaagcaggagauccugggcaccgugagcuggaaccugcgggagaugcucgcgcacgccgaggagacgcgcaagcugaugcccgucugcguggagaccaaggccaucguguccaccauccagcggaaguacaagggcaucaagauccaggagggggucguggacuacggcgcccgcuucuacuucuacaccagcaagacgaccguggccucccugaucaacacccucaacgaccugaacgagacccuggucacgaugccgcucggguacgugacccacggccugaaccuggaggaggcggcccgguacaugcgcagccucaaggugcccgccaccgucuccgugagcucccccgacgccgugaccgccuacaacggguaccugacgagcuccagcaagacccccgaggagcacuucaucgagaccaucucccuggcgggcagcuacaaggacuggagcuacuccggccagagcacccagcucgggaucgaguuccugaagcggggcgacaaguccgucuacuacacgagcaacccgaccaccuuccaccuggacggggaggugaucaccuucgacaaccucaagacgcugcugucccuccgcgaggugcggaccaucaaggucuucaccaccguggacaacaucaaccugcacacccagguggucgacaugagcaugaccuacggccagcaguucggccccaccuaccuggacggggccgacgugaccaagaucaagccccacaacucccacgagggcaagacguucuacgugcucccgaacgacgacacccugcgcgucgaggccuucgaguacuaccacaccaccgaccccagcuuccuggggcgguacauguccgcccucaaccacacgaagaaguggaaguacccccaggugaacggccugaccagcaucaagugggccgacaacaacugcuaccuggcgaccgcccuccugacccugcagcagaucgagcucaaguucaacccgcccgcccugcaggacgccuacuaccgcgcgcgggccggggaggccgccaacuucugcgcccugauccucgcguacugcaacaagacggugggcgagcugggcgacguccgcgagaccauguccuaccuguuccagcacgccaaccucgacagcugcaagcgggugcugaacgucgugugcaagaccugcgggcagcagcagaccacccugaagggcguggaggccgucauguacauggggacgcucuccuacgagcaguucaagaagggcgugcagauccccugcacgugcgggaagcaggccaccaaguaccuggugcagcaggagagccccuucgucaugauguccgcgcccccggcccaguacgagcugaagcacggcaccuucacgugcgccagcgaguacaccggcaacuaccagugcgggcacuacaagcacaucaccuccaaggagacccucuacugcaucgacggcgcccugcugaccaagagcagcgaguacaaggggcccaucaccgacguguucuacaaggagaacuccuacaccaccacgaucaagcccgugaccuacaagcucgacggcgucgugugcaccgagaucgaccccaagcuggacaacuacuacaagaaggacaacagcuacuucaccgagcagccgaucgaccuggugcccaaccagcccuaccccaacgccuccuucgacaacuucaaguucgucugcgacaacaucaaguucgccgacgaccucaaccagcugacgggguacaagaagccggcgagccgcgagcugaaggugaccuucuuccccgaccucaacggcgacguggucgccaucgacuacaagcacuacacccccuccuucaagaagggcgccaagcugcugcacaagcccaucguguggcacgugaacaacgccaccaacaaggcgacguacaagccgaacaccuggugcauccggugccucuggagcaccaagcccgucgagaccuccaacagcuucgacgugcugaaguccgaggacgcccaggggauggacaaccuggccugcgaggaccucaagcuggugagcgaggaggucguggagaaccccacgauccagaaggacgugcuggagugcaacgucaagaccaccgagguggugggcgacaucauccugaagccggccaacaacucccucaagaucaccgaggaggucgggcacacggaccugauggccgcguacguggacaacagcucccugaccaucaagaagcccaacgagcucagccgcgugcugggccugaagacccucgccacccacgggcuggccgccgucaacuccgugcccugggacacgaucgccaacuacgcgaagccguuccugaacaagguggucagcaccaccaccaacaucgugacgcgcugccucaaccgggugugcaccaacuacaugcccuacuucuucacccugcugcuccagcugugcaccuucacgcgcuccaccaacagccggaucaaggccuccaugcccaccaccaucgccaagaacaccgucaagagcgugggcaaguucugccuggaggccagcuucaacuaccucaagucccccaacuucagcaagcugaucaacaucaucaucugguuccugcuccuguccgugugccugggcagccucaucuacuccacggccgcgcuggggguccugaugagcaaccucggcaugccguccuacugcaccggguaccgcgagggcuaccugaacagcaccaacgugaccaucgccacguacugcaccggcuccaucagcugcagcgugugccuguccgggcucgacagccuggacaccuaccccucccuggagaccauccagaucacgaucagcuccuucaagugggaccucaccgccuucggccuggucgccgagugguuccuggccuacauccucuucacccgguucuucuacgugcuggggcuggcggccaucaugcagcuguucuucagcuacuucgccgugcacuucaucuccaacagcuggcucauguggcugaucaucaaccugguccagauggcccccaucuccgcgauggugcgcauguacaucuucuucgccagcuucuacuacguguggaaguccuacguccacgugguggacggcugcaacagcagcacgugcaugaugugcuacaagcggaaccgcgccacgcgggucgagugcaccaccaucgugaacgggguccgccgguccuucuacguguacgccaacggcggcaagggguucugcaagcuccacaacuggaacugcgugaacugcgacaccuucugcgccggcagcacguucaucuccgacgaggucgcgcgcgaccugagccugcaguucaagcggccgaucaaccccaccgaccaguccagcuacaucguggacuccgugaccgucaagaacgggagcauccaccucuacuucgacaaggccggccagaagaccuacgagcgccacucccugagccacuucgugaaccuggacaaccuccgggccaacaacacgaaggggucccugcccaucaacgugaucgucuucgacggcaagagcaagugcgaggaguccagcgccaaguccgccagcguguacuacucccagcugaugugccagcccauccuccugcuggaccaggcgcucgugagcgacgucggcgacagcgccgagguggccgugaagauguucgacgccuacgucaacaccuucuccagcaccuucaacgugccgauggagaagcugaagacccugguggccacggcggaggccgagcucgccaagaacgucucccuggacaacgugcugagcaccuucaucuccgccgcgcgccagggguucguggacagcgacgucgagaccaaggacgugguggagugccucaagcugucccaccagagcgacaucgaggucaccggcgacuccugcaacaacuacaugcugacguacaacaagguggagaacaugacgccccgggaccucggggccugcaucgacugcagcgcccgccacaucaacgcccagguggccaagucccacaacaucgcgcugaucuggaacgucaaggacuucaugagccuguccgagcagcuccggaagcagauccgcagcgccgccaagaagaacaaccugcccuucaagcugaccugcgccaccacccgccagguggugaacgucgugaccaccaagaucgcccucaagggcgggugaggacuaguuauaagacugacuagcccgaugggccucccaacgggcccuccuccccuccuugcaccgagauuaauaaaaaaaaaaaaaaaaaaaaaaaaaaaaaaaaaaaaaaaaaaaaaaaaaaaaaaaaaaaaaaaaugcaucccccccccccccccccccccccccccccccaaaggcucuuuucagagccaccagaauu

SEQ ID NO: 28445 - RNA, 6058 nt, Artificial Sequence
  SARS-CoV-2/Wuhan-Hu-1__NC_045512.2/MN908947.2__non-structural protein 3 (NSP3) mRNA gc (1-1946)(K838N)
aggagaaagcuuaccauggcccccaccaaggugaccuucggcgacgacaccgucaucgaggugcagggguacaagagcgugaacaucaccuucgagcuggacgagcgcaucgacaagguccucaacgagaagugcuccgccuacaccguggagcugggcaccgaggugaacgaguucgcgugcgucguggccgacgccgugaucaagacgcugcagccggucagcgagcuccugacgccccuggggaucgaccucgacgagugguccauggccaccuacuaccuguucgacgagagcggcgaguucaagcuggccucccacauguacugcagcuucuacccgcccgacgaggacgaggaggagggggacugcgaggaggaggaguucgagcccuccacccaguacgaguacggcacggaggacgacuaccagggcaagccccucgaguucggggcgaccagcgccgcccugcagcccgaggaggagcaggaggaggacuggcuggacgacgacucccagcagaccgugggccagcaggacgggagcgaggacaaccagaccacgaccauccagaccaucguggagguccagccccagcucgagauggagcugaccccgguggugcagacgaucgaggucaacuccuucagcggcuaccugaagcucaccgacaacguguacaucaagaacgccgacaucguggaggaggcgaagaaggucaagcccaccgugguggucaacgccgccaacguguaccugaagcacgggggcggcguggccggggcccugaacaaggcgaccaacaacgccaugcaggucgaguccgacgacuacaucgccacgaacggcccccucaaggucgggggcagcugcgugcuguccggccacaaccuggccaagcacugccuccacgugguggggcccaacgucaacaagggcgaggacauccagcugcucaagagcgccuacgagaacuucaaccagcacgaggugcugcuggcgccgcugcucuccgccgggaucuucggcgccgaccccauccacagccugcgggugugcgucgacaccgugcgcaccaacguguaccuggccgucuucgacaagaaccucuacgacaagcugguguccagcuuccuggagaugaaguccgagaagcaggucgagcagaagaucgccgagauccccaaggaggaggugaagcccuucaucaccgagagcaagccgagcguggagcagcggaagcaggacgacaagaagaucaaggcgugcguggaggaggucacgaccacccucgaggagaccaaguuccugacggagaaccugcuccuguacaucgacaucaacgggaaccugcaccccgacuccgccacccucgugagcgacaucgacaucaccuuccugaagaaggacgcccccuacaucgugggcgacgucgugcaggagggcgugcugaccgccgucgugauccccacgaagaaggccgggggcaccaccgagaugcucgcgaaggcccugcgcaaggugccgaccgacaacuacaucacgaccuaccccgggcagggccugaacggguacaccgucgaggaggccaagaccgugcucaagaagugcaaguccgccuucuacauccugcccagcaucaucuccaacgagaagcaggagauccugggcaccgugagcuggaaccugcgggagaugcucgcgcacgccgaggagacgcgcaagcugaugcccgucugcguggagaccaaggccaucguguccaccauccagcggaaguacaagggcaucaagauccaggagggggucguggacuacggcgcccgcuucuacuucuacaccagcaagacgaccguggccucccugaucaacacccucaacgaccugaacgagacccuggucacgaugccgcucggguacgugacccacggccugaaccuggaggaggcggcccgguacaugcgcagccucaaggugcccgccaccgucuccgugagcucccccgacgccgugaccgccuacaacggguaccugacgagcuccagcaagacccccgaggagcacuucaucgagaccaucucccuggcgggcagcuacaaggacuggagcuacuccggccagagcacccagcucgggaucgaguuccugaagcggggcgacaaguccgucuacuacacgagcaacccgaccaccuuccaccuggacggggaggugaucaccuucgacaaccucaagacgcugcugucccuccgcgaggugcggaccaucaaggucuucaccaccguggacaacaucaaccugcacacccagguggucgacaugagcaugaccuacggccagcaguucggccccaccuaccuggacggggccgacgugaccaagaucaagccccacaacucccacgagggcaagacguucuacgugcucccgaacgacgacacccugcgcgucgaggccuucgaguacuaccacaccaccgaccccagcuuccuggggcgguacauguccgcccucaaccacacgaagaacuggaaguacccccaggugaacggccugaccagcaucaagugggccgacaacaacugcuaccuggcgaccgcccuccugacccugcagcagaucgagcucaaguucaacccgcccgcccugcaggacgccuacuaccgcgcgcgggccggggaggccgccaacuucugcgcccugauccucgcguacugcaacaagacggugggcgagcugggcgacguccgcgagaccauguccuaccuguuccagcacgccaaccucgacagcugcaagcgggugcugaacgucgugugcaagaccugcgggcagcagcagaccacccugaagggcguggaggccgucauguacauggggacgcucuccuacgagcaguucaagaagggcgugcagauccccugcacgugcgggaagcaggccaccaaguaccuggugcagcaggagagccccuucgucaugauguccgcgcccccggcccaguacgagcugaagcacggcaccuucacgugcgccagcgaguacaccggcaacuaccagugcgggcacuacaagcacaucaccuccaaggagacccucuacugcaucgacggcgcccugcugaccaagagcagcgaguacaaggggcccaucaccgacguguucuacaaggagaacuccuacaccaccacgaucaagcccgugaccuacaagcucgacggcgucgugugcaccgagaucgaccccaagcuggacaacuacuacaagaaggacaacagcuacuucaccgagcagccgaucgaccuggugcccaaccagcccuaccccaacgccuccuucgacaacuucaaguucgucugcgacaacaucaaguucgccgacgaccucaaccagcugacgggguacaagaagccggcgagccgcgagcugaaggugaccuucuuccccgaccucaacggcgacguggucgccaucgacuacaagcacuacacccccuccuucaagaagggcgccaagcugcugcacaagcccaucguguggcacgugaacaacgccaccaacaaggcgacguacaagccgaacaccuggugcauccggugccucuggagcaccaagcccgucgagaccuccaacagcuucgacgugcugaaguccgaggacgcccaggggauggacaaccuggccugcgaggaccucaagcccgugagcgaggaggucguggagaaccccacgauccagaaggacgugcuggagugcaacgucaagaccaccgagguggugggcgacaucauccugaagccggccaacaacucccucaagaucaccgaggaggucgggcacacggaccugauggccgcguacguggacaacagcucccugaccaucaagaagcccaacgagcucagccgcgugcugggccugaagacccucgccacccacgggcuggccgccgucaacuccgugcccugggacacgaucgccaacuacgcgaagccguuccugaacaagguggucagcaccaccaccaacaucgugacgcgcugccucaaccgggugugcaccaacuacaugcccuacuucuucacccugcugcuccagcugugcaccuucacgcgcuccaccaacagccggaucaaggccuccaugcccaccaccaucgccaagaacaccgucaagagcgugggcaaguucugccuggaggccagcuucaacuaccucaagucccccaacuucagcaagcugaucaacaucaucaucugguuccugcuccuguccgugugccugggcagccucaucuacuccacggccgcgcuggggguccugaugagcaaccucggcaugccguccuacugcaccggguaccgcgagggcuaccugaacagcaccaacgugaccaucgccacguacugcaccggcuccauccccugcagcgugugccuguccgggcucgacagccuggacaccuaccccucccuggagaccauccagaucacgaucagcuccuucaagugggaccucaccgccuucggccuggucgccgagugguuccuggccuacauccucuucacccgguucuucuacgugcuggggcuggcggccaucaugcagcuguucuucagcuacuucgccgugcacuucaucuccaacagcuggcucauguggcugaucaucaaccugguccagauggcccccaucuccgcgauggugcgcauguacaucuucuucgccagcuucuacuacguguggaaguccuacguccacgugguggacggcugcaacagcagcacgugcaugaugugcuacaagcggaaccgcgccacgcgggucgagugcaccaccaucgugaacgggguccgccgguccuucuacguguacgccaacggcggcaagggguucugcaagcuccacaacuggaacugcgugaacugcgacaccuucugcgccggcagcacguucaucuccgacgaggucgcgcgcgaccugagccugcaguucaagcggccgaucaaccccaccgaccaguccagcuacaucguggacuccgugaccgucaagaacgggagcauccaccucuacuucgacaaggccggccagaagaccuacgagcgccacucccugagccacuucgugaaccuggacaaccuccgggccaacaacacgaaggggucccugcccaucaacgugaucgucuucgacggcaagagcaagugcgaggaguccagcgccaaguccgccagcguguacuacucccagcugaugugccagcccauccuccugcuggaccaggcgcucgugagcgacgucggcgacagcgccgagguggccgugaagauguucgacgccuacgucaacaccuucuccagcaccuucaacgugccgauggagaagcugaagacccugguggccacggcggaggccgagcucgccaagaacgucucccuggacaacgugcugagcaccuucaucuccgccgcgcgccagggguucguggacagcgacgucgagaccaaggacgugguggagugccucaagcugucccaccagagcgacaucgaggucaccggcgacuccugcaacaacuacaugcugacguacaacaagguggagaacaugacgccccgggaccucggggccugcaucgacugcagcgcccgccacaucaacgcccagguggccaagucccacaacaucgcgcugaucuggaacgucaaggacuucaugagccuguccgagcagcuccggaagcagauccgcagcgccgccaagaagaacaaccugcccuucaagcugaccugcgccaccacccgccagguggugaacgucgugaccaccaagaucgcccucaagggcgggugaggacuaguuauaagacugacuagcccgaugggccucccaacgggcccuccuccccuccuugcaccgagauuaauaaaaaaaaaaaaaaaaaaaaaaaaaaaaaaaaaaaaaaaaaaaaaaaaaaaaaaaaaaaaaaaaugcaucccccccccccccccccccccccccccccccaaaggcucuuuucagagccaccagaauu

SEQ ID NO: 28446 - RNA, 6058 nt, Artificial Sequence
  SARS-CoV-2/Wuhan-Hu-1__NC_045512.2/MN908947.2__non-structural protein 3 (NSP3) mRNA gc (1-1946)(K838N_P1229L_N1779S)
aggagaaagcuuaccauggcccccaccaaggugaccuucggcgacgacaccgucaucgaggugcagggguacaagagcgugaacaucaccuucgagcuggacgagcgcaucgacaagguccucaacgagaagugcuccgccuacaccguggagcugggcaccgaggugaacgaguucgcgugcgucguggccgacgccgugaucaagacgcugcagccggucagcgagcuccugacgccccuggggaucgaccucgacgagugguccauggccaccuacuaccuguucgacgagagcggcgaguucaagcuggccucccacauguacugcagcuucuacccgcccgacgaggacgaggaggagggggacugcgaggaggaggaguucgagcccuccacccaguacgaguacggcacggaggacgacuaccagggcaagccccucgaguucggggcgaccagcgccgcccugcagcccgaggaggagcaggaggaggacuggcuggacgacgacucccagcagaccgugggccagcaggacgggagcgaggacaaccagaccacgaccauccagaccaucguggagguccagccccagcucgagauggagcugaccccgguggugcagacgaucgaggucaacuccuucagcggcuaccugaagcucaccgacaacguguacaucaagaacgccgacaucguggaggaggcgaagaaggucaagcccaccgugguggucaacgccgccaacguguaccugaagcacgggggcggcguggccggggcccugaacaaggcgaccaacaacgccaugcaggucgaguccgacgacuacaucgccacgaacggcccccucaaggucgggggcagcugcgugcuguccggccacaaccuggccaagcacugccuccacgugguggggcccaacgucaacaagggcgaggacauccagcugcucaagagcgccuacgagaacuucaaccagcacgaggugcugcuggcgccgcugcucuccgccgggaucuucggcgccgaccccauccacagccugcgggugugcgucgacaccgugcgcaccaacguguaccuggccgucuucgacaagaaccucuacgacaagcugguguccagcuuccuggagaugaaguccgagaagcaggucgagcagaagaucgccgagauccccaaggaggaggugaagcccuucaucaccgagagcaagccgagcguggagcagcggaagcaggacgacaagaagaucaaggcgugcguggaggaggucacgaccacccucgaggagaccaaguuccugacggagaaccugcuccuguacaucgacaucaacgggaaccugcaccccgacuccgccacccucgugagcgacaucgacaucaccuuccugaagaaggacgcccccuacaucgugggcgacgucgugcaggagggcgugcugaccgccgucgugauccccacgaagaaggccgggggcaccaccgagaugcucgcgaaggcccugcgcaaggugccgaccgacaacuacaucacgaccuaccccgggcagggccugaacggguacaccgucgaggaggccaagaccgugcucaagaagugcaaguccgccuucuacauccugcccagcaucaucuccaacgagaagcaggagauccugggcaccgugagcuggaaccugcgggagaugcucgcgcacgccgaggagacgcgcaagcugaugcccgucugcguggagaccaaggccaucguguccaccauccagcggaaguacaagggcaucaagauccaggagggggucguggacuacggcgcccgcuucuacuucuacaccagcaagacgaccguggccucccugaucaacacccucaacgaccugaacgagacccuggucacgaugccgcucggguacgugacccacggccugaaccuggaggaggcggcccgguacaugcgcagccucaaggugcccgccaccgucuccgugagcucccccgacgccgugaccgccuacaacggguaccugacgagcuccagcaagacccccgaggagcacuucaucgagaccaucucccuggcgggcagcuacaaggacuggagcuacuccggccagagcacccagcucgggaucgaguuccugaagcggggcgacaaguccgucuacuacacgagcaacccgaccaccuuccaccuggacggggaggugaucaccuucgacaaccucaagacgcugcugucccuccgcgaggugcggaccaucaaggucuucaccaccguggacaacaucaaccugcacacccagguggucgacaugagcaugaccuacggccagcaguucggccccaccuaccuggacggggccgacgugaccaagaucaagccccacaacucccacgagggcaagacguucuacgugcucccgaacgacgacacccugcgcgucgaggccuucgaguacuaccacaccaccgaccccagcuuccuggggcgguacauguccgcccucaaccacacgaagaacuggaaguacccccaggugaacggccugaccagcaucaagugggccgacaacaacugcuaccuggcgaccgcccuccugacccugcagcagaucgagcucaaguucaacccgcccgcccugcaggacgccuacuaccgcgcgcgggccggggaggccgccaacuucugcgcccugauccucgcguacugcaacaagacggugggcgagcugggcgacguccgcgagaccauguccuaccuguuccagcacgccaaccucgacagcugcaagcgggugcugaacgucgugugcaagaccugcgggcagcagcagaccacccugaagggcguggaggccgucauguacauggggacgcucuccuacgagcaguucaagaagggcgugcagauccccugcacgugcgggaagcaggccaccaaguaccuggugcagcaggagagccccuucgucaugauguccgcgcccccggcccaguacgagcugaagcacggcaccuucacgugcgccagcgaguacaccggcaacuaccagugcgggcacuacaagcacaucaccuccaaggagacccucuacugcaucgacggcgcccugcugaccaagagcagcgaguacaaggggcccaucaccgacguguucuacaaggagaacuccuacaccaccacgaucaagcccgugaccuacaagcucgacggcgucgugugcaccgagaucgaccccaagcuggacaacuacuacaagaaggacaacagcuacuucaccgagcagccgaucgaccuggugcccaaccagcccuaccccaacgccuccuucgacaacuucaaguucgucugcgacaacaucaaguucgccgacgaccucaaccagcugacgggguacaagaagccggcgagccgcgagcugaaggugaccuucuuccccgaccucaacggcgacguggucgccaucgacuacaagcacuacacccccuccuucaagaagggcgccaagcugcugcacaagcccaucguguggcacgugaacaacgccaccaacaaggcgacguacaagccgaacaccuggugcauccggugccucuggagcaccaagcccgucgagaccuccaacagcuucgacgugcugaaguccgaggacgcccaggggauggacaaccuggccugcgaggaccucaagcuggugagcgaggaggucguggagaaccccacgauccagaaggacgugcuggagugcaacgucaagaccaccgagguggugggcgacaucauccugaagccggccaacaacucccucaagaucaccgaggaggucgggcacacggaccugauggccgcguacguggacaacagcucccugaccaucaagaagcccaacgagcucagccgcgugcugggccugaagacccucgccacccacgggcuggccgccgucaacuccgugcccugggacacgaucgccaacuacgcgaagccguuccugaacaagguggucagcaccaccaccaacaucgugacgcgcugccucaaccgggugugcaccaacuacaugcccuacuucuucacccugcugcuccagcugugcaccuucacgcgcuccaccaacagccggaucaaggccuccaugcccaccaccaucgccaagaacaccgucaagagcgugggcaaguucugccuggaggccagcuucaacuaccucaagucccccaacuucagcaagcugaucaacaucaucaucugguuccugcuccuguccgugugccugggcagccucaucuacuccacggccgcgcuggggguccugaugagcaaccucggcaugccguccuacugcaccggguaccgcgagggcuaccugaacagcaccaacgugaccaucgccacguacugcaccggcuccauccccugcagcgugugccuguccgggcucgacagccuggacaccuaccccucccuggagaccauccagaucacgaucagcuccuucaagugggaccucaccgccuucggccuggucgccgagugguuccuggccuacauccucuucacccgguucuucuacgugcuggggcuggcggccaucaugcagcuguucuucagcuacuucgccgugcacuucaucuccaacagcuggcucauguggcugaucaucaaccugguccagauggcccccaucuccgcgauggugcgcauguacaucuucuucgccagcuucuacuacguguggaaguccuacguccacgugguggacggcugcaacagcagcacgugcaugaugugcuacaagcggaaccgcgccacgcgggucgagugcaccaccaucgugaacgggguccgccgguccuucuacguguacgccaacggcggcaagggguucugcaagcuccacaacuggaacugcgugaacugcgacaccuucugcgccggcagcacguucaucuccgacgaggucgcgcgcgaccugagccugcaguucaagcggccgaucaaccccaccgaccaguccagcuacaucguggacuccgugaccgucaagaacgggagcauccaccucuacuucgacaaggccggccagaagaccuacgagcgccacucccugagccacuucgugaaccuggacaaccuccgggccaacaacacgaaggggucccugcccaucaacgugaucgucuucgacggcaagagcaagugcgaggaguccagcgccaaguccgccagcguguacuacucccagcugaugugccagcccauccuccugcuggaccaggcgcucgugagcgacgucggcgacagcgccgagguggccgugaagauguucgacgccuacgucagcaccuucuccagcaccuucaacgugccgauggagaagcugaagacccugguggccacggcggaggccgagcucgccaagaacgucucccuggacaacgugcugagcaccuucaucuccgccgcgcgccagggguucguggacagcgacgucgagaccaaggacgugguggagugccucaagcugucccaccagagcgacaucgaggucaccggcgacuccugcaacaacuacaugcugacguacaacaagguggagaacaugacgccccgggaccucggggccugcaucgacugcagcgcccgccacaucaacgcccagguggccaagucccacaacaucgcgcugaucuggaacgucaaggacuucaugagccuguccgagcagcuccggaagcagauccgcagcgccgccaagaagaacaaccugcccuucaagcugaccugcgccaccacccgccagguggugaacgucgugaccaccaagaucgcccucaagggcgggugaggacuaguuauaagacugacuagcccgaugggccucccaacgggcccuccuccccuccuugcaccgagauuaauaaaaaaaaaaaaaaaaaaaaaaaaaaaaaaaaaaaaaaaaaaaaaaaaaaaaaaaaaaaaaaaaugcaucccccccccccccccccccccccccccccccaaaggcucuuuucagagccaccagaauu

SEQ ID NO: 28447 - RNA, 6058 nt, Artificial Sequence
  SARS-CoV-2/Wuhan-Hu-1__NC_045512.2/MN908947.2__non-structural protein 3 (NSP3) mRNA gc (1-1946)(K838N_N1779S)
aggagaaagcuuaccauggcccccaccaaggugaccuucggcgacgacaccgucaucgaggugcagggguacaagagcgugaacaucaccuucgagcuggacgagcgcaucgacaagguccucaacgagaagugcuccgccuacaccguggagcugggcaccgaggugaacgaguucgcgugcgucguggccgacgccgugaucaagacgcugcagccggucagcgagcuccugacgccccuggggaucgaccucgacgagugguccauggccaccuacuaccuguucgacgagagcggcgaguucaagcuggccucccacauguacugcagcuucuacccgcccgacgaggacgaggaggagggggacugcgaggaggaggaguucgagcccuccacccaguacgaguacggcacggaggacgacuaccagggcaagccccucgaguucggggcgaccagcgccgcccugcagcccgaggaggagcaggaggaggacuggcuggacgacgacucccagcagaccgugggccagcaggacgggagcgaggacaaccagaccacgaccauccagaccaucguggagguccagccccagcucgagauggagcugaccccgguggugcagacgaucgaggucaacuccuucagcggcuaccugaagcucaccgacaacguguacaucaagaacgccgacaucguggaggaggcgaagaaggucaagcccaccgugguggucaacgccgccaacguguaccugaagcacgggggcggcguggccggggcccugaacaaggcgaccaacaacgccaugcaggucgaguccgacgacuacaucgccacgaacggcccccucaaggucgggggcagcugcgugcuguccggccacaaccuggccaagcacugccuccacgugguggggcccaacgucaacaagggcgaggacauccagcugcucaagagcgccuacgagaacuucaaccagcacgaggugcugcuggcgccgcugcucuccgccgggaucuucggcgccgaccccauccacagccugcgggugugcgucgacaccgugcgcaccaacguguaccuggccgucuucgacaagaaccucuacgacaagcugguguccagcuuccuggagaugaaguccgagaagcaggucgagcagaagaucgccgagauccccaaggaggaggugaagcccuucaucaccgagagcaagccgagcguggagcagcggaagcaggacgacaagaagaucaaggcgugcguggaggaggucacgaccacccucgaggagaccaaguuccugacggagaaccugcuccuguacaucgacaucaacgggaaccugcaccccgacuccgccacccucgugagcgacaucgacaucaccuuccugaagaaggacgcccccuacaucgugggcgacgucgugcaggagggcgugcugaccgccgucgugauccccacgaagaaggccgggggcaccaccgagaugcucgcgaaggcccugcgcaaggugccgaccgacaacuacaucacgaccuaccccgggcagggccugaacggguacaccgucgaggaggccaagaccgugcucaagaagugcaaguccgccuucuacauccugcccagcaucaucuccaacgagaagcaggagauccugggcaccgugagcuggaaccugcgggagaugcucgcgcacgccgaggagacgcgcaagcugaugcccgucugcguggagaccaaggccaucguguccaccauccagcggaaguacaagggcaucaagauccaggagggggucguggacuacggcgcccgcuucuacuucuacaccagcaagacgaccguggccucccugaucaacacccucaacgaccugaacgagacccuggucacgaugccgcucggguacgugacccacggccugaaccuggaggaggcggcccgguacaugcgcagccucaaggugcccgccaccgucuccgugagcucccccgacgccgugaccgccuacaacggguaccugacgagcuccagcaagacccccgaggagcacuucaucgagaccaucucccuggcgggcagcuacaaggacuggagcuacuccggccagagcacccagcucgggaucgaguuccugaagcggggcgacaaguccgucuacuacacgagcaacccgaccaccuuccaccuggacggggaggugaucaccuucgacaaccucaagacgcugcugucccuccgcgaggugcggaccaucaaggucuucaccaccguggacaacaucaaccugcacacccagguggucgacaugagcaugaccuacggccagcaguucggccccaccuaccuggacggggccgacgugaccaagaucaagccccacaacucccacgagggcaagacguucuacgugcucccgaacgacgacacccugcgcgucgaggccuucgaguacuaccacaccaccgaccccagcuuccuggggcgguacauguccgcccucaaccacacgaagaacuggaaguacccccaggugaacggccugaccagcaucaagugggccgacaacaacugcuaccuggcgaccgcccuccugacccugcagcagaucgagcucaaguucaacccgcccgcccugcaggacgccuacuaccgcgcgcgggccggggaggccgccaacuucugcgcccugauccucgcguacugcaacaagacggugggcgagcugggcgacguccgcgagaccauguccuaccuguuccagcacgccaaccucgacagcugcaagcgggugcugaacgucgugugcaagaccugcgggcagcagcagaccacccugaagggcguggaggccgucauguacauggggacgcucuccuacgagcaguucaagaagggcgugcagauccccugcacgugcgggaagcaggccaccaaguaccuggugcagcaggagagccccuucgucaugauguccgcgcccccggcccaguacgagcugaagcacggcaccuucacgugcgccagcgaguacaccggcaacuaccagugcgggcacuacaagcacaucaccuccaaggagacccucuacugcaucgacggcgcccugcugaccaagagcagcgaguacaaggggcccaucaccgacguguucuacaaggagaacuccuacaccaccacgaucaagcccgugaccuacaagcucgacggcgucgugugcaccgagaucgaccccaagcuggacaacuacuacaagaaggacaacagcuacuucaccgagcagccgaucgaccuggugcccaaccagcccuaccccaacgccuccuucgacaacuucaaguucgucugcgacaacaucaaguucgccgacgaccucaaccagcugacgggguacaagaagccggcgagccgcgagcugaaggugaccuucuuccccgaccucaacggcgacguggucgccaucgacuacaagcacuacacccccuccuucaagaagggcgccaagcugcugcacaagcccaucguguggcacgugaacaacgccaccaacaaggcgacguacaagccgaacaccuggugcauccggugccucuggagcaccaagcccgucgagaccuccaacagcuucgacgugcugaaguccgaggacgcccaggggauggacaaccuggccugcgaggaccucaagcccgugagcgaggaggucguggagaaccccacgauccagaaggacgugcuggagugcaacgucaagaccaccgagguggugggcgacaucauccugaagccggccaacaacucccucaagaucaccgaggaggucgggcacacggaccugauggccgcguacguggacaacagcucccugaccaucaagaagcccaacgagcucagccgcgugcugggccugaagacccucgccacccacgggcuggccgccgucaacuccgugcccugggacacgaucgccaacuacgcgaagccguuccugaacaagguggucagcaccaccaccaacaucgugacgcgcugccucaaccgggugugcaccaacuacaugcccuacuucuucacccugcugcuccagcugugcaccuucacgcgcuccaccaacagccggaucaaggccuccaugcccaccaccaucgccaagaacaccgucaagagcgugggcaaguucugccuggaggccagcuucaacuaccucaagucccccaacuucagcaagcugaucaacaucaucaucugguuccugcuccuguccgugugccugggcagccucaucuacuccacggccgcgcuggggguccugaugagcaaccucggcaugccguccuacugcaccggguaccgcgagggcuaccugaacagcaccaacgugaccaucgccacguacugcaccggcuccauccccugcagcgugugccuguccgggcucgacagccuggacaccuaccccucccuggagaccauccagaucacgaucagcuccuucaagugggaccucaccgccuucggccuggucgccgagugguuccuggccuacauccucuucacccgguucuucuacgugcuggggcuggcggccaucaugcagcuguucuucagcuacuucgccgugcacuucaucuccaacagcuggcucauguggcugaucaucaaccugguccagauggcccccaucuccgcgauggugcgcauguacaucuucuucgccagcuucuacuacguguggaaguccuacguccacgugguggacggcugcaacagcagcacgugcaugaugugcuacaagcggaaccgcgccacgcgggucgagugcaccaccaucgugaacgggguccgccgguccuucuacguguacgccaacggcggcaagggguucugcaagcuccacaacuggaacugcgugaacugcgacaccuucugcgccggcagcacguucaucuccgacgaggucgcgcgcgaccugagccugcaguucaagcggccgaucaaccccaccgaccaguccagcuacaucguggacuccgugaccgucaagaacgggagcauccaccucuacuucgacaaggccggccagaagaccuacgagcgccacucccugagccacuucgugaaccuggacaaccuccgggccaacaacacgaaggggucccugcccaucaacgugaucgucuucgacggcaagagcaagugcgaggaguccagcgccaaguccgccagcguguacuacucccagcugaugugccagcccauccuccugcuggaccaggcgcucgugagcgacgucggcgacagcgccgagguggccgugaagauguucgacgccuacgucagcaccuucuccagcaccuucaacgugccgauggagaagcugaagacccugguggccacggcggaggccgagcucgccaagaacgucucccuggacaacgugcugagcaccuucaucuccgccgcgcgccagggguucguggacagcgacgucgagaccaaggacgugguggagugccucaagcugucccaccagagcgacaucgaggucaccggcgacuccugcaacaacuacaugcugacguacaacaagguggagaacaugacgccccgggaccucggggccugcaucgacugcagcgcccgccacaucaacgcccagguggccaagucccacaacaucgcgcugaucuggaacgucaaggacuucaugagccuguccgagcagcuccggaagcagauccgcagcgccgccaagaagaacaaccugcccuucaagcugaccugcgccaccacccgccagguggugaacgucgugaccaccaagaucgcccucaagggcgggugaggacuaguuauaagacugacuagcccgaugggccucccaacgggcccuccuccccuccuugcaccgagauuaauaaaaaaaaaaaaaaaaaaaaaaaaaaaaaaaaaaaaaaaaaaaaaaaaaaaaaaaaaaaaaaaaugcaucccccccccccccccccccccccccccccccaaaggcucuuuucagagccaccagaauu

SEQ ID NO: 28448 - RNA, 6058 nt, Artificial Sequence
  SARS-CoV-2/Wuhan-Hu-1__NC_045512.2/MN908947.2__non-structural protein 3 (NSP3) mRNA gc (1-1946)(A489S_P1229L_P1470S_A1712V)
aggagaaagcuuaccauggcccccaccaaggugaccuucggcgacgacaccgucaucgaggugcagggguacaagagcgugaacaucaccuucgagcuggacgagcgcaucgacaagguccucaacgagaagugcuccgccuacaccguggagcugggcaccgaggugaacgaguucgcgugcgucguggccgacgccgugaucaagacgcugcagccggucagcgagcuccugacgccccuggggaucgaccucgacgagugguccauggccaccuacuaccuguucgacgagagcggcgaguucaagcuggccucccacauguacugcagcuucuacccgcccgacgaggacgaggaggagggggacugcgaggaggaggaguucgagcccuccacccaguacgaguacggcacggaggacgacuaccagggcaagccccucgaguucggggcgaccagcgccgcccugcagcccgaggaggagcaggaggaggacuggcuggacgacgacucccagcagaccgugggccagcaggacgggagcgaggacaaccagaccacgaccauccagaccaucguggagguccagccccagcucgagauggagcugaccccgguggugcagacgaucgaggucaacuccuucagcggcuaccugaagcucaccgacaacguguacaucaagaacgccgacaucguggaggaggcgaagaaggucaagcccaccgugguggucaacgccgccaacguguaccugaagcacgggggcggcguggccggggcccugaacaaggcgaccaacaacgccaugcaggucgaguccgacgacuacaucgccacgaacggcccccucaaggucgggggcagcugcgugcuguccggccacaaccuggccaagcacugccuccacgugguggggcccaacgucaacaagggcgaggacauccagcugcucaagagcgccuacgagaacuucaaccagcacgaggugcugcuggcgccgcugcucuccgccgggaucuucggcgccgaccccauccacagccugcgggugugcgucgacaccgugcgcaccaacguguaccuggccgucuucgacaagaaccucuacgacaagcugguguccagcuuccuggagaugaaguccgagaagcaggucgagcagaagaucgccgagauccccaaggaggaggugaagcccuucaucaccgagagcaagccgagcguggagcagcggaagcaggacgacaagaagaucaaggcgugcguggaggaggucacgaccacccucgaggagaccaaguuccugacggagaaccugcuccuguacaucgacaucaacgggaaccugcaccccgacuccgccacccucgugagcgacaucgacaucaccuuccugaagaaggacgcccccuacaucgugggcgacgucgugcaggagggcgugcugaccgccgucgugauccccacgaagaagagcgggggcaccaccgagaugcucgcgaaggcccugcgcaaggugccgaccgacaacuacaucacgaccuaccccgggcagggccugaacggguacaccgucgaggaggccaagaccgugcucaagaagugcaaguccgccuucuacauccugcccagcaucaucuccaacgagaagcaggagauccugggcaccgugagcuggaaccugcgggagaugcucgcgcacgccgaggagacgcgcaagcugaugcccgucugcguggagaccaaggccaucguguccaccauccagcggaaguacaagggcaucaagauccaggagggggucguggacuacggcgcccgcuucuacuucuacaccagcaagacgaccguggccucccugaucaacacccucaacgaccugaacgagacccuggucacgaugccgcucggguacgugacccacggccugaaccuggaggaggcggcccgguacaugcgcagccucaaggugcccgccaccgucuccgugagcucccccgacgccgugaccgccuacaacggguaccugacgagcuccagcaagacccccgaggagcacuucaucgagaccaucucccuggcgggcagcuacaaggacuggagcuacuccggccagagcacccagcucgggaucgaguuccugaagcggggcgacaaguccgucuacuacacgagcaacccgaccaccuuccaccuggacggggaggugaucaccuucgacaaccucaagacgcugcugucccuccgcgaggugcggaccaucaaggucuucaccaccguggacaacaucaaccugcacacccagguggucgacaugagcaugaccuacggccagcaguucggccccaccuaccuggacggggccgacgugaccaagaucaagccccacaacucccacgagggcaagacguucuacgugcucccgaacgacgacacccugcgcgucgaggccuucgaguacuaccacaccaccgaccccagcuuccuggggcgguacauguccgcccucaaccacacgaagaaguggaaguacccccaggugaacggccugaccagcaucaagugggccgacaacaacugcuaccuggcgaccgcccuccugacccugcagcagaucgagcucaaguucaacccgcccgcccugcaggacgccuacuaccgcgcgcgggccggggaggccgccaacuucugcgcccugauccucgcguacugcaacaagacggugggcgagcugggcgacguccgcgagaccauguccuaccuguuccagcacgccaaccucgacagcugcaagcgggugcugaacgucgugugcaagaccugcgggcagcagcagaccacccugaagggcguggaggccgucauguacauggggacgcucuccuacgagcaguucaagaagggcgugcagauccccugcacgugcgggaagcaggccaccaaguaccuggugcagcaggagagccccuucgucaugauguccgcgcccccggcccaguacgagcugaagcacggcaccuucacgugcgccagcgaguacaccggcaacuaccagugcgggcacuacaagcacaucaccuccaaggagacccucuacugcaucgacggcgcccugcugaccaagagcagcgaguacaaggggcccaucaccgacguguucuacaaggagaacuccuacaccaccacgaucaagcccgugaccuacaagcucgacggcgucgugugcaccgagaucgaccccaagcuggacaacuacuacaagaaggacaacagcuacuucaccgagcagccgaucgaccuggugcccaaccagcccuaccccaacgccuccuucgacaacuucaaguucgucugcgacaacaucaaguucgccgacgaccucaaccagcugacgggguacaagaagccggcgagccgcgagcugaaggugaccuucuuccccgaccucaacggcgacguggucgccaucgacuacaagcacuacacccccuccuucaagaagggcgccaagcugcugcacaagcccaucguguggcacgugaacaacgccaccaacaaggcgacguacaagccgaacaccuggugcauccggugccucuggagcaccaagcccgucgagaccuccaacagcuucgacgugcugaaguccgaggacgcccaggggauggacaaccuggccugcgaggaccucaagcuggugagcgaggaggucguggagaaccccacgauccagaaggacgugcuggagugcaacgucaagaccaccgagguggugggcgacaucauccugaagccggccaacaacucccucaagaucaccgaggaggucgggcacacggaccugauggccgcguacguggacaacagcucccugaccaucaagaagcccaacgagcucagccgcgugcugggccugaagacccucgccacccacgggcuggccgccgucaacuccgugcccugggacacgaucgccaacuacgcgaagccguuccugaacaagguggucagcaccaccaccaacaucgugacgcgcugccucaaccgggugugcaccaacuacaugcccuacuucuucacccugcugcuccagcugugcaccuucacgcgcuccaccaacagccggaucaaggccuccaugcccaccaccaucgccaagaacaccgucaagagcgugggcaaguucugccuggaggccagcuucaacuaccucaagucccccaacuucagcaagcugaucaacaucaucaucugguuccugcuccuguccgugugccugggcagccucaucuacuccacggccgcgcuggggguccugaugagcaaccucggcaugccguccuacugcaccggguaccgcgagggcuaccugaacagcaccaacgugaccaucgccacguacugcaccggcuccaucagcugcagcgugugccuguccgggcucgacagccuggacaccuaccccucccuggagaccauccagaucacgaucagcuccuucaagugggaccucaccgccuucggccuggucgccgagugguuccuggccuacauccucuucacccgguucuucuacgugcuggggcuggcggccaucaugcagcuguucuucagcuacuucgccgugcacuucaucuccaacagcuggcucauguggcugaucaucaaccugguccagauggcccccaucuccgcgauggugcgcauguacaucuucuucgccagcuucuacuacguguggaaguccuacguccacgugguggacggcugcaacagcagcacgugcaugaugugcuacaagcggaaccgcgccacgcgggucgagugcaccaccaucgugaacgggguccgccgguccuucuacguguacgccaacggcggcaagggguucugcaagcuccacaacuggaacugcgugaacugcgacaccuucugcgccggcagcacguucaucuccgacgaggucgcgcgcgaccugagccugcaguucaagcggccgaucaaccccaccgaccaguccagcuacaucguggacuccgugaccgucaagaacgggagcauccaccucuacuucgacaaggccggccagaagaccuacgagcgccacucccugagccacuucgugaaccuggacaaccuccgggugaacaacacgaaggggucccugcccaucaacgugaucgucuucgacggcaagagcaagugcgaggaguccagcgccaaguccgccagcguguacuacucccagcugaugugccagcccauccuccugcuggaccaggcgcucgugagcgacgucggcgacagcgccgagguggccgugaagauguucgacgccuacgucaacaccuucuccagcaccuucaacgugccgauggagaagcugaagacccugguggccacggcggaggccgagcucgccaagaacgucucccuggacaacgugcugagcaccuucaucuccgccgcgcgccagggguucguggacagcgacgucgagaccaaggacgugguggagugccucaagcugucccaccagagcgacaucgaggucaccggcgacuccugcaacaacuacaugcugacguacaacaagguggagaacaugacgccccgggaccucggggccugcaucgacugcagcgcccgccacaucaacgcccagguggccaagucccacaacaucgcgcugaucuggaacgucaaggacuucaugagccuguccgagcagcuccggaagcagauccgcagcgccgccaagaagaacaaccugcccuucaagcugaccugcgccaccacccgccagguggugaacgucgugaccaccaagaucgcccucaagggcgggugaggacuaguuauaagacugacuagcccgaugggccucccaacgggcccuccuccccuccuugcaccgagauuaauaaaaaaaaaaaaaaaaaaaaaaaaaaaaaaaaaaaaaaaaaaaaaaaaaaaaaaaaaaaaaaaaugcaucccccccccccccccccccccccccccccccaaaggcucuuuucagagccaccagaauu

SEQ ID NO: 28449 - RNA, 6058 nt, Artificial Sequence
  SARS-CoV-2/Wuhan-Hu-1__NC_045512.2/MN908947.2__non-structural protein 3 (NSP3) mRNA gc (1-1946)(S795L_K838N)
aggagaaagcuuaccauggcccccaccaaggugaccuucggcgacgacaccgucaucgaggugcagggguacaagagcgugaacaucaccuucgagcuggacgagcgcaucgacaagguccucaacgagaagugcuccgccuacaccguggagcugggcaccgaggugaacgaguucgcgugcgucguggccgacgccgugaucaagacgcugcagccggucagcgagcuccugacgccccuggggaucgaccucgacgagugguccauggccaccuacuaccuguucgacgagagcggcgaguucaagcuggccucccacauguacugcagcuucuacccgcccgacgaggacgaggaggagggggacugcgaggaggaggaguucgagcccuccacccaguacgaguacggcacggaggacgacuaccagggcaagccccucgaguucggggcgaccagcgccgcccugcagcccgaggaggagcaggaggaggacuggcuggacgacgacucccagcagaccgugggccagcaggacgggagcgaggacaaccagaccacgaccauccagaccaucguggagguccagccccagcucgagauggagcugaccccgguggugcagacgaucgaggucaacuccuucagcggcuaccugaagcucaccgacaacguguacaucaagaacgccgacaucguggaggaggcgaagaaggucaagcccaccgugguggucaacgccgccaacguguaccugaagcacgggggcggcguggccggggcccugaacaaggcgaccaacaacgccaugcaggucgaguccgacgacuacaucgccacgaacggcccccucaaggucgggggcagcugcgugcuguccggccacaaccuggccaagcacugccuccacgugguggggcccaacgucaacaagggcgaggacauccagcugcucaagagcgccuacgagaacuucaaccagcacgaggugcugcuggcgccgcugcucuccgccgggaucuucggcgccgaccccauccacagccugcgggugugcgucgacaccgugcgcaccaacguguaccuggccgucuucgacaagaaccucuacgacaagcugguguccagcuuccuggagaugaaguccgagaagcaggucgagcagaagaucgccgagauccccaaggaggaggugaagcccuucaucaccgagagcaagccgagcguggagcagcggaagcaggacgacaagaagaucaaggcgugcguggaggaggucacgaccacccucgaggagaccaaguuccugacggagaaccugcuccuguacaucgacaucaacgggaaccugcaccccgacuccgccacccucgugagcgacaucgacaucaccuuccugaagaaggacgcccccuacaucgugggcgacgucgugcaggagggcgugcugaccgccgucgugauccccacgaagaaggccgggggcaccaccgagaugcucgcgaaggcccugcgcaaggugccgaccgacaacuacaucacgaccuaccccgggcagggccugaacggguacaccgucgaggaggccaagaccgugcucaagaagugcaaguccgccuucuacauccugcccagcaucaucuccaacgagaagcaggagauccugggcaccgugagcuggaaccugcgggagaugcucgcgcacgccgaggagacgcgcaagcugaugcccgucugcguggagaccaaggccaucguguccaccauccagcggaaguacaagggcaucaagauccaggagggggucguggacuacggcgcccgcuucuacuucuacaccagcaagacgaccguggccucccugaucaacacccucaacgaccugaacgagacccuggucacgaugccgcucggguacgugacccacggccugaaccuggaggaggcggcccgguacaugcgcagccucaaggugcccgccaccgucuccgugagcucccccgacgccgugaccgccuacaacggguaccugacgagcuccagcaagacccccgaggagcacuucaucgagaccaucucccuggcgggcagcuacaaggacuggagcuacuccggccagagcacccagcucgggaucgaguuccugaagcggggcgacaaguccgucuacuacacgagcaacccgaccaccuuccaccuggacggggaggugaucaccuucgacaaccucaagacgcugcugucccuccgcgaggugcggaccaucaaggucuucaccaccguggacaacaucaaccugcacacccagguggucgacaugagcaugaccuacggccagcaguucggccccaccuaccuggacggggccgacgugaccaagaucaagccccacaaccugcacgagggcaagacguucuacgugcucccgaacgacgacacccugcgcgucgaggccuucgaguacuaccacaccaccgaccccagcuuccuggggcgguacauguccgcccucaaccacacgaagaacuggaaguacccccaggugaacggccugaccagcaucaagugggccgacaacaacugcuaccuggcgaccgcccuccugacccugcagcagaucgagcucaaguucaacccgcccgcccugcaggacgccuacuaccgcgcgcgggccggggaggccgccaacuucugcgcccugauccucgcguacugcaacaagacggugggcgagcugggcgacguccgcgagaccauguccuaccuguuccagcacgccaaccucgacagcugcaagcgggugcugaacgucgugugcaagaccugcgggcagcagcagaccacccugaagggcguggaggccgucauguacauggggacgcucuccuacgagcaguucaagaagggcgugcagauccccugcacgugcgggaagcaggccaccaaguaccuggugcagcaggagagccccuucgucaugauguccgcgcccccggcccaguacgagcugaagcacggcaccuucacgugcgccagcgaguacaccggcaacuaccagugcgggcacuacaagcacaucaccuccaaggagacccucuacugcaucgacggcgcccugcugaccaagagcagcgaguacaaggggcccaucaccgacguguucuacaaggagaacuccuacaccaccacgaucaagcccgugaccuacaagcucgacggcgucgugugcaccgagaucgaccccaagcuggacaacuacuacaagaaggacaacagcuacuucaccgagcagccgaucgaccuggugcccaaccagcccuaccccaacgccuccuucgacaacuucaaguucgucugcgacaacaucaaguucgccgacgaccucaaccagcugacgggguacaagaagccggcgagccgcgagcugaaggugaccuucuuccccgaccucaacggcgacguggucgccaucgacuacaagcacuacacccccuccuucaagaagggcgccaagcugcugcacaagcccaucguguggcacgugaacaacgccaccaacaaggcgacguacaagccgaacaccuggugcauccggugccucuggagcaccaagcccgucgagaccuccaacagcuucgacgugcugaaguccgaggacgcccaggggauggacaaccuggccugcgaggaccucaagcccgugagcgaggaggucguggagaaccccacgauccagaaggacgugcuggagugcaacgucaagaccaccgagguggugggcgacaucauccugaagccggccaacaacucccucaagaucaccgaggaggucgggcacacggaccugauggccgcguacguggacaacagcucccugaccaucaagaagcccaacgagcucagccgcgugcugggccugaagacccucgccacccacgggcuggccgccgucaacuccgugcccugggacacgaucgccaacuacgcgaagccguuccugaacaagguggucagcaccaccaccaacaucgugacgcgcugccucaaccgggugugcaccaacuacaugcccuacuucuucacccugcugcuccagcugugcaccuucacgcgcuccaccaacagccggaucaaggccuccaugcccaccaccaucgccaagaacaccgucaagagcgugggcaaguucugccuggaggccagcuucaacuaccucaagucccccaacuucagcaagcugaucaacaucaucaucugguuccugcuccuguccgugugccugggcagccucaucuacuccacggccgcgcuggggguccugaugagcaaccucggcaugccguccuacugcaccggguaccgcgagggcuaccugaacagcaccaacgugaccaucgccacguacugcaccggcuccauccccugcagcgugugccuguccgggcucgacagccuggacaccuaccccucccuggagaccauccagaucacgaucagcuccuucaagugggaccucaccgccuucggccuggucgccgagugguuccuggccuacauccucuucacccgguucuucuacgugcuggggcuggcggccaucaugcagcuguucuucagcuacuucgccgugcacuucaucuccaacagcuggcucauguggcugaucaucaaccugguccagauggcccccaucuccgcgauggugcgcauguacaucuucuucgccagcuucuacuacguguggaaguccuacguccacgugguggacggcugcaacagcagcacgugcaugaugugcuacaagcggaaccgcgccacgcgggucgagugcaccaccaucgugaacgggguccgccgguccuucuacguguacgccaacggcggcaagggguucugcaagcuccacaacuggaacugcgugaacugcgacaccuucugcgccggcagcacguucaucuccgacgaggucgcgcgcgaccugagccugcaguucaagcggccgaucaaccccaccgaccaguccagcuacaucguggacuccgugaccgucaagaacgggagcauccaccucuacuucgacaaggccggccagaagaccuacgagcgccacucccugagccacuucgugaaccuggacaaccuccgggccaacaacacgaaggggucccugcccaucaacgugaucgucuucgacggcaagagcaagugcgaggaguccagcgccaaguccgccagcguguacuacucccagcugaugugccagcccauccuccugcuggaccaggcgcucgugagcgacgucggcgacagcgccgagguggccgugaagauguucgacgccuacgucaacaccuucuccagcaccuucaacgugccgauggagaagcugaagacccugguggccacggcggaggccgagcucgccaagaacgucucccuggacaacgugcugagcaccuucaucuccgccgcgcgccagggguucguggacagcgacgucgagaccaaggacgugguggagugccucaagcugucccaccagagcgacaucgaggucaccggcgacuccugcaacaacuacaugcugacguacaacaagguggagaacaugacgccccgggaccucggggccugcaucgacugcagcgcccgccacaucaacgcccagguggccaagucccacaacaucgcgcugaucuggaacgucaaggacuucaugagccuguccgagcagcuccggaagcagauccgcagcgccgccaagaagaacaaccugcccuucaagcugaccugcgccaccacccgccagguggugaacgucgugaccaccaagaucgcccucaagggcgggugaggacuaguuauaagacugacuagcccgaugggccucccaacgggcccuccuccccuccuugcaccgagauuaauaaaaaaaaaaaaaaaaaaaaaaaaaaaaaaaaaaaaaaaaaaaaaaaaaaaaaaaaaaaaaaaaugcaucccccccccccccccccccccccccccccccaaaggcucuuuucagagccaccagaauu

SEQ ID NO: 28450 - RNA, 6058 nt, Artificial Sequence
  SARS-CoV-2/Wuhan-Hu-1__NC_045512.2/MN908947.2__non-structural protein 3 (NSP3) mRNA gc (1-1946)(A42V_T429I_D822N_P1470S)
aggagaaagcuuaccauggcccccaccaaggugaccuucggcgacgacaccgucaucgaggugcagggguacaagagcgugaacaucaccuucgagcuggacgagcgcaucgacaagguccucaacgagaagugcuccguguacaccguggagcugggcaccgaggugaacgaguucgcgugcgucguggccgacgccgugaucaagacgcugcagccggucagcgagcuccugacgccccuggggaucgaccucgacgagugguccauggccaccuacuaccuguucgacgagagcggcgaguucaagcuggccucccacauguacugcagcuucuacccgcccgacgaggacgaggaggagggggacugcgaggaggaggaguucgagcccuccacccaguacgaguacggcacggaggacgacuaccagggcaagccccucgaguucggggcgaccagcgccgcccugcagcccgaggaggagcaggaggaggacuggcuggacgacgacucccagcagaccgugggccagcaggacgggagcgaggacaaccagaccacgaccauccagaccaucguggagguccagccccagcucgagauggagcugaccccgguggugcagacgaucgaggucaacuccuucagcggcuaccugaagcucaccgacaacguguacaucaagaacgccgacaucguggaggaggcgaagaaggucaagcccaccgugguggucaacgccgccaacguguaccugaagcacgggggcggcguggccggggcccugaacaaggcgaccaacaacgccaugcaggucgaguccgacgacuacaucgccacgaacggcccccucaaggucgggggcagcugcgugcuguccggccacaaccuggccaagcacugccuccacgugguggggcccaacgucaacaagggcgaggacauccagcugcucaagagcgccuacgagaacuucaaccagcacgaggugcugcuggcgccgcugcucuccgccgggaucuucggcgccgaccccauccacagccugcgggugugcgucgacaccgugcgcaccaacguguaccuggccgucuucgacaagaaccucuacgacaagcugguguccagcuuccuggagaugaaguccgagaagcaggucgagcagaagaucgccgagauccccaaggaggaggugaagcccuucaucaccgagagcaagccgagcguggagcagcggaagcaggacgacaagaagaucaaggcgugcguggaggaggucacgaccacccucgaggagaucaaguuccugacggagaaccugcuccuguacaucgacaucaacgggaaccugcaccccgacuccgccacccucgugagcgacaucgacaucaccuuccugaagaaggacgcccccuacaucgugggcgacgucgugcaggagggcgugcugaccgccgucgugauccccacgaagaaggccgggggcaccaccgagaugcucgcgaaggcccugcgcaaggugccgaccgacaacuacaucacgaccuaccccgggcagggccugaacggguacaccgucgaggaggccaagaccgugcucaagaagugcaaguccgccuucuacauccugcccagcaucaucuccaacgagaagcaggagauccugggcaccgugagcuggaaccugcgggagaugcucgcgcacgccgaggagacgcgcaagcugaugcccgucugcguggagaccaaggccaucguguccaccauccagcggaaguacaagggcaucaagauccaggagggggucguggacuacggcgcccgcuucuacuucuacaccagcaagacgaccguggccucccugaucaacacccucaacgaccugaacgagacccuggucacgaugccgcucggguacgugacccacggccugaaccuggaggaggcggcccgguacaugcgcagccucaaggugcccgccaccgucuccgugagcucccccgacgccgugaccgccuacaacggguaccugacgagcuccagcaagacccccgaggagcacuucaucgagaccaucucccuggcgggcagcuacaaggacuggagcuacuccggccagagcacccagcucgggaucgaguuccugaagcggggcgacaaguccgucuacuacacgagcaacccgaccaccuuccaccuggacggggaggugaucaccuucgacaaccucaagacgcugcugucccuccgcgaggugcggaccaucaaggucuucaccaccguggacaacaucaaccugcacacccagguggucgacaugagcaugaccuacggccagcaguucggccccaccuaccuggacggggccgacgugaccaagaucaagccccacaacucccacgagggcaagacguucuacgugcucccgaacgacgacacccugcgcgucgaggccuucgaguacuaccacaccaccaaccccagcuuccuggggcgguacauguccgcccucaaccacacgaagaaguggaaguacccccaggugaacggccugaccagcaucaagugggccgacaacaacugcuaccuggcgaccgcccuccugacccugcagcagaucgagcucaaguucaacccgcccgcccugcaggacgccuacuaccgcgcgcgggccggggaggccgccaacuucugcgcccugauccucgcguacugcaacaagacggugggcgagcugggcgacguccgcgagaccauguccuaccuguuccagcacgccaaccucgacagcugcaagcgggugcugaacgucgugugcaagaccugcgggcagcagcagaccacccugaagggcguggaggccgucauguacauggggacgcucuccuacgagcaguucaagaagggcgugcagauccccugcacgugcgggaagcaggccaccaaguaccuggugcagcaggagagccccuucgucaugauguccgcgcccccggcccaguacgagcugaagcacggcaccuucacgugcgccagcgaguacaccggcaacuaccagugcgggcacuacaagcacaucaccuccaaggagacccucuacugcaucgacggcgcccugcugaccaagagcagcgaguacaaggggcccaucaccgacguguucuacaaggagaacuccuacaccaccacgaucaagcccgugaccuacaagcucgacggcgucgugugcaccgagaucgaccccaagcuggacaacuacuacaagaaggacaacagcuacuucaccgagcagccgaucgaccuggugcccaaccagcccuaccccaacgccuccuucgacaacuucaaguucgucugcgacaacaucaaguucgccgacgaccucaaccagcugacgggguacaagaagccggcgagccgcgagcugaaggugaccuucuuccccgaccucaacggcgacguggucgccaucgacuacaagcacuacacccccuccuucaagaagggcgccaagcugcugcacaagcccaucguguggcacgugaacaacgccaccaacaaggcgacguacaagccgaacaccuggugcauccggugccucuggagcaccaagcccgucgagaccuccaacagcuucgacgugcugaaguccgaggacgcccaggggauggacaaccuggccugcgaggaccucaagcccgugagcgaggaggucguggagaaccccacgauccagaaggacgugcuggagugcaacgucaagaccaccgagguggugggcgacaucauccugaagccggccaacaacucccucaagaucaccgaggaggucgggcacacggaccugauggccgcguacguggacaacagcucccugaccaucaagaagcccaacgagcucagccgcgugcugggccugaagacccucgccacccacgggcuggccgccgucaacuccgugcccugggacacgaucgccaacuacgcgaagccguuccugaacaagguggucagcaccaccaccaacaucgugacgcgcugccucaaccgggugugcaccaacuacaugcccuacuucuucacccugcugcuccagcugugcaccuucacgcgcuccaccaacagccggaucaaggccuccaugcccaccaccaucgccaagaacaccgucaagagcgugggcaaguucugccuggaggccagcuucaacuaccucaagucccccaacuucagcaagcugaucaacaucaucaucugguuccugcuccuguccgugugccugggcagccucaucuacuccacggccgcgcuggggguccugaugagcaaccucggcaugccguccuacugcaccggguaccgcgagggcuaccugaacagcaccaacgugaccaucgccacguacugcaccggcuccaucagcugcagcgugugccuguccgggcucgacagccuggacaccuaccccucccuggagaccauccagaucacgaucagcuccuucaagugggaccucaccgccuucggccuggucgccgagugguuccuggccuacauccucuucacccgguucuucuacgugcuggggcuggcggccaucaugcagcuguucuucagcuacuucgccgugcacuucaucuccaacagcuggcucauguggcugaucaucaaccugguccagauggcccccaucuccgcgauggugcgcauguacaucuucuucgccagcuucuacuacguguggaaguccuacguccacgugguggacggcugcaacagcagcacgugcaugaugugcuacaagcggaaccgcgccacgcgggucgagugcaccaccaucgugaacgggguccgccgguccuucuacguguacgccaacggcggcaagggguucugcaagcuccacaacuggaacugcgugaacugcgacaccuucugcgccggcagcacguucaucuccgacgaggucgcgcgcgaccugagccugcaguucaagcggccgaucaaccccaccgaccaguccagcuacaucguggacuccgugaccgucaagaacgggagcauccaccucuacuucgacaaggccggccagaagaccuacgagcgccacucccugagccacuucgugaaccuggacaaccuccgggccaacaacacgaaggggucccugcccaucaacgugaucgucuucgacggcaagagcaagugcgaggaguccagcgccaaguccgccagcguguacuacucccagcugaugugccagcccauccuccugcuggaccaggcgcucgugagcgacgucggcgacagcgccgagguggccgugaagauguucgacgccuacgucaacaccuucuccagcaccuucaacgugccgauggagaagcugaagacccugguggccacggcggaggccgagcucgccaagaacgucucccuggacaacgugcugagcaccuucaucuccgccgcgcgccagggguucguggacagcgacgucgagaccaaggacgugguggagugccucaagcugucccaccagagcgacaucgaggucaccggcgacuccugcaacaacuacaugcugacguacaacaagguggagaacaugacgccccgggaccucggggccugcaucgacugcagcgcccgccacaucaacgcccagguggccaagucccacaacaucgcgcugaucuggaacgucaaggacuucaugagccuguccgagcagcuccggaagcagauccgcagcgccgccaagaagaacaaccugcccuucaagcugaccugcgccaccacccgccagguggugaacgucgugaccaccaagaucgcccucaagggcgggugaggacuaguuauaagacugacuagcccgaugggccucccaacgggcccuccuccccuccuugcaccgagauuaauaaaaaaaaaaaaaaaaaaaaaaaaaaaaaaaaaaaaaaaaaaaaaaaaaaaaaaaaaaaaaaaaugcaucccccccccccccccccccccccccccccccaaaggcucuuuucagagccaccagaauu
